United States Patent Application Publication US 2020/0163878 A1 - sequence listing, part 14

SEQ ID NO: 53786 - RNA, 1410 nt, Artificial Sequence; identical to SEQ ID NO: 53742
  derived and/or modified CDS sequence (wt) from neuraminidase__InfluenzaA__AFD64339

SEQ ID NO: 53787 - RNA, 1410 nt, Artificial Sequence; identical to SEQ ID NO: 53744
  derived and/or modified CDS sequence (wt) from neuraminidase__InfluenzaA__AFD64350

SEQ ID NO: 53788 - RNA, 1410 nt, Artificial Sequence; identical to SEQ ID NO: 53742
  derived and/or modified CDS sequence (wt) from neuraminidase__InfluenzaA__AFD64361

SEQ ID NO: 53789 - RNA, 1410 nt, Artificial Sequence; identical to SEQ ID NO: 53749
  derived and/or modified CDS sequence (wt) from neuraminidase__InfluenzaA__AFD64372

SEQ ID NO: 53790 - RNA, 1410 nt, Artificial Sequence; identical to SEQ ID NO: 46237
  derived and/or modified CDS sequence (wt) from neuraminidase__InfluenzaA__AFD64383

SEQ ID NO: 53791 - RNA, 1410 nt, Artificial Sequence; identical to SEQ ID NO: 53757
  derived and/or modified CDS sequence (wt) from neuraminidase__InfluenzaA__AFD64394

SEQ ID NO: 53792 - RNA, 1410 nt, Artificial Sequence; identical to SEQ ID NO: 53760
  derived and/or modified CDS sequence (wt) from neuraminidase__InfluenzaA__AFD64405

SEQ ID NO: 53793 - RNA, 1410 nt, Artificial Sequence; identical to SEQ ID NO: 46784
  derived and/or modified CDS sequence (wt) from neuraminidase__InfluenzaA__AFD64416

SEQ ID NO: 53794 - RNA, 1410 nt, Artificial Sequence; identical to SEQ ID NO: 46784
  derived and/or modified CDS sequence (wt) from neuraminidase__InfluenzaA__AFD64427

SEQ ID NO: 53795 - RNA, 1410 nt, Artificial Sequence
  derived and/or modified CDS sequence (wt) from neuraminidase__InfluenzaA__AFD64438
augaauccaaaucaaaagauaauaacaauuggcucuguuucucucaccauugccgcaauaugcuuccuuaugcaaauugccauccugguaacuacuguaacauugcauuucaagcagcaugaaugcaacucccccccaaacaaccaaguaaugcugugugaaccaacaauaauagaaagaaacauaacagagauaguguaucugaccaacaccaccauagagaaggaaauaugccccaaccuagcagaauacagaaauuggucaaagccgcaauguaacauuacaggauuugcaccuuuuucuaaggacaauucgauucggcuuuccgcugguggggacaucugggugacaagagaaccuuaugugucaugcgauccugacaaguguuaucaauuugcccuugggcagggaacaacacuaaacaacgggcauucaaaugacacaguacaugauaggaccccuuaccggacccuauugaugaaugaauuggguguuccauuucauuugggaaccaggcaagugugcauagcaugguccagcucaaguugucacgauggaaaagcguggcugcauguuuguguaacuggggaugauaaaaaugcaacugcuagcuucauuuacaaugggaggcuuguagauaguauugguucaugguccaaaaaaauacucagaacccaggagucggaaugcguuuguaucaauggaacuuguacagugguaaugacugauggaagcgcuucaggaaaagcugauacuaaaauacuauucauugaggaggggaaaaucguucauauuagcacauugucaggaagugcucagcaugucgaggagugcuccuguuauccucgauauccuggugucagaugugucugcagagacaacuggaaaggcuccaauaggcccauuguagauauaaauguaaaggauuauagcauuguuuccaguuaugugugcucaggacuuguuggagacacacccagaaaaaacgacagcuucagcaguagccauugccuagauccuaacaaugaggaagguggucauggagugaaaggcugggccuuugaugauggaaaugacguguggaugggaagaacgaucagcgagaaguuacgcucagguuaugaaaccuucaaagucaucgaaggcugguccaaacccaacuccaaauuacagauaaauaggcaaguuauaguugaaagagguaacagguccgguuauucugguauuuucuccguugaaggcaaaagcugcaucaaucggugcuuuuauguggaguugauaaggggaaggaaagaggaaacugaagucugguggaccucaaacaguauuguuguguuuuguggcaccucagguacauauggaacaggcucauggccugauggggcggauaucaaucucaugccuauauaa

SEQ ID NO: 53796 - RNA, 1410 nt, Artificial Sequence; identical to SEQ ID NO: 46784
  derived and/or modified CDS sequence (wt) from neuraminidase__InfluenzaA__AFD64449

SEQ ID NO: 53797 - RNA, 1410 nt, Artificial Sequence; identical to SEQ ID NO: 53778
  derived and/or modified CDS sequence (wt) from neuraminidase__InfluenzaA__AFD64460

SEQ ID NO: 53798 - RNA, 1410 nt, Artificial Sequence
  derived and/or modified CDS sequence (wt) from neuraminidase__InfluenzaA__AFD98098
augaauccaaaucaaaagauaauaacgauuggcucuguuucucucaccauuuccacaauaugcuucuucaugcaaauugccaucuugauaacuacuguaacauugcauuucaagcaauaugaauucaacucccccccaaacaaccaagugaugcugugugaaccaacaauaauagaaagaaacauaacagagauaguguaucugaccaacaccaccauagagaaggaaauaugccccaaacuagcagaauacagaaauuggucaaagccgcaaugugacauuacaggauuugcaccuuuuucuaaggacaauucgauuaggcuuuccgcugguggggacaucugggugacaagagaaccuuaugugucaugcgauccugacaaguguuaucaauuugcccuuggacagggaacaacacuaaacaacgugcauucaaauaacacaguacgugauaggaccccuuaucggacccuauugaugaaugaguuagguguuccuuuucaucuggggaccaaacaagugugcauagcaugguccagcucaaguugucacgauggaaaagcauggcugcauguuuguauaacgggggaugauaaaaaugcaacugcuagcuucauuuacaaugggaagcuuguagauaguguuguuucaugguccaaagaaauccucaggacccaggagucagaaugcguuuguaucaauggaacuuguacaguaguaaugacugaugggagugcuucaggaaaagcugauacuaaaauacuauucauugaggaggggaaaaucguucauacuagcacauugucaggaagugcucagcaugucgaggagugcucuugcuauccucgauauccuggugucagaugugucugcagagacaacuggaaaggcuccaauaggcccaucguagauauaaacauaaaggaucauaguauuguuuccaguuauguguguucaggacuuguuggagacacacccagaaaaaacgacagcuccagcaguagccauuguuuggauccuaacaaugaggaagguggucauggagugaaaggcugggccuuugaugauggaaaugacguguggaugggaagaacgaucaacgagacgucacguuuaggguaugaaaccuucaaagucauugaaggcugguccaacccuaaguccaaauugcagauaaauaggcaagucauaguugacagagguaauagguccgguuauucugguauuuucucuguugaaggcaaaagcugcaucaaucggugcuuuuauguggaguugauuaggggaagaaaagaggaaacugaagucuuauggaccucaaacaguauuguuguguuuuguggcaccucagguacauauggaacaggcucauggccugauggggcggaucucaaucucaugccuauauaa

SEQ ID NO: 53799 - RNA, 1410 nt, Artificial Sequence
  derived and/or modified CDS sequence (wt) from neuraminidase__InfluenzaA__AFD98120
augaauccaaaucaaaagauaauaacgauuggcucaguuucucucaccauuuccacaauaugcuucuucaugcaaauugccaucuugauaacuacuguaacauugcauuucaagcaauaugaauucaacucccccccaaacaaccaagugaugcugugugaaccgacaauaauagaaagaaacauaacagagauaguguaucugaccaacaccaccauagagaaggaaauaugccccaaacuagcagaauacagaaauuggucaaaaccgcaaugugacauuacaggauuugcaccuuuuucuaaggacaauucgauuaggcuuuccgcugguggggacaucugggugacaagagaaccuuaugugucaugcgauccugacaaguguuaucaauuugcccuuggacagggaacaacacuaaacaacgugcauucaaauaacacaguacgugauaggaccccuuaucggacccuauugaugaaugaguuagguguuccuuuucaucuggggaccaagcaagugugcauagcaugguccagcucaaguugucacgauggaaaagcauggcugcauguuuguauaacgggggaugauaaaaaugcaacugcaagcuucauuuacaaugggaggcuuguagauaguguuguuucaugguccaaagaaauucucaggacccaggagucagaaugcguuuguaucaauggaacuuguacaguaguaaugacugauggaagugcuucaggaaaagcugauacuaaaauacuauucauugaggaggggaaaaucguucauacuagcacauugucaggaagugcucagcaugucgaggagugcucuugcuauccucgauauccuggugucagaugugucugcagagacaacuggaaaggcuccaauaggcccaucguagauauaaacauaaaggaucauagcauaguuuccaguuauguguguucaggacuuguuggagacacacccagaaaaaacgacagcuccagcaguagccauuguuuggauccuaacaaugaagaagguggucauggagugaaaggcugggccuuugaugauggaaaugacguguggaugggaagaacaaucaacgagacgucacgcuugggguaugaaaccuucaaagucauugaaggcugguccaacccuaaguccaaauugcagauaaauaggcaagucauaguugacaaagguaauagguccgguuauucugguauuuucucuguugaaggcaaaagcugcaucaaucggugcuuuuauguggaguugauuaggggaagaaaagaggaaacugaagucuuguggaccucaaacaguauuguuguguuuuguggcaccucagguacauauggaacaggcucauggccugauggggcggaccucaaucucaugccuauauaa

SEQ ID NO: 53800 - RNA, 1410 nt, Artificial Sequence
  derived and/or modified CDS sequence (wt) from neuraminidase__InfluenzaA__AFD98131
augaauccaaaucaaaagauaauaacgauuggcucuguuucucucaccauuuccacaauaugcuucuucaugcaaauugccaucuugauaacuacuguaacauugcauuucaagcaauaugaauucaacucccccccaaacaaccaagugaugcugugugaaccaacaauaauagaaagaaacauaacagagauaguguaucugaccaacaccaccauagagaaggaaauaugccccaaacuagcagaauacagaaauuggucaaagccgcaaugugacauuacaggauuugcaccuuuuucuaaggacaauucgauuaggcuuuccgcugguggggacaucugggugacaagagaaccuuaugugucaugcgauccugacaaguguuaucaauuugcccuuggacagggaacaacacuaaacaacgugcauucaaauaacacaguacgugauaggaccccuuaucggacccuauugaugaaugaguuagguguuccuuuucaucuggggaccaagcaagugugcauagcaugguccagcucaaguugucacgauggaaaagcauggcugcauguuuguauaacgggggaugauaaaaaugcaacugcuagcuucauuuacaaugggaggcuuguagauaguguuguuucaugguccaaagaaauccucaggacccaggagucagaaugcguuuguaucaauggaacuuguacaguaguaaugacugaugggagugcuucaggaaaagcugauacuaaaauacuauucauugaggaggggaaaaucguucauacuagcacauugucaggaagugcucagcaugucgaggagugcucuugcuauccucgauauccuggugucagaugugucugcagagacaacuggaaaggcuccaauaggcccaucguagauauaaacauaaaggaucauagcauuguuuccaguuauguguguucaggacuuguuggagacacacccagaaaaaacgacagcuccagcaguagccauuguuuggauccuaacaaugaagaagguggucauggagugaaaggcugggccuuugaugauggaaaugacguguggaugggaagaacgaucaacgagacgucacguuuaggguaugaaaccuucaaagucauugaaggcugguccaacccuaaguccaaauugcagauaaauaggcaagucauaguugacagagguaauagguccgguuauucugguauuuucucuguugaaggcaaaagcugcaucaaucggugcuuuuauguggaguugauuaggggaagaaaagaggaaacugaagucuuguggaccucaaacaguauuguuguguuuuguggcaccucagguacauauggaacaggcucauggccugauggggcagaccucaaucucaugccuauauaa

SEQ ID NO: 53801 - RNA, 1410 nt, Artificial Sequence; identical to SEQ ID NO: 53798
  derived and/or modified CDS sequence (wt) from neuraminidase__InfluenzaA__AFD98142

SEQ ID NO: 53802 - RNA, 1410 nt, Artificial Sequence; identical to SEQ ID NO: 53799
  derived and/or modified CDS sequence (wt) from neuraminidase__InfluenzaA__AFD98164

SEQ ID NO: 53803 - RNA, 1410 nt, Artificial Sequence
  derived and/or modified CDS sequence (wt) from neuraminidase__InfluenzaA__AFD98175
augaauccaaaucaaaagauaauaacgauuggcucuguuucucucaccauuuccacaauaugcuucuucaugcaaauugccaucuugauaacuacuguaacauugcauuucaagcaauaugaauucaacucccccccaaacaaccaagugaugcugugugaaccgacaauaauagaaagaaacauaacagagauaguguaucugaccaacaccaccauagagaaggaaauaugccccaaacuagcagaauacagaaauuggucaaaaccgcaaugugacauuacaggauuugcaccuuuuucuaaggacaauucgauuaggcuuuccgcugguggagacaucugggugacaagagaaccuuaugugucaugcgauccugacaaguguuaucaauuugcccuuggacagggaacaacacuaaacaacgugcauucaaauaacacaguacaugauaggaccccuuaucggacccuauugaugaaugaguuagguguuccuuuucaucuggggaccaagcaagugugcauagcaugguccagcucaaguugucacgauggaaaagcauggcugcauguuuguauaacgggggaugauaaaaaugcaacugcaagcuucauuuacaaugggaggcuuguagauaguguuguuucaugguccaaagaaauucucaggacccaggagucagaaugcguuuguaucaauggaacuuguacaguaguaaugacugauggaagugcuucaggaaaagcugauacuaaaauacuauucauugaggaggggaaaaucguucauacuagcacauugucaggaagugcucagcaugucgaggagugcucuugcuauccucgauauccuggugucagaugugucugcagagacaacuggaaaggcuccaauaggcccaucguagauauaaacauaaaggaucauagcauaguuuccaguuauguguguucaggacuuguuggagacacacccagaaaaaacgacagcuccagcaguagccauuguuuggauccuaacaaugaagaagguggucauggagugaaaggcugggccuuugaugauggaaaugacguauggaugggaagaacaaucaacgagacgucacgcuugggguaugaaaccuucaaagucauugaaggcugguccaacccuaaguccaaauugcagauaaauaggcaagucauaguugacaaagguaauagguccgguuauucugguauuuucucuguugaaggcaaaagcugcaucaaucggugcuuuuauguggaguugauuaggggaagaaaagaggaaacugaagucuuguggaccucaaacaguauuguuguguuuuguggcaccucagguacauauggaacaggcucauggccugauggggcggaccucaaucucaugccuauauaa

SEQ ID NO: 53804 - RNA, 1410 nt, Artificial Sequence
  derived and/or modified CDS sequence (wt) from neuraminidase__InfluenzaA__AFD98186
augaauccaaaucaaaagauaauaacgauuggcucuguuucucucaccauuuccacaauaugcuucuucaugcaaauugccaucuugauaacuacuguaacauugcauuucaagcaauaugaauucaacucccccccaaacaaccaagugaugcugugugaaccaacaauaauagaaagaaacauaacagagauaguguaucugaccaacaccaccauagagaaggaaauaugccccaaacuagcagaauacagaaauuggucaaagccgcaaugugacauuacaggauuugcaccuuuuucuaaggacaauucgauuaggcuuuccgcugguggggacaucugggugacaagagaaccuuaugugucaugcgauccugacaaguguuaucaauuugcccuuggacagggaacaacacuaaacaacgugcauucaaauaacacaguacgugauaggaccccuuaucggacccuauugaugaaugaguuagguguuccuuuucaucuggggaccaagcaaguuugcauagcaugguccagcucaaguugucacgauggaaaagcauggcugcauguuuguauaacgggggaugauaaaaaugcaacugcuagcuucauuuacaaugggaagcuuguagauaguguuguuucaugguccaaagaaauccucaggacccaggagucagaaugcguuuguaucaauggaacuuguacaguaguaaugacugaugggagugcuucaggaaaagcugauacuaaaauacuauucguugaggaggggaaaaucguucauacuagcacauugucaggaagugcucagcaugucgaggagugcucuugcuauccucgauauccuggugucagaugugucugcagagacaacuggaaaggcuccaauaggcccauaguagauauaaacauaaaggaucauagcauuauuuccaguuauguauguucaggacuuguuggagacacacccagaaaaaacgacagcuccagcaguagccauuguuuggauccuaacaaugaagaagguggucauggagugaaaggcugggccuuugaugauggaaaugacguguggaugggaagaacgaucaacgagacgucacguuuaggguaugaaaccuucaaagucauugaaggcugguccaacccuaaguccaaauugcagauaaauaggcaagucauaguugacagagguaauagguccgguuauucugguauuuucucuguugaaggcaaaagcugcaucaaucggugcuuuuauguggaguugauuaggggaagaaaggaggaaacugaagucuuguggaccucaaacaguauuguuguguuuuguggcaccucagguacauauggaacaggcucauggccugauggggcggaccucaaucucaugccuauauaa

SEQ ID NO: 53805 - RNA, 1410 nt, Artificial Sequence
  derived and/or modified CDS sequence (wt) from neuraminidase__InfluenzaA__AFD98197
augaauccaaaucaaaagauaauaacgauuggcucuguuucucucaccauuuccacaauaugcuucuucaugcaaauugccaucuugauaacuacuguaacauugcauuucaagcaauaugaauucaacucccccccaaacaaccaagugaugcugugugaaccaacaauaauagaaagaaacauaacagagauaguguaucugaccaacaccaccauagagaaggaaauaugccccaaacuagcagaauacagaaauuggucaaagccgcaaugugacauuacaggauuugcaccuuuuucuaaggacaauucgauuaggcuuuccgcugguggggacaucugggugacaagagaaccuuaugugucaugcgauccugacaaguguuaucaauuugcccuuggacagggaacaacacuaaacaacgugcauucaaauaacacaguacgugauaggaccccuuaucggacccuauugaugaaugaguuagguguuccuuuucaucuggggaccaagcaagugugcauagcaugguccagcucaagcugucacgauggaaaagcauggcugcauguuuguauaacgggggaugauaaaaaugcaacugcuagcuucauuuacaaugggaggcuuguagauaguguuguuucaugguccaaagaaauccucaggacccaggagucagaaugcguuuguaucaauggaacuuguacaguaguaaugacugaugggagugcuucaggaaaagcugauacuaaaauacuauucauugaggaggggaaaaucguucauacuagcacauugucaggaagugcucagcaugucgaggagugcucuugcuauccucgauauccuggugucagaugugucugcagagacaacuggaaaggcuccaauaggcccaucguagauauaaacauaaaggaucauagcauuguuuccaguuauguguguucaggacuuguuggagacacacccagaaaaaacgacagcuccagcaguagccauuguuuggauccuaacaaugaagaagguggucauggagugaaaggcugggccuuugaugauggaaaugacguguggaugggaagaacgaucaacgagacgucacguuuaggguaugaaaccuucaaagucauugaaggcugguccaacccuaaguccaaauugcagauaaauaggcaagucauaguugacagagggaauagguccgguuauucugguauuuucucuguugaaggcaaaagcugcaucaaucggugcuuuuauguggaguugauuaggggaagaaaagaggaaacugaagucuuguggaccucaaacaguauuguuguguuuuguggcaccucagguacauauggaacaggcucauggccugauggggcggaccucaaucucaugccuauauaa

SEQ ID NO: 53806 - RNA, 1410 nt, Artificial Sequence; identical to SEQ ID NO: 52267
  derived and/or modified CDS sequence (wt) from neuraminidase__InfluenzaA__AFD98208

SEQ ID NO: 53807 - RNA, 1410 nt, Artificial Sequence
  derived and/or modified CDS sequence (wt) from neuraminidase__InfluenzaA__AFD98218
augaauccaaaucaaaagauaauaacgauuggcucuguuucucucaccauuuccacaauaugcuucuucaugcaaauugccaucuugauaacuacugugacauugcauuucaagcaauaugaauucaacucccccccaaacaaccaagugaugcugugugaaccgacaauaauagaaagaaacauaacagagauaguguaucugaccaacaccaccauagagaaggaaauaugccccaaaccagcagaauacagaaauuggucaaaaccgcaaugugacauuacaggauuugcaccuuuuucuaaggacaauucgauuaggcuuuccgcugguggggacaucugggugacaagagaaccuuaugugucaugcgauccugacaaguguuaucaauuugcccuuggacagggaacaacacuaaacaacgugcauucaaauaacacaguacgugauaggaccccuuaucggacccuauugaugaaugaguuagguguuccuuuucaucuggggaccaagcaagugugcauagcaugguccagcucaaguugucacgauggaaaagcauggcugcauguuuguauaacgggggaugauaaaaaugcaacugcaagcuucauuuacaaugggaggcuuguagauaguguuguuucaugguccaaagaaauucucaggacccaggagucagaaugcguuuguaucaauggaacuuguacaguaguaaugacugauggaagugcuucaggaaaagcugauacuaaaauacuauucauugaggaggggaaaaucguucauacuagcacauugucaggaagugcucagcaugucgaggagugcucuugcuauccucgauauccuggugucagaugugucugcagagacaacuggaaaggcuccaauaggcccaucguagauauaaacauaaaggaucauagcauaguuuccaguuauguguguucaggacuuguuggagacacacccagaaaaaacgacagcuccagcaguagccauuguuuggauccuaacaaugaagaagguggucauggagugaaaggcugggccuuugaugauggaaaugacguguggaugggaagaacaaucgacgagacgucacgcuugggguaugaaaccuucaaagucauugaaggcugguccaacccuaaguccaaauugcagauaaauaggcaagucauaguugacaaagguaauagguccgguuauucugguauuuucucuguugaaggcaaaagcugcaucaaucggugcuuuuauguggaguugauuaggggaagaaaagaggaaacugaagucuuguggaccucaaacaguauuguugugucuuguggcaccucagguacauauggaacaggcucauggccugauggggcggaccucaaucucaugccuauauaa

SEQ ID NO: 53808 - RNA, 1410 nt, Artificial Sequence
  derived and/or modified CDS sequence (wt) from neuraminidase__InfluenzaA__AFD98229
augaauccaaaucaaaagauaauaacgauuggcucuguuucucucaccauuuccacaauaugcuucuucaugcaaauugccaucuugauaacuacuguaacauugcauuucaagcaauaugaauucaacucccccccaaacaaccaagugaugcugugugaaccaacaauaauagaaagaaacauaacagagauaguguaucugaccaacaccaccauagagaaggaaauaugccccaaacuagcagaauacagaaauuggucaaagccgcaaugugacauuacaggauuugcaccuuuuucuaaggacaauucgauuaggcuuuccgcugguggggacaucugggugacaagagaaccuuaugugucaugcgauccugacaaguguuaucaauuugcccuuggacagggaacaacacuaaacaacgugcauucaaauaacacaguacgugauaggaccccuuaucggacccuauugaugaaugaguuagguguuccuuuucaucuggggaccaagcaaguaugcauagcaugguccagcucaaguugucacgauggaaaagcauggcugcauguuuguauaacgggggaugauaaaaaugcaacugcuagcuucauuuacaaugggaggcuuguagauaguguuguuucaugguccaaagaaauccucaggacccaggagucagaaugcguuuguaucaauggaacuuguacaguaguaaugacugaugggagugcuucaggaaaagcugauacuaagauacuauucauugaggaggggaaaaucguucauacuagcacauugucaggaagugcucagcaugucgaggagugcucuugcuauccucgauauccuggugucagaugugucugcagagacaacuggaaaggcuccaauaggcccaucguagauauaaacauaaaggaucauagcauuguuuccaguuauguguguucaggacuuguuggagacacacccagaaaaaacgacagcuccagcaguagccauuguuuggauccuaacaaugaagaagguggucauggagugaaaggcugggccuuugaugauggaaaugacguguggaugggaagaacgaucaacgagacgucacguuuaggguaugaaaccuucaaagucauugaaggcugguccaacccuaaguccaaauugcagauaaauaggcaagucauaguugacagagguaauagguccgguuauucugguauuuucucuguugaaggcaaaagcugcaucaaucggugcuuuuauguggaguugauuaggggaagaaaagaggaaacugaagucuuguggaccucaaacaguauuguuguguuuuguggcaccucagguacauauggaacaggcucauggccugauggggcggaccucaaucucaugccuauauaa

SEQ ID NO: 53809 - RNA, 1410 nt, Artificial Sequence
  derived and/or modified CDS sequence (wt) from neuraminidase__InfluenzaA__AFD98240
augaauccaaaucaaaagauaauaacgauuggcucuguuucucucaccauuuccacaauaugcuucuucaugcaaauugccaucuugauaacuacuguaacauugcauuucaagcaauaugaauucaacucccccccaaacaaccaagugaugcugugugaaccaacaauaauagaaagaaacauaacagagauaguguaucugaccaacaccaccauagagaaggaaauaugccccaaacuagcagaauacagaaauuggucaaagccgcaaugugacauuacaggauuugcaccuuuuucuaaggacaauucgauuagacuuuccgcugguggggacaucugggugacaagagaaccuuaugugucaugcgauccugacaaguguuaucaauuugcccuuggacagggaacaacacuaaacaacgugcauucaaauaacacaguacgugauaggaccccuuaucggacccuauugaugaaugaguuagguguuccuuuucaucuggggaccaagcaagugugcauagcaugguccagcucaaguugucacgauggaaaagcauggcugcauguuuguauaacgggggaugauaaaaaugcaacugcuagcuucauuuacaaugggaggcuuguagauaguguuguuucaugguccaaagaaauccucaggacccaggagucagaaugcguuuguaucaauggaacuuguacaguaguaaugacugaugggagugcuucaggaaaagcugauacuaaaauacuauucauugaggaggggaaaaucguucauacuagcacauugucaggaagugcucagcaugucgaggagugcucuugcuauccucgauauccuggugucagaugugucugcagagacaacuggaaaggcuccaauaggcccaucguagauauaaacauaaaggaucauagcauuguuuccaguuauguguguucaggacuuguuggagacacacccagaaaaaacgacagcuccagcaguagccauuguuuggauccuaacaaugaagaagguggucauggagugaaaggcugggccuuugaugauggaaaugacguguggaugggaagaacgaucaacgagacgucacguuuaggguaugaaaccuucaaagucauugaaggaugguccaacccuaaguccaaauugcagauaaauaggcaagucauaguugacagagguaauagguccgguuauucugguauuuucucuguugaaggcaaaagcugcaucaaucggugcuuuuauguggaguugauuaggggaagaaaagaggaaacugaagucuuguggaccucaaacaguauuguuguguuuuguggcaccucagguacauauggaacaggcucauggccugauggggcggaccucaaucucaugccuauauaa

SEQ ID NO: 53810 - RNA, 1410 nt, Artificial Sequence
  derived and/or modified CDS sequence (wt) from neuraminidase__InfluenzaA__AFD98251
augaauccaaaucaaaagauaauaacgauuggcucaguuucucucaccauuuccacaauaugcuucuucaugcaaauugccaucuugauaacuacuguaacauugcauuucaagcaauaugaauucaacucccccccaaacaaccaagugaugcugugugaaccgacaauaauagaaagaaacauaacagagauaguguaucugaccaacaccaccauagagaaggaaauaugccccaaacuagcagaauacagaaauuggucaaaaccgcaaugugacauuacaggauuugcaccuuuuucuaaggacaauucgauuaggcuuuccgcugguggggacaucugggugacaagagaaccuuaugugucaugcgauccugacaaguguuaucaauuugcccuuggacagggaacaacacuaaacaacgugcauucaaauaacacaguacgugauaggaccccuuaucggacccuauugaugaaugaguuagguguuccuuuucaucuggggaccaagcaagugugcauagcaugguccagcucaaguugucacgaugggaaagcauggcugcauguuuguauaacgggggaugauaaaaaugcaacugcaagcuucauuuacaaugggaggcuuguagauaguguuguuucaugguccaaagaaauucucaggacccaggagucagaaugcguuuguaucaauggaacuuguacaguaguaaugacugauggaagugcuucaggaaaagcugauacuaaaauacuauucauugaggaggggaaaaucguucauacuagcacauugucaggaagugcucagcaugucgaggagugcucuugcuauccucgauauccuggugucagaugugucugcagagacaacuggaaaggcuccaauaggcccaucguagauauaaacauaaaggaucauagcauaguuuccaguuauguguguucaggacuuguuggagacacacccagaaaaaacgacagcuccagcaguagccauuguuuggauccuaacaaugaagaagguggucauggagugaaaggcugggccuuugaugauggaaaugacguguggaugggaagaacaaucaacgagacgucacgcuugggguaugaaaccuucaaagucauugaaggcugguccaacccuaaguccaaauugcagauaaauaggcaagucauaguugacaaagguaauagguccgguuauucugguauuuucucuguugaaggcaaaagcugcaucaaucggugcuuuuauguggaguugauuaggggaagaaaagaggaaacugaagucuuguggaccucaaacaguauuguuguguuuuguggcaccucagguacauauggaacaggcucauggccugauggggcggaccucaaucucaugccuauauaa

SEQ ID NO: 53811 - RNA, 1410 nt, Artificial Sequence
  derived and/or modified CDS sequence (wt) from neuraminidase__InfluenzaA__AFD98262
augaauccaaaucaaaagauaauaacgauuggcucuguuucucucaccauuuccacaauaugcuucuucaugcaaauugccaucuugauaacuacuguaacauugcauuucaagcaauaugaauucaacucccccccaaacaaccaagugaugcugugugaaccgacaauaauagaaagaaacauaacagagauaguguaucugaccaacaccaccauagagaaggaaauaugccccaaacuagcagaauacagaaauuggucaaaaccgcaaugugacauuacaggauuugcaccuuuuucuaaggacaauucgauuaggcuuuccgcugguggggacaucugggugacaagagaaccuuaugugucaugcgauccugacaaguguuaucaauuugcccuuggacagggaacaacacuaaacaacgugcauucaaauaacacaguacgugauaggaccccuuaucggacccuauugaugaaugaguuagguguuccuuuucaucuggggaccaagcaagugugcauagcaugguccagcucaaguugucacgauggaaaagcauggcugcauguuuguauaacgggggaugauaaaaaugcaacugcaagcuucauuuacaaugggaggcuuguagauaguguuguuucaugguccaaagaaauucucaggacccaggagucagaaugcguuuguaucaauggaacuuguacaguaguaaugacugauggaagugcuucaggaaaagcugauacuaaaauacuauucauugaggaggggaaaaucguucauacuagcacauugucaggaagugcucagcaugucgaggagugcucuugcuauccucgauauccuggugucagaugugucugcagagacaacuggaaaggcuccaauaggcccaucguagauauaaacauaaaggaucauagcauaguuuccaguuauguguguucaggacuuguuggagacacacccagaaaaaacgacagcuccagcaguagccauuguuuggauccuaacaaugaagaagguggucauggagugaaaggcugggccuuugaugauggaaaugacguguggaugggaagaacaaucaacgagacgucacgcuugggguaugaaaccuucaaagucauugaaggcugguccaacccuaaguccaaauugcagauaaauaggcaagucauaguugacaaagguaauagguccgguuauucugguauuuucucuguugaaggcaaaagcugcaucaaucggugcuuuuauguggaguugauuaggggaagaaaagaggaaacugaagucuuguggaccucaaacaguauuguuguguuuuguggcaccucagguacauauggaacaggcucauggccugauggggcggaccucaaucucaugccuauauaa

SEQ ID NO: 53812 - RNA, 1410 nt, Artificial Sequence
  derived and/or modified CDS sequence (wt) from neuraminidase__InfluenzaA__AFD98273
augaauccaaaccaaaagauaauaaccauugguucggucuguaugacaauuggaauggcuaacuuaauauuacaaauuggaaacauaaucucaauauggauuagccacucaauucaacuugggaaucaaaaucagauugaaacaugcaaucaaagcgucauuacuuaugaaaacaacacuuggguaaaucagacauauguuaacaucagcaacaccaacuuugcugcuggacagucagugguuuccgugaaauuagcgggcaauuccucucucugcccuguuaguggaugggcuauauacaguaaagacaacaguauaagaaucgguuccaagggggauguguuugucauaagggaaccauucauaucaugcucccccuuggaaugcagaaccuucuucuugacucaaggggccuugcuaaaugacaaacauuccaauggaaccauuaaagacaggagcccauaucgaacccuaaugagcugucccauuggugaaguucccucuccauacaacucaagauuugagucagucgcuuggucagcaagugcuugucaugauggcaucaauuggcuaacaauuggaauuucuggcccagacaauggggcaguggcuguguuaaaguacaacggcauaauaacagacacuaucaagaguuggagaaacaauauauugagaacacaagagucugaaugugcauguguaaaugguucuugcuuuaccauaaugaccgauggaccaagugauggacaggccucauacaagaucuucagaauagaaaagggaaagauagucaaaucagucgaaaugaaugccccuaauuaucacuaugaggaaugcuccuguuauccugauucuagugaaaucacaugugugugcagggauaacuggcauggcucgaaucgaccgugggugucuuucaaccagaaucuggaauaucagauaggauacauaugcagugggauuuucggagacaauccacgcccuaaugauaagacaggcaguugugguccaguaucgucuaauggagcaaauggaguaaaaggauuuucauucaaauacggcaaugguguuuggauagggagaacuaaaagcauuaguucaagaaaagguuuugagaugauuugggauccaaacggauggacugggacagacaauaacuucucaauaaagcaagauaucguaggaauaaaugaguggucaggauauagcgggaguuuuguucagcauccagaacuaacagggcuggacuguauuagaccuugcuucuggguugaacuaaucagagggcgacccaaagagaacacaaucuggacuagcgggagcagcauauccuuuugugguguaaacagugacacuguggguuggucuuggccagacggugcugaguugccauuuaccauugacaaguaa

SEQ ID NO: 53813 - RNA, 1410 nt, Artificial Sequence
  derived and/or modified CDS sequence (wt) from neuraminidase__InfluenzaA__AFD98283
augaauccaaaccaaaagauaauaaccauugguucggucuguaugacaauuggaauggcuaacuuaauauuacaaauuggaaacauaaucucaauauggauuagccacucaauucaacuugggaaucaaagccagauugaaacaugcaaucaaagcgucauuacuuaugaaaacaacacuuggguaaaucagacauauguuaacaucagcaacaccaacuuugcugcuggacagucagugguuuccgugaaauuagcgggcaauuccucucucugcccuguuaguggaugggcuauauacaguaaagacaacaguauaagaaucgguuccaagggggauguguuugucauaagggaaccauucauaucaugcucccccuuggaaugcagaaccuucuucuugacucaaggggccuugcuaaaugacaaacauuccaauggaaccauuaaagacaggagcccauaucgaacccuaaugagcuguccuauuggugaaguucccucuccauacaacucaagauuugagucagucgcuuggucagcaagugcuugucaugauggcaucaauuggcuaacaauuggaauuucuggcccagacaauggggcaguggcuguguuaaaguacaacggcauaauaacagacacuaucaagaguuggagaaacaauauauugagaacacaagagucugaaugugcauguguaaaugguucuugcuuuaccauaaugaccgauggaccaagugauggacaggccucauacaagaucuucagaauagaaaagggaaagauagucaaaucagucgaaaugaaugccccuaauuaucacuaugaggaaugcuccuguuauccugauucuagugaaaucacaugugugugcagggauaacuggcauggcucgaaucgaccgugggugucuuucaaccagaaucuggaauaucagauaggauacauaugcagugggauuuucggagacaauccacgcccuaaugauaagacaggcaguugugguccaguaucgucuaauggagcaaauggaguaaaaggauuuucauucaaauacggcaaugguguuuggauagggagaacuaaaagcauuaguucaagaaaagguuuugagaugauuugggauccaaacggauggacuggaacagacaauaacuucucaauaaagcaagauaucguaggaauaaaugaguggucaggauauagcgggaguuuuguucagcauccagaacuaacagggcuggauuguauaagaccuugcuucuggguugaacuaaucagagggcgacccaaagagaauacaaucuggacuagcgggagcagcauauccuuuugugguguaaacagugacacuguggguuggucuuggccagacggugcugaguugccauuuaccauugacaaguaa

SEQ ID NO: 53814 - RNA, 1410 nt, Artificial Sequence
  derived and/or modified CDS sequence (wt) from neuraminidase__InfluenzaA__AFD98293
augaauccaaaucaaaagauaauaacgauuggcucuguuucucucaccauuuccacaauaugcuucuucaugcaaauugccaucuugauaacuacuguaacauugcauuucaagcaauaugaauucaacucccccccaaacaaccaagugaugcugugugaaccaacaauaauagaaagaaacauaacagagauaguguaucugaccaacaccaccauagagaaggaaauaugccccaaacuagcagaauacagaaauuggucaaagccgcaaugugacauuacaggauuugcaccuuuuucuaaggacaauucgauuaggcuuuccgcugguggggacaucugggugacaagagaaccuuaugugucaugcgauccugacaaguguuaucaauuugcccuuggacagggaacaacacuaaacaacgugcauucaaauaacacaguacgugauaggaccccuuaucggacccuauugaugaaugaguuagguguuccuuuucaucuggggaccaagcaagugugcauagcaugguccagcucaaguugucacgauggaaaagcauggcugcauguuuguauaacgggggaugauaaaaaugcaacugccagcuucauuuacaaugggaggcuuguagauaguguuguuucaugguccaaagaaauccucaggacccaggagucagaaugcguuuguaucaauggaacuuguacaguaguaaugacugaugggagugcuucaggaaaagcugauacuaaaauacuauucauugaggaggggaaaaucguucauacuagcacauugucaggaagugcucagcaugucgaggagugcucuugcuauccucgauauccuggugucagaugugucugcagagacaacuggaaaggcuccaauaggcccaucguagauauaaacauaaaggaucauagcauuguuuccaguuauguguguucaggacuuguuggagacacacccagaaaaaaugacagcuccagcaguagccauuguuuggauccuaacaaugaagaagguggucauggagugaaaggcugggccuuugaugauggaaaugacguguggaugggaagaacgaucaacgagacgucacguuuaggguaugaaaccuucaaagucauugaaggcugguccaacccuaaguccaaauugcagauaaauaggcaagucauaguugacagagguaauagguccgguuauucugguauuuucucuguugaaggcaaaagcugcaucaaucggugcuuuuauguggaguugauuaggggaagaaaagaggaaacugaagucuuguggaccucaaacaguauuguuguguuuuguggcaccucagguacauauggaacaggcucauggccugauggggcggaccucaaucucaugccuauauaa

SEQ ID NO: 53815 - RNA, 1410 nt, Artificial Sequence; identical to SEQ ID NO: 52837
  derived and/or modified CDS sequence (wt) from neuraminidase__InfluenzaA__AFD98313

SEQ ID NO: 53816 - RNA, 1410 nt, Artificial Sequence
  derived and/or modified CDS sequence (wt) from neuraminidase__InfluenzaA__AFD98323
augaauccaaaccaaaagauaauaaccauugguucggucuguaugacaauuggaauggcuaacuuaauauuacaaauuggaaacauaaucucaauauggauuagccacucaauucaacuugggaaucaaagucaaauugaaacaugcaaucaaagcgucauuacuuaugaaaacaacacuuggguaaaucagacauauguuaacaucagcaacaccaacuuugcugcuggacagucaguuguuuccgugaaauuagcgggcaauuccucucucugcccuguuaguggaugggcuauauacaguaaagacaacaguauaagaaucgguuccaagggggauguguuugucauaagggaaccauucauaucaugcuccccauuggaaugcagaaccuucuucuugacucaaggggccuugcuaaaugacaaacauuccaauggaaccauuaaagacaggagcccauaucgaacccuaaugagcuguccuauuggugaaguucccucuccauacaacucaagauuugagucagucgcuuggucagcaagugcuugucaugauggcaucaauuggcuaacaauuggaauuucuggcccagacaauggggcaguggcuguguuaaaguacaacggcauaauaacagacacuaucaagaguuggagaaacaauauauugagaacacaagagucugaaugugcauguguaaaugguucuugcuuuaccauaaugaccgauggaccaagugauggacaggccucauacaagaucuucagaauagaaaagggaaagauagucaaaucagucgaaaugaaugccccuaauuaucacuaugaggaaugcuccuguuauccugauucuagugaaaucacaugugugugcagggauaacuggcauggcucgaaucgaccgugggugucuuucaaccagaaucuggaauaucagauaggauacauaugcagugggauuuucggagacaauccacgcccuaaugauaagacaggcaguugugguccaguaucgucuaauggagcaaauggaguaaaaggauuuucauucaaauacggcaaugguguuuggauagggagaacuaaaagcauuagcucaagaaaagguuuugagaugauuugggauccaaacggauggacugggacagacaauaacuucucaauaaagcaagauaucguaggaauaaaugaguggucaggauauagcgggaguuuuguucagcauccagaacuaacagggcuggauuguauaagaccuugcuucuggguugaacuaaucagagggcgacccaaagagaacacaaucuggacuagcgggagcagcauauccuuuugugguguaaacagugacacuguggguuggucuuggccagacggugcugaguugccauuuaccauugacaaguaa

SEQ ID NO: 53817 - RNA, 1410 nt, Artificial Sequence; identical to SEQ ID NO: 52837
  derived and/or modified CDS sequence (wt) from neuraminidase__InfluenzaA__AFD98333

SEQ ID NO: 53818 - RNA, 1410 nt, Artificial Sequence; identical to SEQ ID NO: 53799
  derived and/or modified CDS sequence (wt) from neuraminidase__InfluenzaA__AFD98343

SEQ ID NO: 53819 - RNA, 1410 nt, Artificial Sequence
  derived and/or modified CDS sequence (wt) from neuraminidase__InfluenzaA__AFD98354
augaauccaaaucaaaagauaauaacgauuggcucuguuucucucaccauuuccacaauaugcuucuucaugcaaauugccaucuugauaacuacuguaacauugcauuucaagcaauaugaauucaacucccccccaaacaaccaagugaugcugugugaaccgacaauaauagaaagaaacauaacagagauaguguaucugaccaacaccaccauagagaaggaaauaugccccaaacuagcagaauacagaaauuggucaaaaccgcaaugugacauuacaggauuugcaccuuuuucuaaggacaauucgauuaggcuuuccgcugguggggacaucugggugacaagagaaccuuaugugucaugcgauccugacaaguguuaucaauuugcccuuggacagggaacaacacuaaacaacgugcauucaaauaacacaguacgugauaggaccccuuaucggacccuauugaugaaugaguuagguguuccuuuucaucuggggaccaagcaggugugcauagcaugguccagcucaaguugucacgauggaaaagcauggcugcauguuuguauaacgggggaugauaaaaaugcaacugcaagcuucauuuacaaugggaggcuuguagauaguguuguuucaugguccaaagaaauucucaggacccaggagucagaaugcguuuguaucaauggaacuuguacaguaguaaugacugauggaaaugcuucaggaaaagcugauacuaaaauacuauucauugaggaggggaaaaucguucauacuagcacauuguuaggaagugcucagcaugucgaggagugcucuugcuauccucgauauccuggugucagaugugucugcagagacaacuggaaaggcuccaauaggcccaucguagauauaaacauaaaggaucauagcauaguuuccaguuauguguguucaggacuuguuggagacacacccagaaaaaacgacagcuccagcaguagccauuguuuggauccuaacaaugaagaagguggucauggagugaaaggcugggccuuugaugauggaaaugacguguggaugggaagaacaaucaacgagacgucacgcuugggguaugaaaccuucaaagucauugaaggcugguccaacccuaaguccaaauugcagauaaauaggcaagucauaguugacaaagguaauagguccgguuauucugguauuuucucuguugaaggcaaaagcugcaucaaucggugcuuuuauguggaguugauuaggggaagaaaagaggaaacugaagucuuguggaccucaaacaguauuguuguguuuuguggcaccucagguacauauggaacaggcucauggccugauggggcggaccucaaucucaugccuauauaa

SEQ ID NO: 53820 - RNA, 1410 nt, Artificial Sequence
  derived and/or modified CDS sequence (wt) from neuraminidase__InfluenzaA__AFD98365
augaacccaaaucaaaagauaauaacgauuggcucuguuucucucaccauuuccacaauaugcuucuucaugcaaauugccaucuugauaacuacuguaacauugcauuucaagcaauaugaauucuacucccccccaaacaaccaagugaugcugugugaaccaacaauaauagaaagaaacauaacagagauaguguaucugaccaacaccaccauagagaaggaaauaugccccaaacuagcagaauacagaaauuggucaaagccgcaaugugacauuacaggauuugcaccuuuuucuaaggacaauucgauuaggcuuuccgcugguggggacaucugggugacaagagaaccuuaugugucaugcgauccugacaaguguuaucaauuugcccugggacagggaacaacacuaaacaacgugcauucaaauaacacaguacgugauaggaccccuuauaggacccuauugaugaaugaguuagguguuccuuuucaucuggggaccaagcaagugugcauagcaugguccagcucaaguugucacgauggaaaagcauggcugcauguuuguauaacgggggaugauaaaaaugcaacugcuagcuucauuuacaaugggaggcuuguagauaguguuguuucaugguccaaagaaauccucaggacccaggagucagaaugcguuuguaucaauggaacuuguacaguaguaaugacugaugggagugcuucaggaaaagcugauacuaaaauacuauucauugaggaggggaaaaucguucauacuagcacauugucaggaagugcucagcaugucgaggagugcucuugcuauccucgauauccuggugucagaugugucugcagagacaacuggaaaggcuccaauaggcccaucguugauauaaacauaaaggaucauagcauuguuuccaguuauguguguucaggacuuguuggagacacacccagaaaaaacgacagcuccagcaguagccauuguuuggauccuaacaaugaagaagguggucauggagugaaaggcugggccuuugaugauggaaaugacguguggaugggaagaacgaucaacgagacgucacgcuuaggguaugaaaccuucaaagucauugaaggcugguccaacccuaaguccaaauugcagauaaauaggcaagucauaguugacagagguaauagguccgguuauucugguauuuucucuguugaaggcaagagcugcaucaaucggugcuuuuauguggaguugauuaggggaagaaaagaggaaacuaaagucuuguggaccucaaacaguauuguuguguuuuguggcaccucagguacauauggaacaggcucauggccugauggggcggaccucaaucucaugccuauauaa

SEQ ID NO: 53821 - RNA, 1410 nt, Artificial Sequence
  derived and/or modified CDS sequence (wt) from neuraminidase__InfluenzaA__AFD98376
augaauccaaaucaaaagauaauaacgauuggcucuguuucucucaccauuuccacaauaugcuucuucaugcaaauugccaucuugauaacuacuguaacauugcauuucaagcaauaugaauucaacuuccccccaaacaaccaagugaugcugugugaaccgacaauaauagaaagaaacauaacagagauaguguaucugaccaacaccaccauagagaaggaaauaugccccaaacuagcagaauacagaaauuggucaaaaccgcaaugugacauuacaggauuugcaccuuuuucuaaggacaauucgauuaggcuuuccgcugguggggacaucugggugacaagagaaccuuaugugucaugcgauccugacaaguguuaucaauuugcccuuggacagggaacaacacuaaacaacgugcauucaaauaacacaguacgugauaggaccccuuaucggacccuauugaugaaugaguuagguguuccuuuucaucuggggaccaagcaagugugcauagcaugguccagcucaaguugucacgauggaaaagcauggcugcauguuuguauaacgggggaugauaaaaaugcaacugcaagcuucauuuacaaugggaggcuuguagauaguguuguuucaugguccaaagaaauucucaggacccaggagucagaaugcguuuguaucaauggaacuuguacaguaguaaugacugauggaagugcuucaggaaaagcugauacuaaaauacuauucauugaggaggggaaaaucguucauacuagcacauugucaggaagugcucagcaugucgaggagugcucuugcuauccucgauauccuggugucagaugugucugcagagacaacuggaaaggcuccaauaggcccaucguagauauaaacauaaaggaucauagcauaguuuccaguuauguguguucaggacuuguuggagacacacccagaaaaaacgacagcuccagcaguggccauuguuuggauccuaacaaugaagaagguggucauggagugaaaggcugggccuuugaugauggaaaugacguguggaugggaagaacaaucaacgagacgucacgcuugggguaugaaaccuucaaagucauugaaggcugguccaacccuaaguccaaauugcagauaaauaggcaagucauaguugacaaagguaauagguccgguuauucugguauuuucucuguugaaggcaaaagcugcaucaaucggugcuuuuauguggaguugauuaggggaagaaaagaggaaacugaagucuuguggaccucaaacaguauuguuguguuuuguggcaccucagguacauauggaacaggcucauggccugauggggcggaccucaaucucaugccuauauaa

SEQ ID NO: 53822 - RNA, 1410 nt, Artificial Sequence
  derived and/or modified CDS sequence (wt) from neuraminidase__InfluenzaA__AFD98387
augaauccaaaucaaaagauaauaacgauuggcucuguuucucucaccauuuccacaauaugcuucuuaaugcaaauugccaucuugauaacuacuguaacauugcauuucaagcaauaugaauucaacucccccccaaacaaccaagugaugcugugugaaccaacaauaauagaaagaaacauaacagagauaguguaucugaccaacaccaccauagagaaggaaauaugccccaaacuagcagaauacagagauuggucaaagccgcaaugugacauuacaggauuugcaccuuuuucuaaggacaauucgauuaggcuuuccgcugguggggacaucugggugacaagagaaccuuaugugucaugcgauccugacaaguguuaucaauuugcccuuggacaaggaacaacacuaaacaacgugcauucaaauaacacaguacgugauaggaccccuuaucggacccuauugaugaaugaguuagguguuccuuuucaucuggggaccaagcaagugugcauagcaugguccagcucaaguugucacgauggaaaagcauggcugcauguuuguauaacgggggaugauaaaaaugcaacugcuagcuucauuuacaaugggaagcuuguagauaguguugucucaugguccaaagaaauccucaggacccaggagucagaaugcguuuguaucaaugggacuuguacaguaguaaugacugaugggagugcuucaggaaaagcugauacuaaaauacuauucauugaggaggggaaaaucguucauacuagcacauugucaggaagugcucagcaugucgaggagugcucuugcuauccucgauauccuggugucagaugugucugcagagacaacuggaaaggcuccaauaggcccaucguagauauaaacauaaaggaucauagcauuguuuccaguuauguguguucaggacuuguuggagacacacccagaaaaaacgacagauccagcaauagccauuguuuggauccuaacaaugaagaagguggucauggagugaaaggcugggccuuugaugauggaaaugacguguggaugggaagaacgaucaacgagacgucacguuuaggguaugaaaccuucaaagucauugaaggcugguccaacccuaaguccaaauugcagauaaauaggcaagucauaguugacagagguaauagguccgguuauucugguauuuucucuguugaaggcaaaagcugcaucaaucggugcuuuuauguggaguugauuaggggaagaaaagaggaaacugaagucuuguggaccucaaacaguauuguuguguuuuguggcaccucagguacauauggaacaggcucauggccugauggggcggaccucaaucucaugccuauauaa

SEQ ID NO: 53823 - RNA, 1410 nt, Artificial Sequence
  derived and/or modified CDS sequence (wt) from neuraminidase__InfluenzaA__AFD98398
augaauccaaaucaaaagauaauaacgauuggcucaguuucucucaccauuuccacaauaugcuucuucaugcaaauugccaucuugauaacuacuguaacauugcauuucaagcaauaugaauucaacucccccccaaacaaccaagugaugcugugugaaccgacaauaauagaaagaaacauaacagagauaguguaucugaccaacaccaccauagagaaggaaauaugccccaaacuagcagaauacagaaauuggucaaaaccgcaaugugacauuacaggauuugcaccuuuuucuaaggacaauucgauuaggcuuuccgcugguggggacaucugggugacaagagaaccuuaugugucaugcgauccugacaaguguuaucaauuugcccuuggacagggaacaacacuaaacaacgugcauucaaauaacacaguacgugauaggaccccuuaucggacccuauugaugaaugaguuagguguuccuuuucaucuggggaccaggcaagugugcauagcaugguccagcucaaguugucacgaugggaaagcauggcugcauguuuguauaacgggggaugauaaaaaugcaacugcaagcuucauuuacaaugggaggcuuguagauaguguuguuucaugguccaaagaaauucucaggacccaggagucagaaugcguuuguaucaauggaacuuguacaguaguaaugacugauggaagugcuucaggaaaagcugauacuaaaauacuauucauugaggaggggaaaaucguucauacuagcacauugucaggaagugcucagcaugucgaggagugcucuugcuauccucgauauccuggugucagaugugucugcagagacaacuggaaaggcuccaauaggcccaucguagauauaaacauaaaggaucauagcauaguuuccaguuauguguguucaggacuuguuggagacacacccagaaaaaacgacagcuccagcaguagccauuguuuggauccuaacaaugaagaagguggucauggagugaaaggcugggccuuugaugauggaaaugacguguggaugggaagaacaaucaacgagacgucacgcuugggguaugaaaccuucaaagucauugaaggcugguccaacccuaaguccaaauugcagauaaauaggcaagucauaguugacaaagguaauagguccgguuauucugguauuuucucuguugaaggcaaaagcugcaucaaucggugcuuuuauguggaguugauuaggggaagaaaagaggaaacugaagucuuguggaccucaaacaguauuguuguguuuuguggcaccucagguacauauggaacaggcucauggccugauggggcggaccucaaucucaugccuauauaa

SEQ ID NO: 53824 - RNA, 1410 nt, Artificial Sequence
  derived and/or modified CDS sequence (wt) from neuraminidase__InfluenzaA__AFD98409
augaauccaaaucaaaagauaauaacgauuggcucuguuucucucaccauuuccacaauaugcuucuucaugcaaauugccaucuugauaacuacuguaacauugcauuucaagcaauaugaauucaacucccccccaaacaaccaagugaugcugugugaaccgacaauaauagaaagaaacauaacagagauaguguaucugaccaacaccaccauagagaaggaaauaugccccaaacuagcagaauacagaaauuggucaaaaccgcaaugugacauuacaggauuugcaccuuuuucuaaggacaauucgauuaggcuuuccgcugguggggacaucugggugacaagagaaccuuaugugucaugcgauccugacaaguguuaucaauuugcccuuggacagggaacaacacuaaacaacgugcauucaaauaacacaguacgugauaggaccccuuaucggacccuauugaugaaugaguuagguguuccuuuucaucuggggaccaagcaagugugcauagcaugguccagcucaaguugucacgauggaaaagcauggcugcauguuuguauaacgggggaugauaaaaaugcaacugcaagcuucauuuacaaugggaggcuuguagauaguguuguuucaugguccaaagaaauucucaggacccaggagucagaaugcguuuguaucaauggaacuuguacaguaguaaugacugauggaagugcuucaggaaaagcugauacuaaaauacuauucauugaggaggggaaaaucguucauacuagcacauugucaggaagugcucagcaugucgaggagugcucuugcuauccucgauauccuggugucagaugugucugcagagacaacuggaaaggcuccaauaggcccaucguagauauaaacauaaaggaucauagcauaguuuccaguuauguguguucaggacuuguuggagacacacccagaaaaaacgacagcuccagcaguggccauuguuuggauccuaacaaugaagaagguggucauggagugaaaggcugggccuuugaugauggaaaugacguguggaugggaagaacaaucaacgagacgucacgcuugggguaugaaaccuucaaagucauugaaggcugguccaacccuaaguccaaauugcagauaaauaggcaagucauaguugacaaagguaauagguccgguuauucugguauuuucucuguugaaggcaaaagcugcaucaaucggugcuuuuauguggaguugauuaggggaagaaaagaggaaacugaagucuuguggaccucaaacaguauuguuguguuuuguggcaccucagguacauauggaacaggcucauggccugauggggcggaccucaaucucaugccuauauaa

SEQ ID NO: 53825 - RNA, 1410 nt, Artificial Sequence; identical to SEQ ID NO: 53799
  derived and/or modified CDS sequence (wt) from neuraminidase__InfluenzaA__AFD98420

SEQ ID NO: 53826 - RNA, 1410 nt, Artificial Sequence
  derived and/or modified CDS sequence (wt) from neuraminidase__InfluenzaA__AFD98431
augaauccaaaucaaaagauaauaacgauuggcucuguuucucucaccauuuccacaauaugcuucuucaugcaaauugccaucuugauaacuacuguaacauugcauuucaagcaauaugaauucaacucccccccaaacaaccaagugaugcugugugaaccaacaauaauagaaagaaacauaacagagauaguguaucugaccaacaccaccauagagaaggaaauaugccccaaacuagcagaauacagaaauuggucaaagccgcaaugugacauuacaggauuugcaccuuuuucuaaggacaauucgauuaggcuuuccgcugguggggacaucugggugacaagagaaccuuaugugucaugcgauccugacaaguguuaucaauuugcccuuggacagggaacaacacuaaacaaugugcauucaaauaacacaguacgugauaggaccccuuaucggacccuauugaugaaugaguuagguguuccuuuucaucuggggaccaagcaagugugcauagcaugguccagcucaaguugucacgauggaaaagcauggcugcauguuuguauaacgggggaugauaaaaaugcaacugcuagcuucauuuacaaugggaggcuuguagauaguguuguuucaugguccaaagaaauccucaggacccaggagucagaaugcguuuguaucaauggaacuuguacaguaguaaugacugaugggagugcuucaggaaaagcugauacuaaaauacuauucauugaggaggggaaaaucguucauacuagcacauugucaggaagugcucagcaugucgaggagugcucuugcuauccucgauauccuggugucagaugugucugcagagacaacuggaaaggcuccaauaggcccaucguagauauaaacauaaaggaucauagcauuguuuccaguuauguguguucaggacuuguuggagacacacccagaaaaaacgacagcuccagcaguagccauuguuuggauccuaacaaugaagaagguggucauggagugaaaggcugggccuuugaugauggaaaugacguguggaugggaagaacgaucaacgagacgucacguuuaggguaugaaaccuucaaagucauugaaggcugguccaacccuaaguccaaauugcagauaaauaggcaagucauaguuggcagagguaauagguccgguuauucugguauuuucucuguugaaggcaaaagcugcaucaaucggugcuuuuauguggaguugauuaggggaagaaaagaggaaacugaagucuuguggaccucaaacaguauuguuguguuuuguggcaccucagguacauauggaacaggcucauggccugauggggcggaccucaaucucaugccuauauaa

SEQ ID NO: 53827 - RNA, 1410 nt, Artificial Sequence
  derived and/or modified CDS sequence (wt) from neuraminidase__InfluenzaA__AFD98442
augaauccaaaccaaaagauaauaaccauugguucggucuguaugacaauuggaauggcuaacuuaauauuacaaauuggaaacauaaucucaauauggauuagccacucaauucaacuugggaaucaaaaucagauugaaacaugcaaucaaagcgucauuacuuaugaaaacaacacuuggguaaaucagacauauguuaacaucagcaacaccaacuuugcugcuggacagucagugguuuccgugaaauuagcgggcaauuccucucucugcccuguuaguggaugggcuauauacaguaaagacaacaguauaagaaucgguuccaagggggauguguuugucauaagggaaccauucauaucaugcucccccuuggaaugcagaaccuucuucuugacucaaggggccuugcuaaaugacaaacauuccaauggaaccauuaaagacaggagcccauaucgaacccuaaugagcugucccauuggugaaguucccucuccauacaacucaagauuugagucagucgcuuggucagcaagugcuugucaugauggcaucaauuggcuaacaauuggaauuucuggcccagacaauggggcaguggcuguguuaaaguacaacggcauaauaacagacacuaucaagaguuggagaaacaauauauugagaacacaagagucugaaugugcauguguaaaugguucuugcuuuaccauaaugaccgauggaccaagugauggacaggccucauacaagaucuucagaauagaaaagggaaagauagucaaaucagucgaaaugaaugccccuaauuaucacuaugaggaaugcuccuguuauccugauucuggugaaaucacaugugugugcagggauaacuggcauggcucgaaucgaccgugggugucuuucaaccagaaucuggaauaucagauaggauacauaugcagugggauuuucggagacaauccacgcccuaaugauaagacaggcaguugugguccaguaucgucuaauggagcaaauggaguaaaaggauuuucauucaaauacggcaaugguguuuggauagggagaacuaaaagcauuaguucaagaaaagguuuugagaugauuugggauccaaacggauggacugggacagacaauaacuucgcaauaaagcaagauaucguaggaauaaaugaguggucaggauauagcgggaguuuuguucagcauccagaacuaacagggcuggacuguauaagaccuugcuucuggguugaacuaaucagagggcgacccaaagagaacacaaucuggacuagcgggagcagcauauccuuuugugguguaaacagugacacuguggguuggucuuggccagacggugcugaguugccauuuaccauugacaaguaa

SEQ ID NO: 53828 - RNA, 1410 nt, Artificial Sequence
  derived and/or modified CDS sequence (wt) from neuraminidase__InfluenzaA__AFD98452
augaacccaaaucaaaagauaauaacgcuuggcucuguuucucucaccauuuccacaauaugcuucuucauacaaauugccaucuugauaacuacuguaacauugcauuucaagcaauaugaauucaacucccccccaaacaaccaagugaugcugugugaaccaacaauaauagaaagaaacauaacagagauaguguaucugaccaacaccaccauagagaaggaaauaugccccaaacuagcagaauacagaaauuggucaaagccgcaaugugacauuacaggguuugcaccuuuuucuaaggacaacucgauuaggcuuuccgcugguggggacaucugggugacaagagaaccuuaugugucaugcgaucccgacaaguguuaucaauuugcccuuggacagggaacaacacuaaacaacgugcauucaaauaacacaguacgugauaggaccccuuaucggacccuauugaugaaugaguuagguguuccuuuucaucuggggaccaagcaagugugcauagcaugguccagcucaaguugucacgauggaaaagcauggcugcauguuuguauaacgggggaugauaaaaaugcaacugcuagcuucauuuacaaugggaggcuuguggauaguguuguuucaugguccaaagaaauccucaggacccaagagucagaaugcguuuguaucaauggaacuuguacaguaguaaugacugaugggagugcuucaggaaaagcugauacuaaaauacuauucauugaggaggggaaaaucguucauacuagcacauugucaggaagugcucagcaugucgaggagugcucuugcuauccucgauaucccggugucagaugugucugcagagacaacuggaaaggcuccaauaggcccaucguagauauaaacauaaaggaucauagcauuguuuccaguuauguguguucaggacuuguuggagacacacccagaaaaaacgacagcuccagcagcagccauuguuuggauccuaacaaugaagaagguggucauggagugaaaggcugggccuuugaugauggaaaugacguguggaugggaagaacgaucaacgagacgucacgcuuaggguaugaaaccuucaaagucauugaaggcugguccaacccuaaguccaaauugcagauaaauaggcaagucauaguugacagagguaauagguccgguuauucugguauuuucucuguugaaggcaagagcugcaucaaucggugcuuuuauguggaguugauuaggggaagaaaagaggaaacugaagucuuguggaccucaaacaguauuguuguguuuuguggcaccucagguacauauggaacaggcucauggccugauggggcggaccucaaucucaugccuauauaa

SEQ ID NO: 53829 - RNA, 1410 nt, Artificial Sequence
  derived and/or modified CDS sequence (wt) from neuraminidase__InfluenzaA__AFD98463
augaauccaaaucaaaagauaauaacgauuggcucuguuucucucacuauuuccacaauaugcuucuucaugcaaauugccaucuugauaacuacuguaacauugcauuucaagcaauaugaauucaacucccccccaaacaaccaagugaugcugugugaaccgacaauaauagaaagaaacauaacagagauaguguaucugaccaacaccaccauagagaaggaaauaugccccaaacuagcagaauacagaaauuggucaaaaccgcaaugugacauuacaggauuugcaccuuuuucuaaggacaauucgauuaggcuuuccgcugguggggacaucugggugacaagagaaccuuaugugucaugcgauccugacaaguguuaucaauuugcccuuggacagggaacaacacuaaacaacgugcauucaaauaacacaguacgugauaggaccccuuaucggacccuauugaugaaugaguuagguguuccuuuucaucuggggaccaagcaagugugcauagcaugguccagcucaaguugucacgauggaaaagcauggcugcauguuuguauaacgggggaugauaaaaaugcaacugcaagcuucauuuacaaugggaggcuuguagauaguguuguuucaugguccaaagaaauucucaggacccaggagucagaaugcguuuguaucaauggaacuuguacaguaguaaugacugauggaagugcuucaggaaaagcugauacuaaaauacuauucauugaggaggggaaaaucguucauacuagcacauugucaggaagugcucagcaugucgaggagugcucuugcuauccucgauauccuggugucagaugugucugcagagacaacuggaaaggcuccaauaggcccaucguagauauaaacauaaaggaucauagcauaguuuccaguuauguguguucagggcuuguuggagacacacccagaaaaaacgacagcuccagcaguagccauuguuuggauccuaacaaugaagaagguggucauggagugaaaggcugggccuuugaugauggaaaugacguguggaugggaagaacaaucaacgagacgucacgcuugggguaugaaaccuucaaagucauugaaggcugguccaacccuaaguccaaauugcagauaaauaggcaagucauaguugacaaagguaauagguccgguuauucugguauuuucucuguugaaggcaaaagcugcaucaaucggugcuuuuauguggaguugauuaggggaagaaaagaggaaacugaagucuuguggaccucaaacaguauuguuguguuuuguggcaccucagguacauauggaacaggcucauggccugauggggcggaccucaaucucaugccuauauaa

SEQ ID NO: 53830 - RNA, 1410 nt, Artificial Sequence
  derived and/or modified CDS sequence (wt) from neuraminidase__InfluenzaA__AFD98474
augaauccaaaccaaaagauaauaaccauugguucggucuguaugacaauuggaauggcuaacuuaauauuacaaauuggaaacauaaucucaauauggauuagccacucaauucaacuugggaaucaaaaucagauugaaacaugcaaucaaagcgucauuacuuaugaaaacaacacuuggguaaaucagacauauguuaacaucagcaacaccaacuuugcugcuggacagucagugguuuccgugaaauuagcgggcaauuccucucucugcccuguuaguggaugggcuauauacaguaaagacaacaguauaagaaucgguuccaagggggauguguuugucauaagggaaccauucauaucaugcucccccuuggaaugcagaacuuucuucuugacucaaggggccuugcuaaaugacaaacauuccaauggaaccauuaaagacaggagcccauaucgaacccuaaugagcuguccuauuggugaaguucccucuccauacaacucaagauuugagucagucgcuuggucagcaagugcuugucaugauggcaucaauuggcuaacaauuggaauuucuggcccagacaauggggcaguggcuguguuaaaguacaacggcauaauaacagacacuaucaagaguuggagaaacaauauauugagaacacaagagucugaaugugcauguguaaaugguucuugcuuuaccauaaugaccgauggaccaagugauggacaggccucauacaagaucuucagaauagaaaagggaaagauagucaaaucagucgaaaugaaugccccuaauuaucacuaugaggaaugcuccuguuauccugauucuagugaaaucacaugugugugcagggauaacuggcauggcucgaaucgaccgugggugucuuucaaccagaaucuggaauaucagauaggauacauaugcagugggauuuucggagacaauccacgcccuaaugauaagacaggcaguugugguccaguaucgucuaauggagcaaauggaguaaaaggauuuucauucaaauacggcaaugguguuuggauagggagaacuaaaagcauuaguucaagaaaagguuuugaaaugauuugggauccaaacggauggacugggacagacaauaacuucucaauaaagcaagauaucauaggaauaaaugaguggucaggauauagcgggaguuuuguucagcauccagaacuaacagggcuggacuguauaagaccuugcuucuggguugaacuaaucagagggcgacccaaagagaacacaaucuggacuagcgggagcagcauauccuuuugugguguaaacagugacacuguggguuggucuuggccagacggugcugaguugccauuuaccauugacaaguaa

SEQ ID NO: 53831 - RNA, 1410 nt, Artificial Sequence
  derived and/or modified CDS sequence (wt) from neuraminidase__InfluenzaA__AFD98484
augaauccaaaucaaaagauaauaacgauuggcucuguuucucucaccauuuccacaauaugcuucuucaugcaaauugccaucuugauaacuacuguaacauugcauuucaagcaauaugaauucaacucccccccaaacaaccaagugaugcugugugaaccaacaauaauagaaagaaacauaacagagauaguguaucugaccaacaccaccauagagaaggaaauaugccccaaacuagcagaauacagaaauuggucaaagccgcaaugugacauuacaggauuugcaccuuuuucuaaggacaauucgauuaggcuuuccgcugguggggacaucugggugacaagagaaccuuaugugucaugcgauccugacaaguguuaucaauuugcccuuggacagggaacaacacuaaacaacgugcauucaaauaacacaguacgugauaggaccccuuaucggacccuauugaugaaugaguuagguguuccuuuucaucuggggaccaagcaagugugcauagcaugguccagcucaaguugucacgauggaaaagcauggcugcauguuuguauaacgggggaugauaaaaaugcaacugcuagcuucauuuacaaugggaggcuuguagauaguguuguuucaugguccaaagaaauucucaggacccaggagucagaaugcguuuguaucaauggaacuuguacaguaguaaugacugaugggagugcuucaggaaaagcugauacuaaaauacuauucauugaggaggggaaaaucguucauacuagcacauugucaggaagugcucagcaugucgaggagugcucuugcuauccucgauauccuggugucagaugugucugcagagacaacuggaaaggcuccaauaggcccaucguagauauaaacauaaaggaucauagcauuguuuccaguuauguguguucaggacuuguuggagacacacccagaaaaaacgacagcuccagcaguagccauuguuuggauccuaacaaugaagaagguggucauggagugaaaggcugggccuuugaugauggaaaugacguguggaugggaagaacgaucaacgagacgucacguuuaggguaugaaaccuucaaagucauugaaggcugguccaacccuaaguccaaauugcagaugaauaggcaagucauaguugacagagguaauagguccgguuauucugguauuuucucuguugaaggcaaaagcugcaucaaucggugcuuuuauguggaguugauuaggggaagaaaagaggaaacugaagucuuguggaccucaaacaguauuguuguguuuuguggcaccucagguacauauggaacaggcucauggccugauggggcggaccucaaucucaugccuauauaa

SEQ ID NO: 53832 - RNA, 1410 nt, Artificial Sequence
  derived and/or modified CDS sequence (wt) from neuraminidase__InfluenzaA__AFD98495
augaauccaaaucaaaagauaauaacgauuggcucuguuucucucaccauuuccacaauaugcuucuucaugcaaauugccaucuugauaacuacuguaacauugcauuucaagcaauaugaauucaacucccccccaaacaaccaagugaugcugugugaaccaacaauaauagaaagaaacauaacagagauaguguaucugaccaacaccaccauagagaaggaaauaugccccaaacuagcagaauacagaaauuggucaaagccgcaaugugacauuacaggauuugcaccuuuuucuaaggacaauucgauuaggcuuuccgcugguggggacaucugggugacaagagaaccuuaugugucaugcgauccugacaaguguuaucaauuugcccuuggacagggaacaacacuaaacaacgugcauucaaauaacacaguacgugauaggaccccuuaucggacccuauugaugaaugaguuagguguuccuuuucaucuggggaccaaacaagugugcauagcaugguccagcucaaguugucacgauggaaaagcauggcugcauguuuguauaacgggggaugauaaaaaugcaacugcuagcuucauuuacaaugggaagcuuguagauaguguuguuucaugguccaaagaaauccucaggacccaggagucagaaugcguuuguaucaauggaacuuguacaguaguaaugacugaugggagugcuucaggaaaagcuaauacuaaaauacuauucauugaggaggggaaaaucguucauacuagcacauugucaggaagugcucagcaugucgaggagugcucuugcuauccucgauauccuggugucagaugugucugcagagacaacuggaaaggcuccaauaggcccaucguagauauaaacauaaaggaucauaguauuguuuccaguuauguguguucaggacuuguuggagacacacccagaaaaaacgacagcuccagcaguagccauuguuuggauccuaacaaugaggaagguggucauggagugaaaggcugggccuuugaugauggaaaugacguguggaugggaagaacgaucaacgagacgucacguuuaggguaugaaaccuucaaagucauugaaggcugguccaacccuaaguccaaauugcagauaaauaggcaagucauaguugacagagguaauagguccgguuauucugguauuuucucuguugaaggcaaaagcuguaucaaucggugcuuuuauguggaguugauuaggggaagaaaagaggaaacugaagucuuauggaccucaaacaguauuguuguguuuuguggcaccucagguacauauggaacaggcucauggccugauggggcggaucucaaucucaugccuauauaa

SEQ ID NO: 53833 - RNA, 1410 nt, Artificial Sequence
  derived and/or modified CDS sequence (wt) from neuraminidase__InfluenzaA__AFD98506
augaauccaaaucaaaagauaauaacgauuggcucuguuucucucaccauuuccacaauaugcuucuucaugcaaauugccaucuugauaacuacuguaacauugcauuucaagcaauaugaauucaacucccccccaaacaaccaagugaugcugugugaaccgacaauaauagaaagaaacauaacagagauaguguaucugaccaacaccaccauagagaaggaaauaugccccaaacuagcagaauacagaaauuggucaaaaccgcaaugugacauuacaggauuugcaccuuuuucuaaggacaauucgauuaggcuuuccgcugguggggacaucugggugacaagagaaccuuaugugucaugcgauccugacaaguguuaucaauuugcccuuggacagggaacaacacuaaacaacgugcauucaaauaacacaguacgugauaggaccccuuaucggacccuauugaugaaugaguuagguguuccuuuucaucuggggaccaagcaagugugcauagcaugguccagcucaaguugucacgauggaaaagcauggcugcauguuuguauaacgggggaugauaaaaaugcaacugcaagcuucauuuacaaugggaggcuuguagauaguguuguuucaugguccaaagaaauucucaggacccaggagucagaaugcguuuguaucaauggaacuuguacaguaguaaugacugauggaagugcuucaggaaaagcugauacuaaaauacuauucauugaggaggggaaaaucguucauacuagcacauugucaggaagugcucagcauguugaggagugcucuugcuauccucgauauccuggugucagaugugucugcagagacaacuggaaaggcuccaauaggcccaucguagauauaaacauaaaggaucauagcauaguuuccaguuauguguguucaggacuuguuggagacacacccagaaaaaacgacagcuccagcaguagccauuguuuggauccuaacaaugaagaagguggucauggagugaaaggcugggccuuugaugauggaaaugacguguggaugggaagaacaaucaacgagacgucacgcuugggguaugaaaccuucaaagucauugaaggcugguccaacccuaaguccaaauugcagauaaauaggcaagucauaguugacaaagguaauagguccgguuauucugguauuuucucuguugaaggcaaaagcugcaucaaucggugcuuuuauguggaguugauuaggggaagaaaagaggaaacugaagucuuguggaccucaaacaguauuguuguguuuuguggcaccucagguacauauggaacaggcucauggccugauggggcggaccucaaucucaugccuauauaa

SEQ ID NO: 53834 - RNA, 1410 nt, Artificial Sequence
  derived and/or modified CDS sequence (wt) from neuraminidase__InfluenzaA__AFD98517
augaauccaaaucaaaagauaauaacgauuggcucuguuucucucaccauuuccacaauaugcuucuucaugcaaauugccaucuugauaacuacuguaacauugcauuucaagcaauaugaauucaacucccccccaaacaaccaagugaugcugugugaaccaacaauaauagaaagaaacauaacagagauaguguaucugaccaacaccaccauagagaaggaaauaugccccaaacuagcagaauacagaaauuggucaaagccgcaaugugacauuacaggauuugcaccuuuuucuaaggacaauucgauuaggcuuuccgcugguggggacaucugggugacaagagaaccuuaugugucaugcgauccugacaaguguuaucaauuugcccuuggacagggaacaacacuaaacaacgugcauucaaauaacacaguacgugauaggaccccuuaucggacccuauugaugaaugaguuagguguuccuuuucaucuggggaccaaacaagugugcauagcaugguccagcucaaguugucacgauggaaaagcauggcugcauguuuguauaacgggggaugauaaaaaugcaacugcuagcuucauuuacaaugggaagcuuguagauaguguuguuucaugguccaaagaaauccucaggacccaggagucagaaugcguuuguaucaauggaacuuguacaguaguaaugacugaugggagugcuucaggaaaagcugauacuaaaauacuauucauuaaggaggggaaaaucguucauacuagcacauugucaggaagugcucagcaugucgaggagugcucuugcuauccucgauauccuggugucagaugugucugcagagacaacuggaaaggcuccaauaggcccaucguagauauaaacauaaaggaucauagcauuguuuccaguuauguguguucaggacuuguuggagacacacccagaaaaaacgacagcuccagcaguagccauuguuuggauccuaacaaugaggaagguggucauggagugaaaggcugggccuuugaugauggaaaugacguguggaugggaagaacgaucaacgagacgucacguuuaggguaugaaaccuucaaagucauugaaggcugguccaacccuaaguccaaauugcagauaaauaggcaagucauaguugacagagguaauagguccgguuauucugguauuuucucuguugaaggcaaaagcugcaucaaucggugcuuuuauguggaguugauuaggggaagaaaagaggaaacugaagucuuauggaccucaaacaguauuguuguguuuuguggcaccucagguacauauggaacaggcucauggccugauggggcggaccucaaucucaugccuauauaa

SEQ ID NO: 53835 - RNA, 1410 nt, Artificial Sequence
  derived and/or modified CDS sequence (wt) from neuraminidase__InfluenzaA__AFD98528
augaauccaaaucaaaagauaauaacgauuggcucuguuucucucaccauuuccacaauaugcuucuucaugcaaauugccaucuugauaacuacuguaacauugcauuucaagcaauaugaauucaacucccccccaaacaaccaagugaugcugugugaaccaacaauaauagaaagaaacauaacagagauaguguaucugaccaacaccaccauagagaaggaaauaugccccaaacuagcagaauacagaaauuggucaaagccgcaaugugacauuacaggauuugcaccuuuuucuaaggacaauucgauuaggcuuuccgcugguggggacaucugggugacaagagaaccuuaugugucaugcgauccugacaaguguuaucaauuugcccuuggacagggaacaacacuaaacaaugugcauucaaauaacacaguacgugauaggaccccuuaucggacccuauugaugaaugaguuagguguuccuuuucaucuggggaccaagcaagugugcauagcaugguccagcucaaguugucacgauggaaaagcauggcugcauguuuguauaacgggggaugauaaaaaugcaacugcuagcuucauuuacaaugggaggcuuguagauaguguuguuucaugguccaaagaaauccucaggacccaggagucagaaugcguuuguaucaauggaacuuguacaguaguaaugacugaugggagugcuucaggaaaagcugauacuaaaauacuauucauugaggaggggaaaaucguucauacuagcacauugucaggaagugcucagcaugucgaggagugcucuugcuauccucgauauccuggugucagaugugucugcagagacaacuggaaaggcuccaauaggcccaucguagauauaaacauaaaggaucauagcauuguuuccagcuauguguguucaggacuuguuggagacacacccagaaaaaacgacagcuccagcaguagccauuguuuggauccuaacaaugaagaagguggucauggagugaaaggcugggccuuugaugauggaaaugacguguggaugggaagaacgaucaacgagacgucacguuuaggguaugaaaccuucaaagucauugaaggcugguccaacccuaaguccaaauugcagauaaauaggcaagucauaguugacagagguaauagguccgguuauucugguauuuucucuguugaaggcaaaagcugcaucaaucggugcuuuuauguggaguugauuaggggaagaaaagaggaaacugaagucuuguggaccucaaacaguauuguuguguuuuguggcaccucagguacauauggaacaggcucauggccugauggggcggaccucaaucucaugccuauauaa

SEQ ID NO: 53836 - RNA, 1410 nt, Artificial Sequence; identical to SEQ ID NO: 53811
  derived and/or modified CDS sequence (wt) from neuraminidase__InfluenzaA__AFD98539

SEQ ID NO: 53837 - RNA, 1410 nt, Artificial Sequence
  derived and/or modified CDS sequence (wt) from neuraminidase__InfluenzaA__AFD98550
augaauccaaaucaaaagauaauaacgauuggcucuguuucucuaaccauuuccacaauaugcuucuucaugcaaauugccaucuugauaacuacuguaacauugcauuucaagcaauaugaauucaacucccccccaaacaaccaagugaugcugugugaaccgacaauaauagaaagaaacauaacagagauaguguaucugaccaacaccaccauagagaaggaaauaugccccaaacuagcagaauacagaaauuggucaaaaccgcaaugugacauuacaggauuugcaccuuuuucuaaggacaauucgauuaggcuuuccgcugguggagacaucugggugacaagagaaccuuaugugucaugcgauccugacaaguguuaucaauuugcccuuggacagggaacaacacuaaacaacgugcauucaaauaacacaguacgugauaggaccccuuaucggacccuauugaugaaugaguuagguguuccuuuucaucuggggaccaagcaagugugcauagcaugguccagcucaaguugucacgauggaaaagcauggcugcauguuuguauaacgggggaugauaaaaaugcaacugcaagcuucauuuacaaugggaggcuuguagauaguguuguuucaugguccaaagaaauucucaggacccaggagucagaaugcguuuguaucaauggaacuuguacaguaguaaugacugauggaagugcuucaggaaaagcugauacuaaaauacuauucauugaggaggggaaaaucguucauacuagcacauugucaggaagugcucagcaugucgaggagugcucuugcuauccucgauauccuggugucagaugugucugcagagacaacuggaaaggcuccaauaggcccaucguagauauaaacauaaaggaucauagcauaguuuccaguuauguguguucaggacuuguuggagacacacccagaaaaaacgacagcuccagcaguagccauuguuuggauccuaacaaugaagaagguggucauggagugaaaggcugggccuuugaugauggaaaugacguauggaugggaagaacaaucaacgagacgucacgcuugggguaugaaaccuucaaagucauugaaggcugguccaacccuaaguccaaauugcagauaaauaggcaagucauaguugacaaagguaauagguccgguuauucugguauuuucucuguugaaggcaaaagcugcaucaaucggugcuuuuauguggaguugauuaggggaagaaaagaggaaacugaagucuuguggaccucaaacaguauuguuguguuuuguggcaccucagguacauauggaacaggcucauggccugauggggcggaccucaaucucaugccuauauaa

SEQ ID NO: 53838 - RNA, 1410 nt, Artificial Sequence
  derived and/or modified CDS sequence (wt) from neuraminidase__InfluenzaA__AFD98561
augaauccaaaucaaaagauaauaacgauuggcucuguuucucucaccauuuccacaauaugcuucuucaugcaaauugccaucuugauaacuacuguaacauugcauuucaagcaauaugaauucaacucccccccaaacaaccaagugaugcugugugaaccaacaauaauagaaagaaacauaacagagauaguguaucugaccaacaccaccauagagaaggaaauaugccccaaacuagcagaauacagaaauuggucaaagccgcaaugugacauuacaggauuugcaccuuuuucuaaggacaauucgauuaggcuuuccgcugguggggacaucugggugacaagagaaccuuaugugucaugcgauccugacaaguguuaucaauuugcccuuggacagggaacaacacuaaacaacgugcauucaaauaacacaguacgugauaggacccccuaucggacccuauugaugaaugaguuagguguuccuuuucaucuggggaccaagcaagugugcauagcaugguccagcucaaguugucacgauggaaaagcauggcugcauguuuguauaacgggggaugauaaaaaugcaacugcuagcuucauuuacaaugggaggcuuguagauaguguuguuucaugguccaaagaaauccucaggacccaggagucagaaugcguuuguaucaauggaacuugugcaguaguaaugacugaugggagugcuucaggaaaagcugauacuaaaauacuauucauugaggaggggaaaaucguucauacuagcacauugucaggaagugcucagcaugucgaggagugcucuugcuauccucgauauccuggugucagaugugucugcagagacaacuggaaaggcuccaauaggcccaucguagauauaaacauaaaggaucauagcauuguuuccaguuauguguguucaggacuuguuggagacacacccagaaaaagcgacagcuccagcaguagccauuguuuggauccuaacaaugaagaagguggucauggagugaaaggcugggccuuugaugauggaaaugacguguggaugggaagaacgaucaacgagacgucacguuuaggguaugaaaccuucaaagucauugaaggcugguccaacccuaaguccaaauugcagauaaauaggcaagucauaguugacagagguaauagguccgguuauucugguauuuucucuguugaaggcaaaagcugcaucaaucggugcuuuuauguggaguugauuaggggaagaaaagaggaaacugaagucuuguggaccucaaacaguauuguuguguuuuguggcaccucagguacauauggaacaggcucauggccugauggggcggaccucaaucucaugccuauauaa

SEQ ID NO: 53839 - RNA, 1410 nt, Artificial Sequence
  derived and/or modified CDS sequence (wt) from neuraminidase__InfluenzaA__AFD98572
augaauccaaaucaaaagauaauaacgauuggcucuguuucucucaccauuuccacaauaugcuucuucaugcaaauugccaucuugauaacuacuguaacauugcauuucaagcaauaugaauucaacucccccccaaacaaccaagugaugcugugugaaccaacaauaauagaaagaaacauaacagagauaguguaucugaccaacaccaccuuagagaaggaaauaugccccaaacuagcagaauacagaaauuggucaaagccgcaaugugacauuacaggauuugcaccuuuuucuaaggacaauucgauuaggcuuuccgcugguggggacaucugggugacaagagaaccuuaugugucaugcgauccugacaaguguuaucaauuugcccuuggacagggaacaacacuaaacaaugugcauucaaauaacacaguacgugauaggaccccuuaucggacccuauugaugaaugaguuagguguuccuuuucaucuggggaccaagcaagugugcauagcaugguccagcucaaguugucacgauggaaaagcauggcugcauguuuguauaacgggagaugauaaaaaugcaacugcuagcuucauuuacaaugggaggcuuguagauaguguuguuucaugguccaaagaaauccucaggacccaggagucagaaugcguuuguaucaauggaacuuguacaguaguaaugacugaugggagugcuucaggaaaagcugauacuaaaauacuauucauugaggaggggaaaaucguucauacuagcacauugucaggaagugcucagcaugucgaggagugcucuugcuauccucgauauccuggugucagaugugucugcagagacaacuggaaaggcuccaauaggcccaucguagauauaaacauaaaggaucauagcauuguuuccaguuauguguguucaggacuuguuggagacacacccagaaaaaacgacagcuccagcaguagccauuguuuggauccuaacaaugaagaagguggucauggagugaaaggcugggccuuugaugauggaaaugacguguggaugggaagaacgaucaacgagacgucacguuuaggguaugaaaccuucaaagucauugaaggcugguccaacccuaaguccaaauugcagauaaauaggcaagucauaguugauagagguaauagguccgguuauucugguauuuucucuguugaaggcaaaagcugcaucaaucggugcuuuuauguggaguugauuaggggaagaaaagaggaaacugaagucuuguggaccucaaacaguauuguuguguuuuguggcaccucagguacauauggaacaggcucauggccugauggggcggaccucaaucucaugccuauauaa

SEQ ID NO: 53840 - RNA, 1410 nt, Artificial Sequence
  derived and/or modified CDS sequence (wt) from neuraminidase__InfluenzaA__AFD98583
augaauccaaaucaaaagauaauaacgauuggcucuguuucucucaccauuuccacaauaugcuucuucaugcaaauugccaucuugauaaccaccguaacauugcauuucaagcaauaugaauucaacucccccccaaacaaccaagugaugcugugugaaccaacaauaauagaaagaaacauaacagagauaguguaucugaccaacaccaccauagagaaggaaauaugccccaaacuagcagaauacagaaauuggucaaagccgcaaugugacauuacaggauuugcaccuuuuucuagggacaauucgauuaggcuuuccgcugguggggacaucugggugacaagagaaccuuaugugucaugcgauccugacaaguguuaucaauuugcccuuggacagggaacaacacuaaacaacgugcauucaaauaacacaguacgugauaggacccccuaucggacccuauugaugaaugaguuggguguuccuuuucaucuggggaccaagcaagugugcauagcaugguccagcucaaguugucacgauggaaaagcauggcugcauguuuguauaacgggggaugauaaaaaugcaacugcuagcuucauuuacaaugggaggcuuguagauaguguuguuucaugguccaaagaaauccucaggacccaggagucagaaugcguuuguaucaauggaacuuguacaguaguaaugacugaugggagugcuucaggaaaagcugauacuaaaauacuauucauugaggaggggaaaaucguucauacuagcacauugucaggaagugcucagcaugucgaggagugcucuugcuauccucgauauccuggugucagaugugucugcagagacaacuggaaaggcuccaauaggcccaucguagauauaaacauaaaggaucauagcauuguuuccaguuauguguguucaggacuuguuggagacacacccagaaaaagcgacagcuccagcaguagccauuguuuggauccuaacaaugaagaagguggucauggagugaaaggcugggccuuugaugauggaaaugacguguggaugggaagaacgaucaacgagacgucacguuuaggguaugaaaccuucaaagucauugaaggcugguccaacccuaaguccaaauugcagauaaauaggcaagucauaguugacagagguaauagguccgguuauucugguauuuucucuguugaaggcaaaagcugcaucaaucggugcuuuuauguggaguugauuaggggaagaaaagaggaaacugaagucuuguggaccucaaacaguauuguuguguuuuguggcaccucagguacauauggaacaggcucauggccugauggggcggaccucaaucucaugccuauauaa

SEQ ID NO: 53841 - RNA, 1410 nt, Artificial Sequence
  derived and/or modified CDS sequence (wt) from neuraminidase__InfluenzaA__AFE02944
augaauccaaaccaaaagauaauaaccauugguucggucuguaugacaauuggaauggcuaacuuaauauuacaaauuggaaacauaaucucaauauggauuagucacucaauucaacuugggaaucaaaaucagauugaaacaugcaaucaaagcgucauuacuuaugaaaacaacacuuggguaaaucagacauauguuaacaucagcaacaccaacuuugcugcuggacagucagugguuuccgugaaauuagcgggcaauuccucucucugcccuguuaguggaugggcuauauacaguaaagacaacaguauaagaaucgguuccaagggggauguguuugucauaagggaaccauucauaucaugcucccccuuggaaugcagaaccuucuucuugacucaaggggccuugcuaaaugacaaacauuccaauggaaccauuaaagacaggagcccauaucgaacccuaaugagcuguccuauuggugaaguucccucuccauacaacucaagauuugagucagucgcuuggucagcaagugcuugucaugauggcaucaauuggcuaacaauuggaauuucuggcccagacaauggggcaguggcuguguuaaaguacaacggcauaauaacagacacuaucaagaguuggagaaacaauauauugagaacacaagagucugaaugugcauguguaaaugguucuugcuuuacuguaaugaccgauggaccaagugauggacaggccucauacaagaucuucagaauagaaaagggaaagauagucaaaucagucgaaaugaaugccccuaauuaucacuaugaggaaugcuccuguuauccugauucuagugaaaucacaugugugugcagggauaacuggcauggcucgaaucgaccguggguaucuuucaaucagaaucuggaauaucagauaggauacauaugcagugggauuuucggagacaauccacgcccuaaugauaagacaggcaguugugguccaguaucgucuaauggagcaaaugggguaaaaggauuuucauucaaauacggcaaugguguuuggauagggagaacuaaaagcauuaguucaagaaacgguuuugagaugauuugggauccgaacggauggacugggacagacaauaacuucucaauaaagcaagauaucguaggaauaaaugaguggucaggauauagcgggaguuuuguucagcauccagaacuaacagggcugaauuguauaagaccuugcuucuggguugaacuaaucagagggcgacccaaagagaacacagucuggacuagcgggagcagcauauccuuuugugguguaaacagugacacuguggguuggucuuggccggacggugcugaguugccauuuaccauugacaaguaa

SEQ ID NO: 53842 - RNA, 1410 nt, Artificial Sequence
  derived and/or modified CDS sequence (wt) from neuraminidase__InfluenzaA__AFE47627
augaauccaaaucaaaagauaauaacgauuggcucuguuucucucaccauugccacaauaugcuuccuuaugcaaauugccauccugguaacuacuguaacguugcauuucaagcaauaugaaugcaacucccccccaaacaaccaagugaugcugugugaaccaacaauaauagaaagaaacauaacagagauaguguaucugaccaacaccaccauagagaaggaaauaugccccaaacuagcagaauacagaaauuggucaaagccgcaauguaacauuacaggauuugcaccuuuuucuaaggacaauucgauucggcuuuccgcugguggggacaucugggugacaagagaaccuuaugugucaugcgauccugacaaguguuaucaauuugcccuuggacagggaacaacacuaaacaacgggcauucaaaugacacaguacaugauaggaccccuuaucgaacccuauugaugaaugaguuggguguuccauuucauuugggaaccaagcaagugugcauagcaugguccagcucaaguugucacgauggaaaagcauggcugcauguuuguguaacgggggaugaugaaaaugcaacugcuagcuucauuuacaaugggaggcuuguagauaguaucgguucaugguccaaaaaaauccucaggacccaggagucggaaugcguuuguaucaauggaacuuguacaguaguaaugacugaugggagugcuucaggaaaagcugauacuaaaauacuauucauugaggaggggaaaaucguucauacuagcucauugucaggaagugcucagcaugucgaggagugcuccuguuauccucgguauccuggugucagaugugucugcagagacaauuggaaaggcuccaauaggcccaucguagauauaaauguaaaggauuauagcauuguuuccaguuaugugugcucaggacuuguuggagacacacccagaaaaaacgacagcuccagcaguagccauugcuuggauccuaacaaugaggaagguggucauggagugaaaggcugggccuuugaugauggaaaugacguguggaugggaagaacgaucagcgagaaguuacgcucaggauaugaaaccuucaaagucauugaaggcugguccaaaccuaacuccaaauugcagacaaauaggcaagucauaguugacagagguaauagguccgguuauucugguauuuucucuguugaaagcaaaagcugcaucaauaggugcuuuuauguggaguugauaaggggaaggaaacaggaaacugaagucuuguggaccucaaacaguauuguuguguuuuguggcaccucagguacauauggaacaggcucauggccugauggggcggacaucaaucucaugccuauauaa

SEQ ID NO: 53843 - RNA, 1410 nt, Artificial Sequence
  derived and/or modified CDS sequence (wt) from neuraminidase__InfluenzaA__AFF18509
augaauccaaaucaaaagauaauaacgauuggcucuguuucucucaccauuuccacaauaugcuucuucaugcaaauugccaucuugauaacuacuguaacauugcauuucaagcaauaugaauucaacucccccccaaacaaccaagugaugcugugugaaccaacaauaauagaaagaaacauaacagagauaguguaucugaccaacaccaccauagagaaggaaauaugccccaaacuagcagaauacagaaauuggucaaagccgcaaugugacauuacaggauuugcaccuuuuucuaaggacaauucgauuaggcuuuccgcugguggggacaucugggugacaagagaaccuuaugugucaugcgauccugacaaguguuaucaauuugcccuuggacagggaacaacacuaaacaacgugcauucaaauaacacaguacgugauaggaccccuuaucggacccuauugaugaaugaguuagguguuccuuuucaucuggggaccaaacaagugugcauagcaugguccagcucaaguugucacgauggaaaagcauggcugcauguuuguauaacgggggaugauaaaaaugcaacugcuagcuucauuuacaaugggaagcuuguagauaguguuguuucaugguccaaagaaauccucaggacccaggagucagaaugcguuuguaucaauggaacuuguacaguaguaaugacugaugggagugcuucaggaaaagcugauacuaaaauacuauucauugaggaggggaaaaucguucauacuagcacauugucaggaagugcucagcaugucgaggagugcucuugcuauccucgauauccuggugucagaugugucugcagagacaacuggaaaggcuccaauaggcccaucguagauauaaacauaaaggaucauaguauuguuucuaguuauguguguucaggacuuguuggagacacacccagaaaaaacgacagcuccagcaguagccauuguuuggauccuaacaaugaggaagguggucauggagugaaaggcugggccuuugaugauggaaaugacguguggaugggaagaacgaucaacgagacgucacguuuaggguaugaaaccuucaaagucauugaaggcugguccaacccuaaguccaaauugcagauaaauaggcaagucauaguugacagagguaauagguccgguuauucugguauuuucucuguugaaggcaaaagcugcaucaaucggugcuuuuauguggaguugauuaggggaagaaaagaggaaacugaagucuuauggaccucaaacaguauuguuguguuuuguggcaccucagguacauauggaacaggcucauggccugauggggcggaucucaaucucaugccuauauaa

SEQ ID NO: 53844 - RNA, 1410 nt, Artificial Sequence
  derived and/or modified CDS sequence (wt) from neuraminidase__InfluenzaA__AFF57129
augaauccaaaccaaaagauaauaaccauugguucggucuguaugacaauuggaauggcuaacuuaauauuacaaauuggaaacauaaucucaauauggauuagccacucaauucaacuugggaaucaaaaucagauugaaacaugcaaucaaagcgucauuacuuaugaaaacaacacuuggguaaaucagacauauguuaacaucagcaacaccaacuuugcugcuggacagucagugguuuccgugaaauuagcgggcaauuccucucucugcccuguuaguggaugggcuauauacaguaaagacaacaguauaagaaucgguuccaagggagauguguuugucauaagggaaccauucauaucaugcucccccuuggaaugcagaaccuucuucuugacucaaggggccuugcuaaaugacaaacauuccaauggaaccauuaaagacaggagcccauaucgaacccuaaugagcuguccuauuggugaaguucccucuccauacaacucaagauuugagucagucgcuuggucagcaagugcuugucaugauggcaucaauuggcuaacaauuggaauuucuggcccagacaauggggcaguggcuguguugaaguacaacggcauaauaacagacacuaucaagaguuggagaaacaauauauugagaacacaagagucugaaugugcauguguaaaugguucuugcuuuaccauaaugaccgauggaccaagugauggacaggccucauacaagaucuucagaauagaaaagggaaagauagucaaaucagucgaaaugaaugccccuaauuaucacuaugaggaaugcuccuguuauccugauucuagugaaaucacaugugugugcagggauaacuggcauggcucgaaucgaccgugggugucuuucaaccagaaucuggaauaucagauaggauacauaugcagugggauuuucggagacaauccacgcccuaaugauaagacaggcaguugugguccaguaucgucuaauggagcaaauggaguaaaaggauuuucauucaaauacggcaaugguguuuggauagggagaacuaaaagcauuaguucaagaaaagguuuugagaugauuugggauccaaacggauggaaugggacagacaauaacuucucaauaaagcaagauaucguaggaauaaaugaguggucaggauauagcgggaguuuuguucagcauccagaacuaacagggcuggacuguauaagaccuugcuucuggguugaacuaaucagagggcgacccaaagagaacacaaucuggacuagcgggagcagcauauccuuuugugguguaaacagugacacuguggguuggucuuggccagacggugcugaguugccauuuaccauugacaaguaa

SEQ ID NO: 53845 - RNA, 1410 nt, Artificial Sequence
  derived and/or modified CDS sequence (wt) from neuraminidase__InfluenzaA__AFF57133
augaauccaaaccaaaagauaauaaccauugguucggucuguaugacaauuggaauggcuaacuuaauauuacaaauuggaaacauaaucucaauauggauuagccacucaauucaacuugggaaucaaagucagauugaaacaugcaaucaaagcgucauuacuuaugaaaacaacacuugguuaaaucagacauauguuaacaucagcaacaccaacuuugcugcuggacagucagugguuuccgugaaauuagcgggcaauuccucucucugcccuguuaguggaugggcuauauacaguaaagacaacaguauaagaaucgguuccaagggggauguguuugucauaagggaaccauucauaucaugcucccccucggaaugcagaaccuucuucuugacucaaggggccuugcuaaaugacaaacauuccaauggaaccauuaaagacaggagcccauaucgaacccuaaugagcuguccuauuggugaaguucccucuccauacaacucaagauuugagucagucgcuuggucagcaagugcuugucaugauggcaucaauuggcuaacaauuggaauuucuggcccagacaauggggcaguggcuguguuaaaguacaacggcauaauaacagacacuaucaagaguuggagaaacaauauauugagaacacaagagucugaaugugcauguguaaaugguucuugcuuuaccauaaugaccgauggaccaagugauggacaggccucauacaagaucuucagaauagaaaagggaaagauagucaaaucagucgaaaugaaugccccuaauuaucacuaugaggaaugcuccuguuauccugauucuagugaaaucacaugugugugcagggauaacuggcauggcucgaaucgaccgugggugucuuucaaccagaaucuggaauaucagauaggauacauaugcagugggauuuucggagacaauccacgcccuaaugauaagacaggcaguugugguccaguaucgucuaauggagcaaauggaguaaaaggauuuucauucaaauacggcaaugguguuuggauagggagaacuaaaagcauuaguucaagaaaagguuuugagaugauuugggauccaaacggauggacugggacagacaauaacuucucaauaaagcaagauaucguaggaauaaaugaguggucaggauauagcgggaguuuuguucagcauccagaacuaacagggcuggauuguauaagaccuugcuucuggguugaacuaaucagagggcgacccaaagagaacacaaucuggacuagcgggagcagcauauccuuuugugguguaaacagugacacuguggguuggucuuggccagacggugcugaguugccauuuaccauugacaaguaa

SEQ ID NO: 53846 - RNA, 1410 nt, Artificial Sequence
  derived and/or modified CDS sequence (wt) from neuraminidase__InfluenzaA__AFF57137
augaauccaaaccaaaagauaauaaccauugguucggucuguaugacaauuggaauggcuaacuuaauauuacaaauuggaaacauaaucucaauauggauuagccacucaauucaacuugggaaucaaaaucagauugaaacaugcaaucaaagcgucauuacuuaugaaaacaacacuuggguaaaucagacauauguuaacaucagcaacaccaacuuugcugcuggacagucagugguuuccgugaaauuagcgggcaauuccucucucugcccuguuaguggaugggcuauauacaguaaagacaacaguauaagaaucgguuccaagggggauguguuugucauaagggaaccauucauaucaugcucccccuuggaaugcagaaccuucuucuugacucaaggggccuugcuaaaugacaaacauuccaauggaaccauuaaagacaggagcccauaucgaacccuaaugagcuguccuauuggugaaguucccucuccauacaacucaagauuugagucagucgcuuggucagcaagugcuugucaugauggcaucaauuggcuaacaauuggaauuucuggcccagacaauggggcaguggcuguguuaaaguacaacggaauaauaacagacacuaucaagaguuggagaaacaauauauugagaacacaagagucugaaugugcauguguaaaugguucuugcuuuacuguaaugaccgauggaccaaguaauggacaggccucauacaagaucuucagaauagaaaagggaaagauagucaaaucagucgaaaugaaugccccuaauuaucacuaugaggaaugcuccuguuauccugauucuagugaaaucacaugugugugcagggauaacuggcauggcucgaaucgaccgugggugucuuucaaccagaaucuggaauaucagauaggauacauaugcagugggauuuucggagacaauccacgcccuaaugauaagacaggcaguugugguccaguaucgucuaauggagcaaauggaguaaaaggauuuucauucaaauacggcaaugguguuuggauagggagaacuaaaagcauuaguucaagaaacgguuuugagaugauuugggauccgaacggauggacugggacagacaauaacuucucaauaaagcaagauaucguaggaauaaaugaguggucaggauauagcgggaguuuuguucagcauccagaacuaacagggcuggauuguauaagaccuugcuucuggguugaacuaaucagagggcgacccaaagagaacacaaucuggacuagcgggagcagcauauccuuuugugguguaaacagugacacuguggguuggucuuggccagacggugcugaguugccauuuaccauugacaaguaa

SEQ ID NO: 53847 - RNA, 1410 nt, Artificial Sequence; identical to SEQ ID NO: 53846
  derived and/or modified CDS sequence (wt) from neuraminidase__InfluenzaA__AFF57141

SEQ ID NO: 53848 - RNA, 1410 nt, Artificial Sequence; identical to SEQ ID NO: 53846
  derived and/or modified CDS sequence (wt) from neuraminidase__InfluenzaA__AFF57145

SEQ ID NO: 53849 - RNA, 1410 nt, Artificial Sequence; identical to SEQ ID NO: 53846
  derived and/or modified CDS sequence (wt) from neuraminidase__InfluenzaA__AFF57149

SEQ ID NO: 53850 - RNA, 1410 nt, Artificial Sequence; identical to SEQ ID NO: 53846
  derived and/or modified CDS sequence (wt) from neuraminidase__InfluenzaA__AFF57153

SEQ ID NO: 53851 - RNA, 1410 nt, Artificial Sequence
  derived and/or modified CDS sequence (wt) from neuraminidase__InfluenzaA__AFF57157
augaauccaaaccaaaagauaauaaccauugguucggucuguaugacaauuggaauggcuaacuuaauauuacaaauuggaaacauaaucucaauauggauuagccacucaauucaacuugggaaucaaaaucagauugaaacaugcaaucaaagcgucauuacuuaugaaaacaacacuuggguaaaucagacauauguuaacaucagcaacaccaacuuugcugcuggacagucagugguuuccgugaaauuagcgggcaauuccucucucugcccuguuaguggaugggcuauauacaguaaagacaacaguauaagaaucgguuccaagggggauguguuugucauaagggaaccauucauaucaugcucccccuuggaaugcagaaccuucuucuugacucaaggggccuugcuaaaugacaaacauuccaauggaaccauuaaagacaggagcccauaucgaacccuaaugagcuguccuauuggugaaguucccucuccauacaacucaagauuugagucagucgcuuggucagcaagugcuugucaugauggcaucaauuggcuaacaauuggaauuucuggcccagacaauggggcaguggcuguguuaaaguacaacggaauaauaacagacacuaucaagaguuggagaaacaauauauugagaacacaagagucugaaugugcauguguaaaugguucuugcuuuacuguaaugaccgauggaccaaguaauggacaggccucauacaagaucuucagaauagaaaagggaaagauagucaaaucaguugaaaugaaugccccuaauuaucacuaugaggaaugcuccuguuauccugauucuagugaaaucacaugugugugcagggauaacuggcauggcucgaaucgaccgugggugucuuucaaccagaaucuggaauaucagauaggauacauaugcagugggauuuucggagacaauccacgcccuaaugauaagacaggcaguugugguccaguaucgucuaauggagcaaauggaguaaaaggauuuucauucaaauacggcaaugguguuuggauagggagaacuaaaagcauuaguucaagaaacgguuuugagaugauuugggauccgaacggauggacugggacagacaauaacuucucaauaaagcaagauaucguaggaauaaaugaguggucaggauauagcgggaguuuuguucagcauccagaacuaacagggcuggauuguauaagaccuugcuucuggguugaacuaaucagagggcgacccaaagagaacacaaucuggacuagcgggagcagcauauccuuuugugguguaaacagugacacuguggguuggucuuggccagacggugcugaguugccauuuaccauugacaaguaa

SEQ ID NO: 53852 - RNA, 1410 nt, Artificial Sequence; identical to SEQ ID NO: 53851
  derived and/or modified CDS sequence (wt) from neuraminidase__InfluenzaA__AFF57161

SEQ ID NO: 53853 - RNA, 1410 nt, Artificial Sequence; identical to SEQ ID NO: 53846
  derived and/or modified CDS sequence (wt) from neuraminidase__InfluenzaA__AFF57165

SEQ ID NO: 53854 - RNA, 1410 nt, Artificial Sequence; identical to SEQ ID NO: 53846
  derived and/or modified CDS sequence (wt) from neuraminidase__InfluenzaA__AFF57169

SEQ ID NO: 53855 - RNA, 1410 nt, Artificial Sequence; identical to SEQ ID NO: 53846
  derived and/or modified CDS sequence (wt) from neuraminidase__InfluenzaA__AFF57173

SEQ ID NO: 53856 - RNA, 1410 nt, Artificial Sequence; identical to SEQ ID NO: 53846
  derived and/or modified CDS sequence (wt) from neuraminidase__InfluenzaA__AFF57177

SEQ ID NO: 53857 - RNA, 1410 nt, Artificial Sequence; identical to SEQ ID NO: 53846
  derived and/or modified CDS sequence (wt) from neuraminidase__InfluenzaA__AFF57181

SEQ ID NO: 53858 - RNA, 1410 nt, Artificial Sequence; identical to SEQ ID NO: 53846
  derived and/or modified CDS sequence (wt) from neuraminidase__InfluenzaA__AFF57185

SEQ ID NO: 53859 - RNA, 1410 nt, Artificial Sequence
  derived and/or modified CDS sequence (wt) from neuraminidase__InfluenzaA__AFF57189
augaauccaaaccaaaagauaauaaccauugguucggucuguaugacaauuggaauggcuaacuuaauauuacaaauuggaaacauaaucucaauauggauuagccacucaauucaacuugggaaucaaaaucagauugaaacaugcaaucaaagcgucauuacuuaugaaaacaacacuuggguaaaucagacauauguuaacaucagcaacaccaacuuugcugcuggacagucagugguuuccgugaaauuagcgggcaauuccucucucugcccuguuaguggaugggcuauauacaguaaagacaacaguauaagaaucgguuccaagggggauguguuugucauaagggaaccauucauaucaugcucccccuuagaaugcagaaccuucuucuugacucaaggggccuugcuaaaugacaaacauuccaauggaaccauuaaagacaggagcccauaucgaacccuaaugagcuguccuauuggugaaguucccucuccauacaacucaagauuugagucagucgcuuggucagcaagugcuugucaugauggcaucaauuggcuaacaauuggaauuucuggcccagacaauggggcaguggcuguguuaaaguacaacggaauaauaacagacacuaucaagaguuggagaaacaauauauugagaacacaagagucugaaugugcauguguaaaugguucuugcuuuacuguaaugaccgauggaccaaguaauggacaggccucauacaagaucuucagaauagaaaagggaaagauagucaaaucagucgaaaugaaugccccuaauuaucacuaugaggaaugcuccuguuauccugauucuagugaaaucacaugugugugcagggauaacuggcauggcucgaaucgaccgugggugucuuucaaccagaaucuggaauaucagauaggauacauaugcagugggauuuucggagacaauccacgcccuaaugauaagacaggcaguugugguccaguaucgucuaauggagcaaauggaguaaaaggauuuucauucaaauacggcaaugguguuuggauagggagaacuaaaagcauuaguucaagaaacgguuuugagaugauuugggauccgaacggauggacugggacagacaauaacuucucaauaaagcaagauaucguaggaauaaaugaguggucaggauauagcgggaguuuuguucagcauccagaacuaacagggcuggauuguauaagaccuugcuucuggguugaacuaaucagagggcgacccaaagagaacacaaucuggacuagcgggagcagcauauccuuuugugguguaaacagugacacuguggguuggucuuggccagacggugcugaguugccauuuaccauugacaaguaa

SEQ ID NO: 53860 - RNA, 1350 nt, Artificial Sequence
  derived and/or modified CDS sequence (wt) from neuraminidase__InfluenzaA__AFF60789
augaauccaaauaagaagauaauaaccaucggaucaaucuguaugguaacuggaaugguuagcuuaauguuacaaauugggaacuugaucucaauaugggucagucauucaauucacacagggaaucaacacaaagcugaaccaaucagcaauacuaauuuucuuacugagaaagcuguggcuucaguaaaauuagcgggcaauucaucucuuugccccauuaauggaugggcuguauacaguaaggacaacaguauaaggaucgguuccaagggggauguguuuguuauaagagagccauucaucucaugcucccacuuggaaugcagaacuuucuuuuugacucagggagccuugcugaaugacaagcacuccaaugggacugucaaagacagaagcccucacagaacauuaaugaguuguccugugggugaggcucccuccccauauaacucaagguuugagucuguugcuuggucagcaagugcuugccaugauggcaccaguugguugacaauuggaauuucuggcccagacaauggggcuguggcuguauugaaauacaauggcauaauaacagacacuaucaagaguuggaggaauaacauacugagaacucaagagucugaaugugcauguguaaauggcucuugcuuuacuguaaugacugacggaccaaguaauggucaggcaucacauaagaucuucaaaauggaaaaagggaaagugguuaaaucagucgaauuggaugcucccaauuaucacuaugaggaaugcuccuguuauccugaugccggcgaaaucacaugugugugcagggauaauuggcauggcucaaaucggccauggguaucuuucaaucaaaauuuggaguaucaaauaggauauauaugcaguggaguuuucggagacaauccacgccccaaugauggaacagguaguugugguccgguguccucuaacggggcauaugggguaaaaggguuuucauuuaaauacggcaauggugucuggaucgggagaacaaaaagcacuaauuccaggagcggcuuugaaaugauuugggauccaaauggguggacugaaacggacaguagcuuuucagugaaacaagauaucguagcaauaacugauuggucaggauauagcgggaguuuuguccagcauccagaacugacaggacuagauugcauaagaccuuguuucuggguugaguugaucagagggcggcccaaagagagcacaauuuggacuagugggagcagcauaucuuuuugugguguaacuagugacacuguggguuggucuuggccagacggugcugaauugccauucaccauugacaaguag

SEQ ID NO: 53861 - RNA, 1410 nt, Artificial Sequence
  derived and/or modified CDS sequence (wt) from neuraminidase__InfluenzaA__AFG29043
augaauccaaaccaaaagauaauaaccauugguucggucuguaugacaauuggaauggcuaacuuaauauuacaaauuggaaacauaaucucaauauggauuagccacucaauucaacuugggaaucaaaaucagauugaaacaugcaaucaaagcgucauuacuuaugaaaacaacacuuggguaaaucagacauauguuaacauaagcaacaccaacuuugcugcuggacagucagugguuuccgugaaauuagcgggcaauuccucucucugcccuguuaguggaugggcuauauacaguaaagacaacaguauaagaaucgguuccaagggggauguguuugucauaagggaaccauucauaucaugcucccccuuggaaugcagaaccuucuucuugacucaaggggccuugcuaaaugacaaacauuccaauggaaccauuagagacaggagcccauaucgaacccuaaugagcuguccuauuggugaaguucccucuccauacaacucaagauuugagucagucgcuuggucagcaagugcuugucaugauggcaucaauuggcuaacaauuggaauuucuggcccagacaauggggcaguggcuguguuaaaguacaacgguauaauaacagacacuaucaagaguuggagaaacaauauauugagaacacaagagucugaaugugcauguguaaaugguucuugcuuuacuguaaugaccgauggaccaagugauggacaggccucauacaagaucuucagaauagaaaagggaaagauagucaaaucagucgaaaugaaugccccuaauuaucacuaugaggaaugcuccuguuauccugauucuagugaaaucacaugugugugcagggauaacuggcauggcucgaaucgaccgugggugucuuucaaccagaaucuggaauaucagauaggauacauaugcagugggauuuucggagacaauccacgcccuaaugauaagacaggcaguugugguccaguaucgucuaauggagcaaauggaguaaaaggauuuucauucaaauacggcaaugguguuuggauagggagaacuaaaagcauuaguucaagaaacgguuuugagaugaucugggauccgaacggauggacugggacagacaauaacuucucaauaaagcaagauaucguaggaauaaaugaguggucaggauauagcgggaguuuuguccagcauccagaacuaacagggcuggauuguauaagaccuugcuucuggguugaacuaaucagagggcgacccaaagagaacacaaucuggacuagcgggagcagcauauccuuuugugguguaaacagugacacuguggguuggucuuggccagacggugcugaguugccauuuaccauugacaaguaa

SEQ ID NO: 53862 - RNA, 1410 nt, Artificial Sequence
  derived and/or modified CDS sequence (wt) from neuraminidase__InfluenzaA__AFG29045
augaauccaaaccaaaagauaauaaccauugguucggucuguaugacaauuggaauggcuaacuuaauauuacaaauuggaaacauaaucucaauauggauuagccacucaauucaacuugggaaucaaaaucagauugaaacaugcaaucaaagcgucauuacuuaugaaaacaacacuuggguaaaucagacauauguuaacaucagcaacaccaacuuugcugcuggacagucagugguuuccgugaaauuagcgggcaauuccucucucugcccuguuaguggaugggcuauauacaguaaagacaacaguauaagaaucgguuccaagggggauguguuugucauaagggaaccauucauaucaugcucccccuuggaaugcagaaccuucuucuugacucaaggggccuugcuaaaugacaaacauuccaauggaaccauuaaagacaggagcccauaucgaacccuaaugagcuguccuauuggugaaguucccucuccauacaacucaagauuugagucagucgcuuggucagcaagugcuugucaugauggcaucaauuggcuaacaauuggaauuucuggcccagacaauggggcaguggcuguguuaaaguacaacggcauaauaacagacacuaucaagaguuggaaaaacaauauauugagaacacaagagucugaaugugcauguguaaaugguucuugcuuuacuguaaugaccgauggaccaagugauggacaggccucauacaagaucuucagaauagaaaagggaaagauagucaaaucagucgaaaugaaugcccccaauuaucacuaugaggaaugcuccuguuauccugauucuagugaaaucacaugugugugcagggauaacuggcauggcucgaaucgaccgugggugucuuucaaccagaaucuggaauaucagauaggauacauaugcagugggauuuucggagacaauccacgcccuaaugauaagacaggcaguugugguccaguaucgucuaauggagcaaauggaguaaaaggauuuucauucaaauacggcaaugguguuuggauagggagaacuaaaagcauuaguucaagaaacgguuuugagaugauuugggauccgaacggauggacugggacagacaauaacuucucaauaaagcaagauaucguaggaauaaaugaauggucaggauauagcgggaguuuuguucagcauccagaacuaacagggcuggauuguauaagaccuugcuucuggguugaacuaaucagagggcgacccaaagagaacacaaucuggacuagcgggagcagcauauccuuuugugguguaaacagugacacuguggguuggucuuggccagacggugcugaguugccauuuaccauugacaaguaa

SEQ ID NO: 53863 - RNA, 1410 nt, Artificial Sequence
  derived and/or modified CDS sequence (wt) from neuraminidase__InfluenzaA__AFG31063
augaauccaaaccaaaagauaauaaccauugguucggucuguaugacaauuggaauggcuaacuuaauauuacaaauuggaaacauaaucucaauauggauuagccacucaauucaacuugggaaucaaaaucagauugaaacaugcaaucaaagcaucauuacuuaugaaaacaacacuuggguaaaucagacauauguuaacaucagcaacaccaacuuugcugcuggacagucagugguuuccgugaaauuagcgggcaauuccucucucugcccuguuaguggaugggcuauauacaguaaagacaacaguauaagaaucgguuccaagggggauguguuugucauaagggaaccauucauaucaugcucccccuuggaaugcagaaccuucuucuugacucaaggggccuugcuaaaugacaaacauuccaauggaaccauuaaagacaggagcccauaucgaacccuaaugagcuguccuauuggugaaguucccucuccauacaacucaagauuugagucagucgcuuggucagcaagugcuugucaugauggcaucaauuggcuaacaauuggaauuucuggcccagacaauggggcaguggcuguguuaaaguacaacggcauaauaacagacacuaucaagaguuggagaaacaauauauugagaacacaagagucugaaugugcauguguaaaugguucuugcuuuacuguaaugaccgauggaccaagugauggacaggccucauacaagaucuucagaauagaaaagggaaagauagucaaaucagucgaaaugaaugccccuaauuaucacuaugaggaaugcuccuguuauccugauucuagugaaaucacaugugugugcagggauaacuggcauggcucgaaucgaccgugggugucuuucaaccagaaucuggaauaucagauaggauacauaugcagugggauuuucggagacaauccacgcccuaaugauaagacaggcaguugugguccaguaucgucuaauggagcaaauggaguaaaaggauuuucauucaaauacggcaaugguguuuggauagggagaacuaaaagcauuaguucaagaaacgguuuugagaugauuugggauccgaacggauggacugggacagacaauaacuucucaauaaagcaagauaucguaggaauaaaugaguggucaggauauagcgggaguuuuguucagcauccagaacuaacagggcuggauuguauaagaccuugcuucuggguugaacuaaucagagggcgacccaaagagaacacaaucuggacuagcgggagcagcauauccuuuugugguguaaacagugacacuguggguuggucuuggccagacggugcugaguugccauuuaccauugacaaguaa

SEQ ID NO: 53864 - RNA, 1410 nt, Artificial Sequence; identical to SEQ ID NO: 48750
  derived and/or modified CDS sequence (wt) from neuraminidase__InfluenzaA__AFG31073

SEQ ID NO: 53865 - RNA, 1410 nt, Artificial Sequence
  derived and/or modified CDS sequence (wt) from neuraminidase__InfluenzaA__AFG31083
augaauccaaaccaaaagauaauaaccauugguucggucuguaugacaauuggaauggcuaacuuaauauuacaaauuggaaacauaaucucaauauggauuagccacucaauucaacuugugaaucaaaaucagauugaaacaugcaaucaaagcgucauuacuuaugaaaacaacacuuggguaaaucagacauauguuaacaucagcaacaccaacuuugcugcuggacagucagugguuuccgugaaauuagcgggcaauuccucucucugcccuguuaguggaugggcuauauacaguaaagacaacaguguaagaaucgguuccaagggggauguguuugucauaagggaaccauucauaucaugcucccccuuggaaugcagaaccuucuucuugacucaaggggccuugcuaaaugacaaacauuccaauggaaccauuaaagacaggagcccauaucgaacccuaaugagcuguccuauuggugaaguucccucuccauacaacucaagauuugagucagucgcuuggucagcaagugcuugucaugauggcaucaauuggcuaacaauuggaauuucuggcccagacaauggggcaguggcuguguuaaaguacaacggcauaauaacagacacuaucaagaguuggagaaacaauauauugagaacacaggagucugaaugugcauguguaaaugguucuugcuuuacuguaaugaccgauggaccaaguaauggacaggccucauacaagaucuucagaauagaaaagggaaagauagucaaaucagucgaaaugaaugccccuaauuaucacuaugaggaaugcuccuguuauccugauucuagugaaaucacaugugugugcagggauaacuggcauggcucgaaucgaccgugggugucuuucaaccagaaucuggaauaucagauaggauacauaugcagugggauuuucggagacaauccacgcccuaaugauaagacaggcaguugugguccaguaucgucuaauggagcaaauggaguaaaaggauuuucauucaaauacggcaaugguguuuggauagggagaacuaaaagcauuaguucaagaaacgguuuugagaugauuugggauccgaacggauggacugggacagacaauaacuucucaauaaagcaagauaucguaggaauaaaugaguggucaggauauagcgggaguuuuguucagcauccagaacuaacagggcuggauuguauaagaccuugcuucuggguugaacuaaucagagggcgacccaaagaaaacacaaucuggacuagcgggagcagcauaucuuuuugugguguaaacagugacacuguggguuggucuuggccagacggugcugaguugccauuuaccauugacaaguaa

SEQ ID NO: 53866 - RNA, 1410 nt, Artificial Sequence
  derived and/or modified CDS sequence (wt) from neuraminidase__InfluenzaA__AFG31093
augaauccaaaccaaaagauaauaaccauugguucggucuguaugacaauuggaauggcuaacuuaauauuacaaauuggaaacauaaucucaauauggauuagccacucaauucaacuugggaaucaaaaucagauugaaacaugcaaucaaagcgucauuacuuaugaaaacaacacuuggguaaaucagacauauguuaacaucagcaacaccaacuuugcugcuggacagucagugguuuccgugaaauuagcgggcaauuccucucucugcccuguuaguggaugggcuauauacaguaaagacaacaguauaagaaucgguuccaagggggauguguuugucauaagggaaccauucauaucaugcucccccuuagaaugcagaaccuucuucuugacucaaggggccuugcuaaaugacaaacauuccaauggaaccauuaaagacaggagcccauaucgaacccuaaugagcuguccuauuggugaaguucccucuccauacaacucaagauuugagucagucgcuuggucagcaagugcuugucaugauggcaucaauuggcuaacaauuggaauuucuggcccagacaauggggcaguggcuguguuaaaguacaacggcauaauaacagacacuaucaagaguuggagaaacaauauauugagaacacaagagucugaaugugcauguguaaaugguucuugcuuuacuguaaugaccgauggaccaagugauggacaggccucauacaagaucuucagaauagaaaagggaaagauagucaaaucagucgaaaugaaugccccuaauuaucacuaugaggaaugcuccuguuauccugauucuagugaaaucacaugugugugcagggauaacuggcauggcucgaaucgaccgugggugucuuucaaccagaaucuggaauaucagauaggauacauaugcagugggauuuucggagacaauccacgcccuaaugauaagacaggcaguugugguccaguaucgucuaauggagcaaauggaguaaaaggauuuucauucaaauacggcaaugguguuuggauagggagaacuaaaagcauuaguucaagaaacgguuuugagaugauuugggauccgaacggauggacugggacagacaauaacuucucaauaaagcaagauaucguaggaauaaaugaguggucaggauauagcgggaguuuuguccagcauccagaacuaacagggcuggauuguauaagaccuugcuucuggguugaacuaaucagagggcgacccaaagagaacacaaucuggacuagcgggagcagcauauccuuuugugguguaaacagugacacuguggguuggucuuggccagacggugcugaguugccauuuaccauugacaaguaa

SEQ ID NO: 53867 - RNA, 1410 nt, Artificial Sequence; identical to SEQ ID NO: 53866
  derived and/or modified CDS sequence (wt) from neuraminidase__InfluenzaA__AFG31103

SEQ ID NO: 53868 - RNA, 1410 nt, Artificial Sequence; identical to SEQ ID NO: 48750
  derived and/or modified CDS sequence (wt) from neuraminidase__InfluenzaA__AFG31113

SEQ ID NO: 53869 - RNA, 1410 nt, Artificial Sequence
  derived and/or modified CDS sequence (wt) from neuraminidase__InfluenzaA__AFG31123
augaauccaaaccaaaagauaauaaccauugguucggucuguaugacaauuggaauggcuaacuuaauauuacaaauuggaaacauaaucucaauauggauuagccacucaauucaacuugggaaucaaaaucagauugaaacaugcaaucaaagcgucauuacuuaugaaaacaacacuuggguaaaucagacauauguuaacaucagcaacaccaacuuugcugcuggacagucagugguuuccgugaaauuagcgggcaauuccucucucugcccuguuaguggaugggcuauauacaguaaagacaacaguauaagaaucgguuccaagggggauguguuugucauaagggaaccauucauaucaugcucccccuuggaaugcagaaccuucuucuugacucaaggggccuugcuaaaugacaaacauuccaauggaaccauuaaagacaggagcccauaucgaacccuaaugagcuguccuauuggugaaguucccucuccauacaacucaagauuugagucagucgcuuggucagcaagugcuugucaugauggcaucaauuggcuaacaauuggaauuucuggcccagacaauggggcaguggcuguguuaaaguacaacggcauaauaacagacacuaucaagaguuggagaaacaauauauugagaacacaagagucugaaugugcauguguaaaugguucuugcuuuacuguaaugaccgauggaccaagugauggacaggccucauacaagaucuucagaauagaaaagggaaagauagucaaaucagucgaaaugaaugccccuaauuaucacuaugaggaaugcuccuguuauccugauucuagugaaaucacgugugugugcagggauaacuggcauggcucgaaucgaccgugggugucuuucaaccagaaucuggaauaucagauaggauacauaugcagugggauuuucggagacaauccacgcccuaaugauaagacaggcaguugugguccaguaucgucuaauggagcaaauggaguaaaaggauuuucauucaaauacggcaaugguguuuggauagggagaacuaaaagcauuaguucaagaaacgguuuugagaugauuugggauccgaacggauggacugggacagacaauaacuucucaauaaagcaagauaucguaggaauaaaugaguggucaggauauagcgggaguuuuguucagcauccagaacuaacagggcuggauuguauaagaccuugcuucuggguugaacuaaucagagggcgacccaaagagaacacaaucuggacuagcgggagcagcauauccuuuugugguguaaacagugacacuguggguuggucuuggccagacggugcugaguugccauuuaccauugacaaguaa

SEQ ID NO: 53870 - RNA, 1410 nt, Artificial Sequence; identical to SEQ ID NO: 53869
  derived and/or modified CDS sequence (wt) from neuraminidase__InfluenzaA__AFG31133

SEQ ID NO: 53871 - RNA, 1410 nt, Artificial Sequence; identical to SEQ ID NO: 53869
  derived and/or modified CDS sequence (wt) from neuraminidase__InfluenzaA__AFG31143

SEQ ID NO: 53872 - RNA, 1410 nt, Artificial Sequence; identical to SEQ ID NO: 50013
  derived and/or modified CDS sequence (wt) from neuraminidase__InfluenzaA__AFG31153

SEQ ID NO: 53873 - RNA, 1410 nt, Artificial Sequence; identical to SEQ ID NO: 50013
  derived and/or modified CDS sequence (wt) from neuraminidase__InfluenzaA__AFG31163

SEQ ID NO: 53874 - RNA, 1410 nt, Artificial Sequence
  derived and/or modified CDS sequence (wt) from neuraminidase__InfluenzaA__AFG31173
augaauccaaaccaaaagauaauaaccauugguucggucuguaugacaauuggaauggcuaacuuaauauuacaaauuggaaacauaaucucaauauggauuagccacucaauucaacuugggaaucaaaaucagauugaaacaugcaaucaaagcgucauuacuuaugaaaacaacacuuggguaaaucagacauauguuaacaucagcaacaccaacuuugcugcuggacagucagugguuuccgugaaauuagcgggcaauuccucucucugcccuguuaguggaugggcuauauacaguaaagacaacaguauaagaaucgguuccaagggggauguguuugucauaagggaaccauucauaucaugcucccccuuggaaugcagaaccuucuucuugacucaaggggccuugcuaaaugacaaacauuccaauggaaccauuaaagacaggagcccauaucgaacccuaaugagcuguccuauuggugaaguucccucuccauacaacucaagauuugagucagucgcuuggucagcaagugcuugucaugauggcaucaauuggcuaacaauuggaauuucuggcccagacaauggggcaguggcuguguuaaaguacaacggcauaauaacagacacuaucaagaguuggagaaacaauauauugagaacacaagagucugaaugugcauguguaaaugguucuugcuuuacuguaaugaccgauggaccaagugauggacaggccucauacaagaucuucagaauagaaaagggaaagauagucaaaucagucgaaaugaaugccccuaauuaucacuaugaggaaugcuccuguuauccugauucuagugaaaucacaugugugugcagggauaacuggcauggcucgaaucgaccgugggugucuuucaaccagaaucuggaauaucagauaggauacauaugcagugggauuuucggagacaauccacgcccuaaugauaagacaggcaguugugguccaguaucgucuaauggagcaaauggaguaaaaggauuuucauucaaauacggcaaugguguuuggauagggagaacuaaaagcauuaguucaagaaacgguuuugagaugauuugggauccgaacggauggacugggacagacaauaacuucucaauaaagcaagauaucguaggaauaaaugaguggucaggauauagcgggaguuuuguucagcauccagaacuaacagggcuggauuguauaagaccuugcuucuggguugaacuaaucagagggcuacccaaagagaacacaaucuggacuagcgggagcagcauauccuuuugugguguaaacagugacacuguggguuggucuuggccagacggugcugaguugccauuuaccauugacaaguaa

SEQ ID NO: 53875 - RNA, 1410 nt, Artificial Sequence; identical to SEQ ID NO: 53874
  derived and/or modified CDS sequence (wt) from neuraminidase__InfluenzaA__AFG31183

SEQ ID NO: 53876 - RNA, 1410 nt, Artificial Sequence; identical to SEQ ID NO: 48750
  derived and/or modified CDS sequence (wt) from neuraminidase__InfluenzaA__AFG31193

SEQ ID NO: 53877 - RNA, 1410 nt, Artificial Sequence; identical to SEQ ID NO: 48750
  derived and/or modified CDS sequence (wt) from neuraminidase__InfluenzaA__AFG31203

SEQ ID NO: 53878 - RNA, 1410 nt, Artificial Sequence; identical to SEQ ID NO: 48750
  derived and/or modified CDS sequence (wt) from neuraminidase__InfluenzaA__AFG31213

SEQ ID NO: 53879 - RNA, 1410 nt, Artificial Sequence; identical to SEQ ID NO: 48750
  derived and/or modified CDS sequence (wt) from neuraminidase__InfluenzaA__AFG31223

SEQ ID NO: 53880 - RNA, 1410 nt, Artificial Sequence; identical to SEQ ID NO: 48750
  derived and/or modified CDS sequence (wt) from neuraminidase__InfluenzaA__AFG31233

SEQ ID NO: 53881 - RNA, 1410 nt, Artificial Sequence
  derived and/or modified CDS sequence (wt) from neuraminidase__InfluenzaA__AFG31243
augaauccaaaccaaaagauaauaaccauugguucggucuguaugacaauuggaauggcuaacuuaauauuacaaauuggaaacauaaucucaauauggauuagccacucaauucaacuugggaaucaaaaucagauugaaacaugcaaucaaagcgucauuacuuaugaaaacaacacuuggguaaaucagacauauguuaacaucagcaacaccaacuuuguugcuggacagucagugguuuccgugaaauuagcgggcaauuccucucucugcccuguuaguggaugggcuauauacaguaaagacaacaguauaagaaucgguuccaagggggauguguuugucauaagggaaccauucauaucaugcucccccuuggaaugcagaaccuucuucuugacucaaggggccuugcuaaaugacaaacauuccaauggaaccauuaaagacaggagcccauaucgaacccuaaugagcuguccuauuggugaaguucccucuccauacaacucaagauuugagucagucgcuuggucagcaagugcuugucaugauggcaucaauuggcuaacaauuggaauuucuggcccagacaauggggcaguggcuguguuaaaguacaacggcauaauaacagacacuaucaagaguuggagaaacaauauauugagaacacaagagucugaaugugcauguguaaaugguucuugcuuuacuguaaugaccgauggaccaagugauggacaggccucauacaagaucuucagaauagaaaagggaaagauagucaaaucagucgaaaugaaugccccuaauuaucacuaugaggaaugcuccuguuauccugauucuagugaaaucacaugugugugcagggauaacuggcauggcucgaaucgaccgugggugucuuucaaccagaaucuggaauaucagauaggauacauaugcagugggauuuucggagacaauccacgcccuaaugauaagacaggcaguugugguccaguaucgucuaauggagcaaauggaguaaaaggauuuucauucaaauacggcaaugguguuuggauagggagaacuaaaagcauuaguucaagaaacgguuuugagaugauuugggauccgaacggauggacugggacagacaauaacuucucaauaaagcaagauaucguaggaauaaaugaguggucaggauauagcgggaguuuuguucagcauccagaacuaacagggcuggauuguauaagaccuugcuucuggguugaacuaaucagagggcgacccaaagagaacacaaucuggacuagcgggagcagcauauccuuuugugguguaaacagugacacuguggguuggucuuggccagacggugcugaguugccauuuaccauugacaaguaa

SEQ ID NO: 53882 - RNA, 1410 nt, Artificial Sequence
  derived and/or modified CDS sequence (wt) from neuraminidase__InfluenzaA__AFG31253
augaauccaaaccaaaagauaauaaccauugguucggucuguaugacaauuggaauggcuaacuuaauauuacaaauuggaaacauaaucucaauauggauuagccacucaauucaacuugggaaucaaaaucagauugaaacaugcaaucaaagcgucauuacuuaugaaaacaacacuuggguaaaucagacauauguuaacaucagcaacaccaacuuugcugcuggacagucagugguuuccgugaaauuagcgggcaauuccucucucugcccuguuaguggaugggcuauauacaguaaagacaacaguauaagaaucgguuccaagggggauguguuugucauaagggaaccauucauaucaugcucccccuuggaaugcagaaccuucuucuugacucaaggggccuugcuaaaugacaaacauuccaauggaaccauuaaagacaggagcccauaucgaacccuaaugagcuguccuauuggugaaguucccucuccauacaacucaagauuugagucagucgcuuggucagcaagugcuugucaugauggcaucaauuggcuaacaauuggaauuucuggcccagacaauggggcaguggcuguguuaaaguacaacggcauaauaacagacacuaucaagaguuggagaaacaauauauugagaacacaagagucugaaugugcauguguaaaugguucuugcuuuacuguaaugaccgauggaccaagugauggacaggccucauacaagaucuucagaauagaaaagggaaagauagucaaaucagucgaaaugaaugccccuaauuaucacuaugaggaaugcuccuguuauccugauucuagugaaaucacaugugugugcagggauaacuggcauggcucgaaucgaccgugggugucuuucaaccagaaucuggaauaucagauaggauacauaugcagugggauuuucggagacaauccacgcccuaaugauaagacaggcaguugugguccaguaucgucuaauggagcaaauggaguaaaaggauuuucauucaaauacggcaaugguguuuggauagggagaacuaaaagcauuaguucaagaaacgguuuugagaugauuugggauccgaacggauggacugggacagacaaugacuucucaauaaagcaagauaucguaggaauaaaugaguggucaggauauagcgggaguuuuguucagcauccagaacuaacagggcuggauuguauaagaccuugcuucuggguugaauuaaucagagggcgacccaaagagaacacaaucuggacuagcgggagcagcauauccuuuugugguguaaacagugacacuguggguuggucuuggccagacggugcugaguugccauuuaccauugacaaguaa

SEQ ID NO: 53883 - RNA, 1410 nt, Artificial Sequence; identical to SEQ ID NO: 48750
  derived and/or modified CDS sequence (wt) from neuraminidase__InfluenzaA__AFG31263

SEQ ID NO: 53884 - RNA, 1410 nt, Artificial Sequence; identical to SEQ ID NO: 48750
  derived and/or modified CDS sequence (wt) from neuraminidase__InfluenzaA__AFG31273

SEQ ID NO: 53885 - RNA, 1410 nt, Artificial Sequence; identical to SEQ ID NO: 48750
  derived and/or modified CDS sequence (wt) from neuraminidase__InfluenzaA__AFG31283

SEQ ID NO: 53886 - RNA, 1410 nt, Artificial Sequence; identical to SEQ ID NO: 48750
  derived and/or modified CDS sequence (wt) from neuraminidase__InfluenzaA__AFG31293

SEQ ID NO: 53887 - RNA, 1410 nt, Artificial Sequence; identical to SEQ ID NO: 48750
  derived and/or modified CDS sequence (wt) from neuraminidase__InfluenzaA__AFG31303

SEQ ID NO: 53888 - RNA, 1410 nt, Artificial Sequence; identical to SEQ ID NO: 48750
  derived and/or modified CDS sequence (wt) from neuraminidase__InfluenzaA__AFG31313

SEQ ID NO: 53889 - RNA, 1410 nt, Artificial Sequence; identical to SEQ ID NO: 48750
  derived and/or modified CDS sequence (wt) from neuraminidase__InfluenzaA__AFG31326

SEQ ID NO: 53890 - RNA, 1410 nt, Artificial Sequence; identical to SEQ ID NO: 48750
  derived and/or modified CDS sequence (wt) from neuraminidase__InfluenzaA__AFG31336

SEQ ID NO: 53891 - RNA, 1410 nt, Artificial Sequence; identical to SEQ ID NO: 53882
  derived and/or modified CDS sequence (wt) from neuraminidase__InfluenzaA__AFG31346

SEQ ID NO: 53892 - RNA, 1410 nt, Artificial Sequence; identical to SEQ ID NO: 53882
  derived and/or modified CDS sequence (wt) from neuraminidase__InfluenzaA__AFG31356

SEQ ID NO: 53893 - RNA, 1410 nt, Artificial Sequence; identical to SEQ ID NO: 53882
  derived and/or modified CDS sequence (wt) from neuraminidase__InfluenzaA__AFG31366

SEQ ID NO: 53894 - RNA, 1410 nt, Artificial Sequence; identical to SEQ ID NO: 53882
  derived and/or modified CDS sequence (wt) from neuraminidase__InfluenzaA__AFG31379

SEQ ID NO: 53895 - RNA, 1410 nt, Artificial Sequence; identical to SEQ ID NO: 53882
  derived and/or modified CDS sequence (wt) from neuraminidase__InfluenzaA__AFG31389

SEQ ID NO: 53896 - RNA, 1410 nt, Artificial Sequence; identical to SEQ ID NO: 53882
  derived and/or modified CDS sequence (wt) from neuraminidase__InfluenzaA__AFG31399

SEQ ID NO: 53897 - RNA, 1410 nt, Artificial Sequence; identical to SEQ ID NO: 53882
  derived and/or modified CDS sequence (wt) from neuraminidase__InfluenzaA__AFG31409

SEQ ID NO: 53898 - RNA, 1410 nt, Artificial Sequence; identical to SEQ ID NO: 48750
  derived and/or modified CDS sequence (wt) from neuraminidase__InfluenzaA__AFG31419

SEQ ID NO: 53899 - RNA, 1410 nt, Artificial Sequence; identical to SEQ ID NO: 48750
  derived and/or modified CDS sequence (wt) from neuraminidase__InfluenzaA__AFG31429

SEQ ID NO: 53900 - RNA, 1410 nt, Artificial Sequence; identical to SEQ ID NO: 48750
  derived and/or modified CDS sequence (wt) from neuraminidase__InfluenzaA__AFG31439

SEQ ID NO: 53901 - RNA, 1410 nt, Artificial Sequence; identical to SEQ ID NO: 48750
  derived and/or modified CDS sequence (wt) from neuraminidase__InfluenzaA__AFG31449

SEQ ID NO: 53902 - RNA, 1410 nt, Artificial Sequence; identical to SEQ ID NO: 48750
  derived and/or modified CDS sequence (wt) from neuraminidase__InfluenzaA__AFG31459

SEQ ID NO: 53903 - RNA, 1410 nt, Artificial Sequence; identical to SEQ ID NO: 48750
  derived and/or modified CDS sequence (wt) from neuraminidase__InfluenzaA__AFG31469

SEQ ID NO: 53904 - RNA, 1410 nt, Artificial Sequence; identical to SEQ ID NO: 48750
  derived and/or modified CDS sequence (wt) from neuraminidase__InfluenzaA__AFG31479

SEQ ID NO: 53905 - RNA, 1410 nt, Artificial Sequence; identical to SEQ ID NO: 48750
  derived and/or modified CDS sequence (wt) from neuraminidase__InfluenzaA__AFG31499

SEQ ID NO: 53906 - RNA, 1410 nt, Artificial Sequence; identical to SEQ ID NO: 50706
  derived and/or modified CDS sequence (wt) from neuraminidase__InfluenzaA__AFG31509

SEQ ID NO: 53907 - RNA, 1410 nt, Artificial Sequence; identical to SEQ ID NO: 53882
  derived and/or modified CDS sequence (wt) from neuraminidase__InfluenzaA__AFG31519

SEQ ID NO: 53908 - RNA, 1410 nt, Artificial Sequence
  derived and/or modified CDS sequence (wt) from neuraminidase__InfluenzaA__AFG31529
augaauccaaaccaaaagauaauaaccauugguucggucuguaugacaauuggaauggcuaacuuaauauuacaaauuggaaacauaaucucaauauggauuagccacucaauucaacuugggaaucaaaaucagauugaaacaugcaaccaaagcgucauuacuuaugaaaacaacacuuggguaaaucagacauauguuaacaucagcaacaccaacuuugcugcuggacagucagugguuuccgugaaauuagcgggcaauuccucucucugcccuguuaguggaugggcuauauacaguaaagacaacaguauaagaaucgguuccaaaggggauguguuugucauaagggaaccauucauaucaugcucccccuuggaaugcagaaccuucuucuugacucaaggggccuugcuaaaugacaaacauuccaauggaaccauuaaagacaggagcccauaucgaacccuaaugagcuguccuauuggugaaguucccucuccauacaacucaagauuugagucagucgcuuggucagcaagugcuugucaugauggcaucaauuggcuaacaauuggaauuucuggcccagacaauggggcaguggcuguguuaaaguacaacggcauaauaacagacacuaucaagaguuggagaaacaauauauugagaacacaagagucugaaugugcauguguaaaugguucuugcuuuacuguaaugaccgauggaccaagugauggacaggccucauacaagaucuucagaauagaaaagggaaagauagucaaaucagucgaaaugaaugccccuaauuaucacuaugaggaaugcuccuguuauccugauucuagugaaaucacaugugugugcagggauaacuggcauggcucgaaucgaccgugggugucuuucaaccagaaucuggaauaucagauaggauacauaugcagugggauuuucggagacaauccacgcccuaaugauaagacaggcaguugugguccaguaucgucuaauggagcaaauggaguaaaaggauuuucauucaaauacggcaaugguguuuggauagggagaacuaaaagcauuaguucaagaaacgguuuugagaugauuugggauccgaacggauggacugggacagacaauaacuucucaauaaagcaagauaucguaggaauaaaugaguggucaggauauagcgggaguuuuguucagcauccagaacuaacagggcuggauuguauaagaccuugcuucuggguugaacuaaucagagggcgacccaaagagaacacaaucuggacuagcgggagcagcauauccuuuugugguguaaacagugacacuguggguuggucuuggccagacggugcugaguugccauuuaccauugacaaguaa

SEQ ID NO: 53909 - RNA, 1410 nt, Artificial Sequence
  derived and/or modified CDS sequence (wt) from neuraminidase__InfluenzaA__AFG31539
augaauccaaaccaaaagauaauaaccauugguucggucuguaugacaauuggaauggcuaacuuaauauuacaaauuggaaacauaaucucaauauggauuagccacucaauucaacuugggaaucaaaaucagauugaaacaugcaaucaaagcgucauuacuuaugaaaacaacacuuggguaaaucagacauauguuaacaucagcaacaccaacuuugcugcugaacagucagugguuuccgugaaauuagcgggcaauuccucucucugcccuguuaguggaugggcuauauacaguaaagacaacaguauaagaaucgguuccaagggggauguguuugucauaagggaaccauucauaucaugcucccccuuggaaugcagaaccuucuucuugacucaaggggccuugcuaaaugacaaacauuccaauggaaccauuaaagacaggagcccauaucgaacccuaaugagcuguccuauuggugaaguucccucuccauacaacucaagauuugagucagucgcuuggucagcaagugcuugucaugauggcaucaauuggcuaacaauuggaauuucuggcccagacaauggggcaguggcuguguuaaaguacaacggcauaauaacagacacuaucaagaguuggagaaacaauauauugagaacacaagagucugaaugugcauguguaaaugguucuugcuuuacuguaaugaccgauggaccaagugauggacaggccucauacaagaucuucagaauagaaaagggaaaaauagucaaaucagucgaaaugaaugccccuaauuaucacuaugaggaaugcuccuguuauccugauucuagugaaaucacaugugugugcagggauaacuggcauggcucgaaucgaccgugggugucuuucaaccagaaucuggaauaucagauaggauacauaugcagugggauuuucggagacaauccacgcccuaaugauaagacaggcaguugugguccaguaucgucuaauggagcaaauggaguaaaaggauuuucauucaaauacggcaaugguguuuggauagggagaacuaaaagcauuaguucaagaaacgguuuugagaugauuugggauccgaacggauggacugggacagacaauaacuucucaauaaagcaagauaucguaggaauaaaugaguggucaggauauagcgggaguuuuguucagcauccagaacuaacagggcuggauuguauaagaccuugcuucuggguugaacuaaucagagggcgacccaaagagaacacaaucuggacuagcgggagcagcauauccuuuugugguguaaacagugacacuguggguuggucuuggccagacggugcugaguugccauuuaccauugacaaguaa

SEQ ID NO: 53910 - RNA, 1410 nt, Artificial Sequence; identical to SEQ ID NO: 48750
  derived and/or modified CDS sequence (wt) from neuraminidase__InfluenzaA__AFG31549

SEQ ID NO: 53911 - RNA, 1410 nt, Artificial Sequence; identical to SEQ ID NO: 48750
  derived and/or modified CDS sequence (wt) from neuraminidase__InfluenzaA__AFG31559

SEQ ID NO: 53912 - RNA, 1410 nt, Artificial Sequence
  derived and/or modified CDS sequence (wt) from neuraminidase__InfluenzaA__AFG31569
augaauccaaaccaaaagauaauaaccauugguucggucuguaugacaauuggaauggcuaacuuaauauuacaaauuggaaacauaaucucaauauggauuagccacucaauucaacuugggaaucaaaaucagauugaaacaugcaaucaaagcgucauuacuuaugaaaacaacacuuggguaaaucagacauauguuaacaucagcaacaccaacuuugcugcuggacagucagugguuuccgugaaauuagcgggcaauuccucucucugcccuguuaguggaugggcuauauacaguaaagacaacaguauaagaaucgguuccaagggggauguguuugucauaagggaaccauucauaucaugcucccccuuggaaugcagaaccuucuucuugacucaaggggccuugcuaaaugacaaacauuccaauggaaccauuaaagacaggagcccauaucgaacccuaaugagcuguccuauuggugaaguucccucuccauacaacucaagauuugagucagucgcuuggucagcaagugcuugucaugauggcaucaauuggcuaacaauuggaauuucuggcccagacaauggggcaguggcuguguuaaaguacaacggcauaauaacagacacuaucaagaguuggagaaacaauauauugagaacacaagagucugaaugugcauguguaaaugguucuugcuuuacuguaaugaccgauggaccaagugauggacaagccucauacaagaucuucagaauagaaaagggaaagauagucaaaucagucgaaaugaaugccccuaauuaucacuaugaggaaugcuccuguuauccugauucuagugaaaucacaugugugugcagggauaacuggcauggcucgaaucgaccgugggugucuuucaaccagaaucuggaauaucagauaggauacauaugcagugggauuuucggagacaauccacgcccuaaugauaagacaggcaguugugguccaguaucgucuaauggagcaaauggaguaaaaggauuuucauucaaauacggcaaugguguuuggauagggagaacuaaaagcauuaguucaagaaacgguuuugagaugauuugggauccgaacggauggacugggacagacaaugacuucucaauaaagcaagauaucguaggaauaaaugaguggucaggauauagcgggaguuuuguucagcauccagaacuaacagggcuggauuguauaagaccuugcuucuggguugaauuaaucagagggcgacccaaagagaacacaaucuggacuagcgggagcagcauauccuuuugugguguaaacagugacacuguggguuggucuuggccagacggugcugaguugccauuuaccauugacaaguaa

SEQ ID NO: 53913 - RNA, 1410 nt, Artificial Sequence; identical to SEQ ID NO: 48750
  derived and/or modified CDS sequence (wt) from neuraminidase__InfluenzaA__AFG31579

SEQ ID NO: 53914 - RNA, 1410 nt, Artificial Sequence; identical to SEQ ID NO: 48750
  derived and/or modified CDS sequence (wt) from neuraminidase__InfluenzaA__AFG31589

SEQ ID NO: 53915 - RNA, 1410 nt, Artificial Sequence; identical to SEQ ID NO: 48750
  derived and/or modified CDS sequence (wt) from neuraminidase__InfluenzaA__AFG31599

SEQ ID NO: 53916 - RNA, 1410 nt, Artificial Sequence; identical to SEQ ID NO: 48750
  derived and/or modified CDS sequence (wt) from neuraminidase__InfluenzaA__AFG31609

SEQ ID NO: 53917 - RNA, 1410 nt, Artificial Sequence; identical to SEQ ID NO: 48750
  derived and/or modified CDS sequence (wt) from neuraminidase__InfluenzaA__AFG31619

SEQ ID NO: 53918 - RNA, 1410 nt, Artificial Sequence; identical to SEQ ID NO: 48750
  derived and/or modified CDS sequence (wt) from neuraminidase__InfluenzaA__AFG31629

SEQ ID NO: 53919 - RNA, 1410 nt, Artificial Sequence; identical to SEQ ID NO: 53882
  derived and/or modified CDS sequence (wt) from neuraminidase__InfluenzaA__AFG31639

SEQ ID NO: 53920 - RNA, 1410 nt, Artificial Sequence
  derived and/or modified CDS sequence (wt) from neuraminidase__InfluenzaA__AFG31649
augaauccaaaccaaaagauaauaaccauugguucggucuguaugacaauuggaauggcuaacuuaauauuacaaauuggaaacauaaucucaauauggauuagccacucaauucaacuugggaaucaaaaucagauugaaacaugcaaucaaagcgucauuacuuaugaaaacaacacuuggguaaaucagacauauguuaacaucagcaacaccaacuuugcugcuggacagucagugguuuccgugaaauuagcgggaaauuccucucucugcccuguuaguggaugggcuauauacaguaaagacaacaguauaagaaucgguuccaagggggauguguuugucauaagggaaccauucauaucaugcucccccuuggaaugcagaaccuucuucuugacucaaggggccuugcuaaaugacaaacauuccaauggaaccauuaaagacaggagcccauaucgaacccuaaugagcuguccuauuggugaaguucccucuccauacaacucaagauuugagucagucgcuuggucagcaagugcuugucaugauggcaucaauuggcuaacaauuggaauuucuggcccagacaauggggcaguggcuguguuaaaguacaacggcauaauaacagacacuaucaagaguuggagaaacaauauauugagaacacaagagucugaaugugcauguguaaaugguucuugcuuuacuguaaugaccgauggaccaagugauggacaggccucauacaagaucuucagaauagaaaagggaaagauagucaaaucagucgaaaugaaugccccuaauuaucacuaugaggaaugcuccuguuauccugauucuagugaaaucacaugugugugcagggauaacuggcauggcucgaaucgaccgugggugucuuucaaccagaaucuggaauaucagauaggauacauaugcagugggauuuucggagacaauccacgcccuaaugauaagacaggcaguugugguccaguaucgucuaauggagcaaauggaguaaaaggauuuucauucaaauacggcaaugguguuuggauagggagaacuaaaagcauuaguucaagaaacgguuuugagaugauuugggauccgaacggauggacugggacagacaauaacuucucaauaaagcaagauaucguaggaauaaaugaguggucaggauauagcgggaguuuuguucagcauccagaacuaacagggcuggauuguauaagaccuugcuucuggguugaacuaaucagagggcgacccaaagagaacacaaucuggacuagcgggagcagcauauccuuuugugguguaaacagugacacuguggguuggucuuggccagacggugcugaguugccauuuaccauugacaaguaa

SEQ ID NO: 53921 - RNA, 1410 nt, Artificial Sequence; identical to SEQ ID NO: 48750
  derived and/or modified CDS sequence (wt) from neuraminidase__InfluenzaA__AFG31659

SEQ ID NO: 53922 - RNA, 1410 nt, Artificial Sequence; identical to SEQ ID NO: 48750
  derived and/or modified CDS sequence (wt) from neuraminidase__InfluenzaA__AFG31669

SEQ ID NO: 53923 - RNA, 1410 nt, Artificial Sequence; identical to SEQ ID NO: 46107
  derived and/or modified CDS sequence (wt) from neuraminidase__InfluenzaA__AFG71868

SEQ ID NO: 53924 - RNA, 1410 nt, Artificial Sequence; identical to SEQ ID NO: 46107
  derived and/or modified CDS sequence (wt) from neuraminidase__InfluenzaA__AFG71890

SEQ ID NO: 53925 - RNA, 1410 nt, Artificial Sequence
  derived and/or modified CDS sequence (wt) from neuraminidase__InfluenzaA__AFG71901
augaauccaaaucaaaagauaauaacaauuggcucugucucucucaccauugcaacaguaugcuuccucaugcagauugccauccugguaacuacuguaacauugcauuuuaagcaauaugagugcgacucccccgcgagcaaccaaguaaugccgugugaaccaauaauaauagaaaggaacauaacagagauaguguauuugaauaacaccaccauagagaaagagauaugccccaaaguaguggaauacagaaauuggucaaagccgcaaugucaaauuacaggauuugcaccuuuuucuaaggacaauucaauccggcuuucugcugguggggacauuugggugacgagagaaccuuaugugucaugcgaucauggcaaguguuaucaauuugcacucgggcaggggaccacacuagacaacaaacauucaaaugacacaauacaugauagaaucccucaucgaacccuauuaaugaaugaguuggguguuccauuucauuuaggaaccaggcaaguguguauagcaugguccagcucaaguugucacgauggaaaagcauggcugcauguuuguaucacuggggaugacaaaaaugcaacugcuagcuucauuuaugacgggaggcuuguggacaguauugguucauggucucaaaauauccucagaacccaggagucggaaugcguuuguaucaaugggacuugcacaguaguaaugacugauggaagugcuucaggaagagccgauacuagaauacuauucauugaagaggggaaaauuguccauauuagcccauugucaggaagugcucagcauguagaagaguguuccuguuauccuagauauccuggcgucagauguaucugcagagacaacuggaaaggcucuaauaggcccgucguagacauaaauauggaagauuauagcauugauuccaguuaugugugcucagggcuuguuggcgacacaccuagaaacgacgacagaucuagcaauagcaauugcaggaauccuaacaaugagagagggaaucaaggagugaaaggcugggccuuugacaauggagaugacguguggaugggaagaacgaucagcaaggauuuacgcucagguuaugaaacuuucaaagucauuggugguugguccacaccuaauuccaaaucgcagaucaauagacaagucauaguugacagcgauaaucggucagguuacucugguauuuucucuguugagggcaaaagcugcaucaauaggugcuuuuauguggaguugauaaggggaaggaaacaggagacuagagugugguggacuucaaacaguauuguuguguuuuguggcacuucagguaccuauggaacaggcucauggccugauggggcgaacaucaauuucaugccuauauaa

SEQ ID NO: 53926 - RNA, 1410 nt, Artificial Sequence; identical to SEQ ID NO: 46126
  derived and/or modified CDS sequence (wt) from neuraminidase__InfluenzaA__AFG71912

SEQ ID NO: 53927 - RNA, 1410 nt, Artificial Sequence
  derived and/or modified CDS sequence (wt) from neuraminidase__InfluenzaA__AFG71934
augaauccaaaucaaaagauaauaacaauuggcucugucucucucaccauugcaacaguaugcuuccucaugcagauugccauccugauaacuacuguaacauugcauuucaagcaauaugagugcgacucccccgcgaacaaccaaguaaugccgugugaaccaauaauaauagaaaggaacauaacagagauaguguauuugacuaacaccaccauagagaaagagauaugccccaaauuaguggaauacagaaauuggucaaagccgcaauguaaaauuacaggauuugcaccuuuuucuaaggacaauucaauucggcuuucugcugguggggacauuugggugacgagagaaccuuaugugucaugcgauccuggcaaguguuaucaauuugcacucgggcaggggaccacccuagacaacaaacauucaaaugacacaauacaugauagaaucccucaucgaacccuauugaugaaugaguuggguguuccauuucauuuaggaaccaggcaaguguguauagcaugguccagcucaaguugucacgauggaaaagcauggcugcauguuugugucacuggggaugauaaaaaugcaacugcuagcuucauuuacgaugggaggcuuguggacaguauugguucauggucucaaaauauccucaggacccaggagucggaaugcguuuguaucaaugggacuuguacuguaguaaugacugauggaagugcuucaggaagagcugauacuagaauacuauucauugaagaggggaaaauuguccauauuagcccauugucaggaagugcucagcauguagaggaguguuccuguuauccucgauauccuggcgucagauguaucugcagagacaacuggaaaggcucuaauaggcccgucguagauauaaaugugaaagauuauagcauugauucccguuaugugugcucagggcuuguuggcgacacacccagaaacaacgacagauuuagcaauagcaauugcaggaauccuaacaaugagagagggaaucacggagugaaaggcugggccuuugacgauggaaaugacguguggaugggaagaacgaucagcaaggauucacgcucagguuaugaaaccuucaaagucauuggugguugguccacaccuaauuccaaaucgcagauaaauaggcaagucauaguugacagcgauaauaggucagguuauucugguauuuucucaguugagggcaaaagcugcaucaauaggugcuuuuauguggaguugauaaggggaagggaacaggagacuagaguaugguggaccucaaacaguauuguuguguuuuguggcacuucagguaccuaugggacaggcucauggccugauggggcggacaucaaucucaugccuauauaa

SEQ ID NO: 53928 - RNA, 1410 nt, Artificial Sequence
  derived and/or modified CDS sequence (wt) from neuraminidase__InfluenzaA__AFG71945
augaauccaaaucaaaagauaauaacaauuggcucugucucucucaccauugcaacaguaugcuuccucaugcagauugccauccugguaacuacuguaacauugcauuucaagcaauaugagugcgacucccccgcgaacaaccaaguaaugccgugugaaccaauaauaauagaaaggaacauaacagagauaguguauuugacuaacaccaccauagagaaagagauaugccccaaauuaguggaauacagaaauuggucaaagccgcaauguaaaauuacaggauuugcaccuuuuucuaaggacaauucaauucggcuuucugcugguggggacauuugggugacgagagaaccuuaugugucaugcgauccuggcaaguguuaucaauuugcacucgggcaggggaccacacuagacaacaaacauucaaaugacacaauacaugauagaaucccucaucgaacccuauugaugaaugaguuggguguuccauuucauuuaggaaccaggcaaguguguauagcaugguccagcucaaguugucacgauggaaaagcauggcugcauguuugugucacuggggaugaugaaaaugcaacugcuagcuucauuuacgaugggaggcuuguggacaguauugguucauggucucaaaauauccucaggacccaggagucggaaugcguuuguaucaaugggacuuguacaguaguaaugacugauggaagugcuucaggaagagcugauacuagaauacuauucauugaagaggggaaaauuguccauauuagcccauugucaggaagugcucagcauguagaggaguguuccuguuauccucgauauccuggcgucagauguaucugcagagacaacuggaaaggcucuaauaggcccgucguagauauaaaugugaaagauuauagcauugauucccguuaugugugcucagggcuuguuggcgacacacccagaaacaaugacaaaucuagcaauagcaauugcaggaauccuaacaaugauaaagggaaucauggagugaaaggcugggccuuugacgauggaaaugacguguggaugggaagaacgaucagcaaggauucacgcucagguuaugaaaccuucaaagucauuggugguugguccacaccuaauuccaaaucgcagauaaauaggcaagucauaguugacagcgauaauaggucagguuacucugguauuuucucuguugagggcaaaagcugcaucaauagaugcuuuuacguggaguugauaaggggaagggaacaggagacuaaaguaugguggaccucaaacaguauuguuguguuuuguggcacuucagguaccuaugggacaggcucauggccugauggggcggacaucaaucucaugucuauauaa

SEQ ID NO: 53929 - RNA, 1410 nt, Artificial Sequence; identical to SEQ ID NO: 46345
  derived and/or modified CDS sequence (wt) from neuraminidase__InfluenzaA__AFG71967

SEQ ID NO: 53930 - RNA, 1410 nt, Artificial Sequence; identical to SEQ ID NO: 52140
  derived and/or modified CDS sequence (wt) from neuraminidase__InfluenzaA__AFG71978

SEQ ID NO: 53931 - RNA, 1410 nt, Artificial Sequence
  derived and/or modified CDS sequence (wt) from neuraminidase__InfluenzaA__AFG71988
augaauccaaaucaaaagauaauaacaauuggcucugucucucucaccauugcaacaauaugcuuccucaugcagauugccauccugguaacuacuguaacauugcauuucaagcaauaugagugcgacucccccgcgaacaaccaaguaaugccgugugaaccaauaauaauagaaaggaacauaacagagauaguguauuugacuaacaccaccauagagaaagagauaugccccaaauuaguggaauacaggaauuggucaaagccgcaauguaaaauuacaggauuugcaccuuuuucuaaggacaauucaauucggcuuucugcugguggggacauuugggugacgagagaaccuuaugugucaugcgauccuggcaaguguuaucaauuugcacucgggcaggggaccacacuagacaacaaacauucaaaugacacaauacaugauagaaccccucaucgaacccuauugaugaaugaguuggguguuccauuucauuugggaaccaggcaaguguguauagcaugguccagcucaaguugucacgauggaaaagcauggcugcauguuugugucacuggguaugauaaaaaugcaacugcuagcuucauuuacgaugggaggcuuguagacaguauugguucauggucucaaaauauccucaggacccaggagucggaaugcauuuguaucaaugggacuuguacaguaguaaugacugauggaagugcuucaggaagagcugauacuaaaauacuauucauugaagaggggaaaauuguucauauuagcccauugucaggaagugcucagcauguagaggaguguuccuguuauccucgauauccuggugucagauguaucugcagagacaacuggaaaggcucuaauaggcccgucguagauauaaaugugaaagauuauagcauugauuccaguuaugugugcucagggcuuguuggcgacacacccagaaacaacgacagaucuagcaauagcuauugcaggaauccuaacaaugagaaagggaaucacggagugaaaggcugggccuuugacgauggaaaugacguguggaugggaagaacgaucagcgaggauucacgcucagguuaugaaaccuucaaagucauuggugguugguccacaccuaauuccaaauugcagauaaauaggcaagucauaguugacagcgauaauaggucagguuauucugguauuuucucuguugagggcaaaagcugcaucaauaggugcuuuuauguggaguugauaaggggaagggaacaggaaacuagaguaugguggaccucaaacaguauuguuguguuuuguggcacuucagguaccuaugggacaggcucauggccugauggggcggacaucaaucucaugccuauauaa

SEQ ID NO: 53932 - RNA, 1410 nt, Artificial Sequence
  derived and/or modified CDS sequence (wt) from neuraminidase__InfluenzaA__AFG71999
augaauccaaaucaaaagauaauaacaauuggcucugucucucucaccauugcaacaauaugcuuccucaugcagauugccauccugguaacuacuguaacauugcauuucaagcaauaugagugcgacucccccgcgaacaaccaaguaaugccgugugaaccaauaauaauagaaaggaacauaacagaaauaguguauuugacuaacaccaccauagaaaaagagauaugucccaaauuaguggaauacaggaauuggucaaagccgcaauguaaaauuacaggauuugcaccuuuuucuaaggacaauucaauucggcuuucugcugguggggacauuugggugacgagagaaccuuaugugucaugcgauccuggcaaguguuaucaauuugcacucgggcaggggaccacacuagacaacaaacauucaaaugacacaauacaugauagaaccccucaucgaacccuauugaugaaugaguuggguguuccauuucauuugggaaccaggcaaguguguauagcaugguccagcucaaguugucacgauggaaaagcauggcugcauguuugugucacuggguaugauaaaaaugcaacugcuagcuucauuuacgaugggaggcuuguagacaguauugguucauggucucaaaauauccucaggacccaggaaucggaaugcguuuguaucaaugggacuuguacaguaguaaugacugauggaagugcuucaggaagagcugauacuaaaauacuauucauugaagaggggaaaauuguucauauuagcccauugucaggaagugcucagcauguagaggaguguuccuguuauccucgauauccuggugucagauguaucugcagagacaacuggaaaggcucuaauaggcccgucguagauauaaaugugaaagauuauagcauugauuccaguuaugugugcucagggcuuguuggcgacacacccagaaacaacgacagaucuagcaauagcuauugccggaauccuaacaaugagaaagggaaucacggagugaaaggcugggccuuugacgauggaaaugacguguggaugggaagaacgaucagcgaggauucacgcucagguuaugaaaccuucaaagucauuggugguugguccacaccuaauuccaaauugcagauaaauaggcaagucauaguugacagcgauaauaggucagguuauucugguauuuucucuguugagggcaaaagcugcaucaauaggugcuuuuauguggaguugauaaggggaagggaacaggaaacuagaguaugguggacuucaaacaguauuguuguguuuuguggcacuucagguaccuaugggacaggcucauggccugauggggcggacaucaaucucaugccuauauaa

SEQ ID NO: 53933 - RNA, 1410 nt, Artificial Sequence; identical to SEQ ID NO: 46588
  derived and/or modified CDS sequence (wt) from neuraminidase__InfluenzaA__AFG72021

SEQ ID NO: 53934 - RNA, 1410 nt, Artificial Sequence
  derived and/or modified CDS sequence (wt) from neuraminidase__InfluenzaA__AFG72032
augaauccaaaucaaaagauaauaacaauuggcucugucucucucaccauugcaacaauaugcuuccuuaugcaaauugccauccugguaacuacuguaacauugcauuucaagcaauaugagugcagcucccccccaaacaaccaaguaaugccgugugaaccaauaauaauagaaagaaacauaacagagauaguguauuugacuaacaccaccauagagaaagagauaugccccaaauuaguggaauacagaaauuggucaaaaccgcaauguaaaauuacaggauuugcaccuuuuucuaaggacaauucaauucggcuuucugcugguggggacauuugggugacgagagaaccuuaugugucaugcgauccuggcaaguguuaucaauuugcacucgggcaggggaccacacuagacaacaagcauucaaaugacacaauacaugauaggaccccuuaucgaacccuauugaugaaugaguuggguguuccauuucauuugggaaccaggcaaguguguauagcaugguccagcucaaguugucacgauggaaaagcauggcugcauguuugugucacuggguaugauaaaaaugcaacugcuagcuucauuuacgaugggaggcuuguagacaguauugguucaugguccaaaaauauccucaggacccaggagucggaaugcguuuguaucaaugggacuuguacaguaguaaugacugauggaagugcuucagaaagagcugauacuaaaauacuauucauugaagaggggaaaauuguucauauuagcccauugucaggaagugcucagcauguagaggaguguuccuguuauccucgauauccuggugucagaugugucugcagagacaacuggaaaggcuccaauaggcccgucguagauauaaaugugaaagauuauagcauuguuuccaguuaugugugcucagggcuuguuggcgacacacccagaaaaaacgacagaucuagcaguagcuauugccggaauccuaacaaugagaaagggaaucauggagugaaaggcugggccuuugacgauggaaaugacguguggaugggaagaacgaucagcgaggagucacgcucagguuaugaaaccuucaaagucauuggugguugguccacaccuaauuccaaauugcagauaaauaggcaagucauaguugacagcgauaauagguccgguuauucugguauuuucucuguugagggcaaaagcugcaucaauaggugcuuuuauguggaguugauaaggggaagggaacaggaaacuagagucugguggaccucaaacaguauuguuguguuuuguggcacuucagguaccuauggaacaggcucauggccugauggagcggacaucaaucucaugccuauauaa

SEQ ID NO: 53935 - RNA, 1410 nt, Artificial Sequence
  derived and/or modified CDS sequence (wt) from neuraminidase__InfluenzaA__AFG72088
augaauccaaaucaaaagauaauaacaauuggcucuguuucucucaccauugccacaauaugcuuucuuaugcaaauugccauccugguaacuacuguaacauugcauuucaagcaauaugagugcagcucccccccaaacaaccaaguaaugccgugugaaccaacaauaauagaaagaaauauaacagagauaguguauuugacuaacaccaccauagagaaagagauaugccccaaacuaguagaauacagaaauuggucaaagccgcaauguaaaauuacaggauuugcaccuuuuucuaaggacaauucaauucggcuuuccgcugguggagacauuugggugacaagagaaccuuaugugucaugcgauccuggcaaguguuaucaauuugcacuugggcagggaaccacacuaaacaacaggcauucaaaugacacaguacaugauaggaccccuuaucgaacccucuugaugaaugaguuggguguuccauuucauuugggaaccaagcaagugugcauagcaugguccagcucaaguugucacgauggaaaagcauggcugcauguuugugucacugggcaugauaaaaaugcaacugcuagcuucauuuacgaugggaggcuuguagacaguauugguucaugguccaaaaauauccucaggacccaggagucggaaugcguuuguaucaaugggacuuguacaguaguaaugacugauggaagugcuucagaaagagcugauacuaaaauacuauucauugaagaggggaaaaucguucauauuagcccauugucaggaagugcucagcauguagaggagugcuccuguuauccucgauauccuggugucagaugugucugcagagacaacuggaaaggcuccaauaggcccaucguagauauaaaugugaaagauuauagcauuguuuccaguuaugugugcucagggcuuguuggagacacacccagaaaaaacgacagauccagcaguagcuauugccggaauccuaacaaugagaaagggagucauggagugaaaggcugggccuuugacgauggaaaugacguguggaugggaagaacgaucggcgaggaguuacguucagguuaugaaaccuucaaagucauuggagguugguccacaccuaacuccaaauugcagauaaauaggcaagucauaguugacagcgguaauagguccgguuauucugguauuuucucuguugagggcaaaagcugcaucaaucggugcuuuuauguggaguugauaaggggaagggaacaggaaacuagagucugguggaccucaaacaguauuguuguguuuuguggcaccucagguacauauggaacaggcucauggccugauggggcggacaucaaucucaugccuauauaa

SEQ ID NO: 53936 - RNA, 1410 nt, Artificial Sequence
  derived and/or modified CDS sequence (wt) from neuraminidase__InfluenzaA__AFG72121
augaauccaaaucaaaagauaauaacaauuggcucuguuucucucaccauugccacaauaugcuuccuuaugcaaauugccauccugguaacuacuguaacauugcauuucaagcaauaugagugcagcucccccccaaacaaccgaguaaugccgugcgaaccaacaauaauagaaagaaacauaacagagauaguguauuugacuaacaccaccauagagaaagagauaugccccaaacuaguagaauacagaaauuggucaaagccgcaauguaaaauuacaggauuugcaccuuuuucuaaggacaauucaauucggcuuuccgcugguggagacauuugggugacaagagaaccuuaugugucaugcgauccuggcaaguguuaucaauuugcacuugggcagggaaccacacuaaacaacaggcauucaaaugacacaguacaugauaggaccccuuaucgaacccucuugaugaaugaguuggguguuccauuucauuugggaaccaagcaagugugcauggcaugguccagcucaagcugucacgauggaaaagcauggcugcauguuugugucacugggcaugaugaaaaugcaacugcuagcuucauuuacgaugggaggcuuguagacaguauugguucaugguccaaaaauauccucaggacccaggagucggaaugcguuuguaucaaugggacuuguacaguaguaaugacugauggaagugcuucagaaagagcugauacuaaaauacuauucauugaagaggggaaaaucguucauauuagcccauugucaggaagugcucagcauguagaggagugcuccuguuauccucgauauccuggugucagaugugucugcagagacaacuggaaaggcuccaauaggcccaucguagauauaaaugugaaagauuauagcauuguuuccaguuaugugugcucagggcuuguuggagacacacccagaaaaaacgacagauccagcaguagcuauugccggaauccuaacaaugagaaagggagucauggagugaaaggcugggccuuugacgauggaaaugacguguggaugggaagaacgaucggcgaggaguuacgcucagguuaugaaaccuucaaagucauuggagguugguccacaccuaacuccaaauugcagauaaauaggcaagucauaguugacagcgguaauagguccgguuauucugguauuuucucuguugagggcaaaagcugcaucaaucggugcuuuuauguggaguugauaaggggaaggaaacaggaaacuagagucugguggaccucaaacaguauuguuguguuuuguggcaccucagguacauauggaacaggcucauggccugauggggcggacaucaaucucaugccuauauaa

SEQ ID NO: 53937 - RNA, 1410 nt, Artificial Sequence
  derived and/or modified CDS sequence (wt) from neuraminidase__InfluenzaA__AFG72143
augaauccaaaucaaaagauaauaacaauuggcucuguuucucucaccauugccacaauaugccuccuuaugcaaauugccauccugguaacuacuguaacauugcauuucaagcaauacgagugcagcucccccccaaacaaccaaguaaugccgugugaaccaacaauaauagaaagaaacauaacagagauaguguauuugacuaacaccaccauagagaaagagauaugccccaaacuaguagaauacagaaauuggucaaagccgcaauguaaaauuacaggauuugcaccuuuuucuaaggacaauucaauucggcuuuccgcugguggagacauuugggugacaagagaaccuuaugugucaugcgauccuggcaaguguuaucaauuugcacuuggacagggaaccacacuaaacaacaggcauucaaaugacacaguacaugauaggaccccuuaucgaacccucuugaugaaugaguuggguguuccauuucauuugggaaccaagcaagugugcauagcaugguccagcucaaguugucacgauggaaaagcauggcugcauguuugugucacugggcaugaugaaaaugcaacugcuagcuucauuuacgaugggaggcuuguagauaguauugguucaugguccaaaaauauccucaggacccaggagucggaaugcguuuguaucaaugggacuuguacaguaguaaugacugauggaagugcuucagaaagagcugauacuaaaauacuauucauugaagaggggaaaaucguucauauuagcccauugucaggaagugcucagcauguagaggagugcuccuguuauccucgauauccuggugucagaugugucugcagagacaacuggaaaggcuccaauaggcccaucguagauauaaaugugaaagauuauagcauuguuuccaguuaugugugcucagggcuuguuggagacacacccagaaaaaacgacagcuccagcaguaguuauugccggaauccuaacaaugagaaagggagucauggagugaaaggcugggccuuugacgauggaaaugacguguggaugggaagaacgaucggcgaggaguuacgcucagguuaugaaaccuucaaagucauuggagguugguccacaccuaacuccaaauugcagauaaauaggcaagucauaguugacagcgguaauagguccgguuauucugguauuuucucuguugagggcaaaagcugcaucaaucggugcuuuuauguggaguugauaaggggaaggaaacaggaaacuaaagucugguggaccucaaacaguauuguuguguuuuguggcaccucagguacauauggaacaggcucauggccugauggggcggacaucaaucucaugccuauauaa

SEQ ID NO: 53938 - RNA, 1410 nt, Artificial Sequence
  derived and/or modified CDS sequence (wt) from neuraminidase__InfluenzaA__AFG72165
augaauccaaaucaaaagauaauaacaauuggcucuguuucucucaccauugccacaauaugcuuccuuaugcaaauugccauccugguaacuacuguaacauugcauuucaagcaauaugagugcaacucccccccaaacaaccaaguaaugccgugugaaccaacaauaauagaaagaaacauaacagagauaguguauuugacuaacaccaccauagagaaagagauaugccccaaacuaguagaauacagaaauuggucaaagccgcaauguaaaauuacaggauuugcaccuuuuucuaaggacaauucaauucggcuuuccgcugguggagacauuugggugacaagagaaccuuaugugucaugcgauccuggcaaguguuaucaauuugcacuaggacagggaaccacacuaaacaacaggcauucaaaugacacaguacaugauaggaccccuuaucgaacccucuugaugaaugaguuggguguuccauuucauuugggaaccaagcaagugugcauagcaugguccagcucaaguugucacgauggaaaagcauggcugcauguuugugucacugggcaugaugaaaaugcaacugcuagcuucauuuacgaugggaggcuuguagauaguauuguuucaugguccaaaaauauccucaggacccaggagucggaaugcguuuguaucaauggaacuuguacaguaguaaugacugauggaagugcuucagaaagagcugauacuaaaauacuauucauugaagaggggaaaaucguucauauuagcccauugucaggaagugcucagcauguagaggagugcuccuguuauccucgauauccuggugucagaugugucugcagagacaacuggaaaggcuccaauaggcccaucguagauauaaaugugaaagauuauagcauuguuuccaguuaugugugcucagggcuuguuggagacacacccagaaaaaacgacagcuccagcaguagcuauugccggaauccuaacaaugagaaagggagucauggaguaaaaggcugggccuuugacgauggaaaugacguguggaugggaagaacgaucggcgaggaguuacgcucagguuaugaaaccuucaaagucauuggaggcugguccacaccuaacuccaaauugcagacaaauaggcaagucauaguugacagagguaauagguccgguuauucugguauuuucucuguugaaggcaaaagcugcaucaaucggugcuuuuauguagaauugauaaggggaaggaaacaggaaacuaaagucugguggaccucaaacaguauuguuguguuuuguggcaccucagguacauauggaacaggcucauggccugauggggcggacaucaaucucaugccuauauaa

SEQ ID NO: 53939 - RNA, 1410 nt, Artificial Sequence
  derived and/or modified CDS sequence (wt) from neuraminidase__InfluenzaA__AFG72176
augaauccaaaucaaaagauaauaacaauuggcucuguuucucucacuauugccacaauaugcuuccuuaugcaaauuaccauccugguaacuacuguaacauugcauuucaagcaauaugagugcaacucccccccaaacaaccaaguaaugcugugugaaccaacaauaauagaaagaaacauaacagagauaguguauuugacuaacaccaccauagagaaagagaaaugccccaaacuaguagaauacagaaauuggucaaagccgcaauguaaaaucacaggauuugcaccuuuuucuaaggacaauucaauucggcuuuccgcugguggagacauuugggugacaagagaaccuuaugugucaugcgauccuggcaaguguuaucaauuugcacuuggacagggaaccacacuaaacaacaggcauucaaaugacacaguacaugauaggaccccuuaucgaacccucuugaugaaugaguuggguguuccauuucauuugggaaccaagcaagugugcauagcaugguccaguucaaguugucacgauggaaaagcauggcugcauguuugugucacugggcaugaugaaaaugcaacugcuagcuucauuuacgaugggaggcuuguagauaguauugguucaugguccaaaaauauccucaggacccaggagucggaaugcguuuguaucaauggaacuuguacaguaguaaugacugauggaagugcuucagaaagagcugauacuaaaauacuauucauugaagaggggaaaaucguucauauuagcccauugucaggaagugcucagcauguagaggagugcuccuguuauccucgauacccuggugucagaugugucugcagagacaacuggaaaggcuccaauaggcccaucguagauauaaaugugaaagauuauagcauuguuuccaguuaugugugcucagggcuuguuggagacacacccagaaaaaacgacagcuccagcaguagcuauugccggaauccuaacaaugagaaaggaagucauggagugaaaggcugggccuuugacgauggaaaugacguguggaugggaagaacgaucagcgaggaguuacgcucagguuaugaaaccuucaaagucauuggaggcugguccacaccuaacuccaaauugcagauaaauaggcaagucauaguugacagagguaauagguccgguuauucugguauuuucucuguugaaggcaaaagcugcaucaaucggugcuuuuauguggaguugauaaggggaaggaaacaggaaaauaaagucugguggaccucaaacaguauuguuguguuuuguggcaccucagguacauauggaacaggcucauggccugauggggcggacaucaaucucaugccuauauaa

SEQ ID NO: 53940 - RNA, 1410 nt, Artificial Sequence
  derived and/or modified CDS sequence (wt) from neuraminidase__InfluenzaA__AFG72198
augaauccaaaucaaaagauaauaacaauuggcucuguuucucucaccauugccacaauaugcuuccuuaugcaaauugccauccugguaacuacuguaacauugcauuucaagcaauaugagugcaacucccccccaaacaaccaaguaaugccgugugaaccaacaauaauagaaagaaacauaacagagauaguguauuugacuaacaccaccauagagaaagagauaugccccaaacuaguagaauacagaaauuggucaaagccgcaauguaaaauuacaggauuugcaccuuuuucuaaggacaauucaauucggcuuuccgcugguggagacauuugggugacaagagaaccuuaugugucaugcgauccuggcaaguguuaucaauuugcacuaggacagggaaccacacuaaacaacaggcauucaaaugacacaguacaugauaggaccccuuaucgaacccucuugaugaaugaguuggguguuccauuucauuugggaaccaagcaagugugcauagcaugguccagcucaaguugucacgauggaaaagcauggcugcauguuugugucacugggcaugaugaaaaugcaacugcuagcuucauuuacgaugggaggcuuguagauaguauuguuucaugguccaaaaauauccucaggacccaggagucagaaugcguuuguaucaauggaacuuguacaguaguaaugacugauggaagugcuucagaaagagcugauacuaaaauacuauucauugaagaggggaaaaucguucauauuagcccauugucaggaagugcucagcauguagaggagugcuccuguuauccucgauauccuggugucagaugugucugcagagacaacuggaaaggcuccaauaggcccaucguagauauaaaugugaaagauuauagcauuguuuccaguuaugugugcucagggcuuguuggagacacacccagaaaaaacgacagcuccagcaguagcuauugccggaauccuaacaaugaaaaagggagucauggagugaaaggcugggccuuugacgauggaaaugacguguggaugggaagaacgaucggcgaggaguuacgcucagguuaugaaaccuucaaagucauuggaggcugguccacaccuaacuccaaauugcagacaaauaggcaagucauaguugacagagguaauagguccgguuauucugguauuuucucuguugaaggcaaaagcugcaucaaucggugcuuuuauguagaauugauaaggggaaggaaacaggaaacuaaagucugguggaccucaaacaguauuguuguguuuuguggcacaucagguacauauggaacaggcucauggccugauggggcggacaucaaucucaugccuauauaa

SEQ ID NO: 53941 - RNA, 1410 nt, Artificial Sequence
  derived and/or modified CDS sequence (wt) from neuraminidase__InfluenzaA__AFG72209
augaauccaaaucaaaagauaauaacaauuggcucuguuucucucaccauugccacaauaugcuuccuuaugcaaauugccauccugguaacuacuguaacauugcauuucaagcaauaugagugcaacucccccccaaacaaccaaguaaugccgugugaaccaacaauaauagaaagaaacauaacagagauaguguauuugacuaacaccaccauagagaaagagauaugccccaaacuaguagaauacagaaauuggucaaagccgcaauguaaaauuacaggauuugcaccuuuuucuaaggacaauucaauucggcuuuccgcugguggagacauuugggugacaagagaaccuuaugugucaugcgauccuggcaaguguuaucaauuugcacuaggacagggaaccacacuaaacaacaggcauucaaaugacacaguacaugauaggaccccuuaucgaacccucuugaugaaugaguuggguguuccauuucauuugggaaccaagcaagugugcauagcaugguccagcucaaguugucacgauggaaaagcauggcugcauguuugugucacugggcaugaugaaaaugcaacugcuaguuucauuuacgaugggaggcuuguagauaguauuguuucaugguccaaaaauauccucaggacccaggagucggaaugcguuuguaucaauggaacuuguacaguaguaaugacugauggaagugcuucagaaagagcugauacuaaaauacuauucauugaagaggggaaaaucguucauauuagcccauugucaggaagugcucagcauguagaggagugcuccuguuauccucgauauccuggugucagaugugucugcagagacaacuggaaaggcuccaauaggcccaucguagauauaaaugugaaagauuauagcauuguuuccaguuaugugugcucagggcuuguuggagacacacccagaaaaaacgacagcuccagcaguagcuauugccggaauccuaacaaugagaaagggagucauggaguaaaaggcugggccuuugacgauggaaaugacguguggaugggaagaacgaucggcgaggaguuacgcucagguuaugaaaccuucaaagucauuggaggcugguccacaccuaacuccaaauugcagacaaauaggcaagucauaguugacagagguaauagguccgguuauucugguauuuucucuguugaaggcaaaagcugcaucaaucggugcuuuuauguagaauugauaaggggaaggaaacaggaaacuaaagucugguggaccucaaacaguauuguuguguuuuguggcaccucagguacauauggaacaggcucauggccugauggggcggacaucaaucucaugccuauauaa

SEQ ID NO: 53942 - RNA, 1410 nt, Artificial Sequence
  derived and/or modified CDS sequence (wt) from neuraminidase__InfluenzaA__AFG72220
augaauccaaaucaaaagauaauaacaauuggcucuguuucucucacuauugccacaauaugcuuccuuaugcaaauugccauccugguaacuacuguaacauugcauuucaagcaauaugagugcaacucccccccaaacaaccaaguaaugcugugugaaccaacaauaauagaaagaaacauaacagagauagugcaucugaccaacaccaccauagagaaagaaauaugccccaaacuagcagaauacagaaauuggucaaagccgcaauguaaaauuacaggauuugcaccuuuuucuaaggacaauucaauucggcuuuccgcugguggagacauuugggugacaagagaaccuuaugugucaugcgauccuggcaaguguuaucaauuugcacuuggacagggaacaacacuaaacaacaggcauucaaaugacacaguacaugauaggaccccuuaucgaacccuauugaugaaugaguuggguguuccauuucauuugggaaccaagcaagugugcauagcaugguccagcucaaguugucacgauggaaaagcauggcugcauguuuguguaacugggcaugaugaaaaugcaacugcuagcuucauuuacgaugggaggcuuguagauaguauugguucaugguccaaaaauauccucaggacccaggagucggaaugcguuuguaucaauggaacuuguacaguaguaaugacugauggaagugcuucagaaagagcugauacuaaaauacuauucauugaagaggggaaaaucguucauauuagcccauugucaggaagugcucagcaugucgaggagugcuccuguuauccucgauauccuggugucagaugugucugcagagacaacuggaaaggcuccaauaggcccaucguagauauaaaugugaaagauuauagcauuguuuccaguuaugugugcucaggacuuguuggagacacacccagaaaaaacgacagcuccagcaguagcuauugccggaauccuaacaaugagaaagggagucauggagugaaaggcugggccuuugaugauggaaaugacguguggaugggaagaacgaucagcgaggaguuacgcucagguuaugaaaccuucaaagucauuggaggcugguccaaaccuaacuccaaauugcagauaaauaggcaagucauaguugacagagguaauagguccgguuauucugguauuuucucuguugaaggcaaaagcugcaucaaucggugcuuuuauguggaguugauaaggggaaggaaacaggaaacugaagucugguggaccucaaacaguauuguuguguuuuguggcaccucagguacauauggaacaggcucauggccugauggggcggacaucaaucucaugccuauauaa

SEQ ID NO: 53943 - RNA, 1410 nt, Artificial Sequence
  derived and/or modified CDS sequence (wt) from neuraminidase__InfluenzaA__AFG72231
augaauccaaaucaaaagauaauaacaauuggcucuguuucucucaccauugccacaauaugcuuccuuaugcaaauugccauccugguaacuacuguaacauugcauuucaagcaauaugagugcaacucccccccaaacaaccaaguaaugccgugugaaccaacaauaauagaaagaaacauaacagagauaguguauuugacuaacaccaccauagagaaagagauaugccccaaacuaguagaauacagaaauuggucaaagccgcaauguaaaauuacaggauuugcaccuuuuucuaaggacaauucaauucggcuuuccgcugguggagacauuugggugacaagagaaccuuaugugucaugcgauccuggcaaguguuaucaauuugcacuaggacagggaaccacacuaaacaacaggcauucaaaugacacaguacaugauaggaccccuuaucgaacccucuugaugaaugaguuggguguuccauuucauuugggaaccaagcaagugugcauagcaugguccagcucaaguugucacgauggaaaagcauggcugcauguuugugucacugggcaugaugaaaaugcaacugcuagcuucauuuacgaugggaggcuuguagauaguauuguuucaugguccaaaaauauccucaggacccaggagucggaaugcguuuguaucaauggaacuuguacaguaguaaugacugauggaagugcuucagaaagagcugauacuaaaauacuauucauugaagaggggaaaaucguucauauuagcccauugucaggaagugcucagcauguagaggagugcuccuguuauccucgauauccuggugucagaugugucugcagagacaacuggaaaggcuccaauaggcccaucguagauauaaaugugaaagauuauagcauuguuuccaguuaugugugcucagggcuuguuggagacacacccagaaaaaacgacagcuccagcaguagcuauugccggaauccuaacaaugagaaagggagucauggagugaaaggcugggccuuugacgauggaaaugacguguggaugggaagaacgaucggcgaggaguuacgcucagguuaugaaaccuucaaagucauuggaggcugguccacaccuaacuccaaauugcagacaaauaggcaagucauaguugacagagguaauagguccgguuauucugguauuuucucuguugaaggcaaaagcugcaucaaucggugcuuuuauguagaauugauaaggggaaggaaacaggaaacuaaagucugguggaccucaaacaguauuguuguguuuuguggcacaucagguacauauggaacaggcucauggccugauggggcggacaucaaucucaugccuauauaa

SEQ ID NO: 53944 - RNA, 1410 nt, Artificial Sequence
  derived and/or modified CDS sequence (wt) from neuraminidase__InfluenzaA__AFG72297
augaauccaaaucaaaagauaauaacaauuggcucuguuucucuaacuauugccacaauaugcuuccuuaugcaaauugccauccugguaacuacuguaacauugcauuucaagcaauaugagugcaacucccccccaaacaaccaaguaaugcugugugaaccaacaauaauagaaagaaacauaacagagauaguguauuugacuaacaccaccauagagagagaaauaugccccaaacuggcagaauacagaaauuggucaaagccgcaauguaaaauuacaggguuugcaccuuuuucuaaagacaauucaauucggcuuuccgcugguggagacauuugggugacaagagaaccuuaugugucaugcgauccuggcaaguguuaucaauuugcacuuggacagggaacaacacuaaacaacaggcauucaaaugacacaguacaugagaggaccccuuaucgaacccuauugaugaaugaguuggguguuccauuucauuugggaaccaagcaagugugcauagcaugguccagcucaaguugucacgauggaaaagcauggcugcauguuuguguaacugggcaugaugaaaaugcaacugcuagcuucauuuacgaugggaggcuuguagauaguauugguucaugguccaaaaauauccucaggacccaggagucggaaugcguuuguaucaauggaacuuguacaguaguaaugacugauggaagugcuucagaaagagcugauacuaaaauacuauucauugaagaggggaaaaucguucauauuagcccauugucaggaagugcucagcaugucgaggagugcuccuguuauccucgauauccuggugucagaugugucugcagagacaacuggaaaggcuccaauaggcccaucguagauauaaaugugaaagauuauagcauuguuuccaguuaugugugcucaggacuuguuggagacacacccagaaaaaacgacagcuccagcaguagcuauugccggaauccuaacaaugagaaagggagucauggagugaaaggcugggccuuugaugauggaaaugacguguggaugggaagaacgaucagcgaggaguuacgcucagguuaugaaaccuucaaagucauuggaggcugguccaaaccuaacuccaaauugcagauaaauaggcaagucauaguugacagagguaauagguccgguuauucugguauuuucucuguugaaggcaaaagcugcaucaaucggugcuuuuauguggaguugauaaggggaagaaaacaggaaacugaagucugguggaccucaaacaguauuguuguguuuuguggcaccucagguacauauggaacaggcucauggccugauggggcggacaucaaucucaugccuauauaa

SEQ ID NO: 53945 - RNA, 1410 nt, Artificial Sequence
  derived and/or modified CDS sequence (wt) from neuraminidase__InfluenzaA__AFG72308
augaauccaaaucaaaagauaauaacaauuggcucuguuucucucacuauugccacaauaugcuuccuuaugcaaauugccauccugguaacuacuguaacauugcauuucaagcaauaugagugcaacucccccccaagcaaccaaguaaugcugugugaaccaacaauaauagaaagaaacauaacagagauaguguauuugacuaacaccaccauagagaaagaaauaugccccaaacuggcagaauacagaaauuggucaaagccgcaauguaaaauuacaggauuugcaccuuuuucuaaggacaauucaauucggcuuuccgcugguggagacauuugggugacaagagaaccuuaugugucaugcgauccuggcaaguguuaucaauuugcacuuggacagggaacaacacuaaacaacaggcauucaaaugacacaguacaugauaggaccccuuaucgaacccuauugaugaaugaguuggguguuccauuucauuugggaaccaagcaagugugcauagcaugguccagcucaaguugucacgauggaaaagcauggcugcauguuuguguaacugggcaugaugaaaaugcaacugcuagcuucauuuacgaugggaggcuuguagauaguauugguucaugguccaaaaauauccucaggacccaggagucggaaugcguuuguaucaauggaacuuguacaguaguaaugacugauggaagugcuucagaaagagcugauacuaaaauacuauucauugaagaggggaaaaucguucauauuagcccauugucaggaagugcucagcaugucgaggagugcuccuguuauccucgauauccuggugucagaugugucugcagagacaacuggaaaggcuccaauaggcccaucguagauauaaaugugaaagauuauagcauuguuuccaguuaugugugcucaggacuuguuggagacacacccagaaaaaacgacagcuccagcaguagcuauugccggaauccuaacaaugagaaagggagucauggagugaaagguugggccuuugaugauggaaaugacguguggaugggaagaacgaucagcgaggaguuacgcucugguuaugaaaccuucagaguuauuggaggcugguccaaaccuaacuccaaauugcagauaaauaggcaagucauaguugacagagguaauagguccgguuauucugguauuuucucuguugaaggcaaaagcugcaucaaucggugcuuuuauguggaguugauaaggggaaggaaacaggaaacugaagucugguggaccucaaacaguauuguuguguuuuguggcaccucagguacauauggaacaggcucauggccugauggggcggacaucaaucucaugccuauauaa

SEQ ID NO: 53946 - RNA, 1410 nt, Artificial Sequence
  derived and/or modified CDS sequence (wt) from neuraminidase__InfluenzaA__AFG72320
augaauccaaaucaaaagauaauaacaauuggcucuguuucucucacuauugccacaauaugcuuccuuaugcaaauugccauccugguaacuacuguaacauugcauuucaagcaauaugagugcaacucccccccaaacaaccaaguaaugcugugugaaccaacaauaauagaaagaaacauaacagagauaguguaucugaccaacaccaccauagagaaagaaauaugccccaaacuagcagaauacagaaauuggucaaagccgcaauguaaaauuacaggauuugcaccuuuuucuaaggacaauucaauucggcuuuccgcugguggagacauuugggugacaagagaaccuuaugugucaugcgauccuggcaaguguuaucaauuugcccuuggacagggaacaacacuaaacaacaggcacucaaaugacacaguacaugauaggaccccuuaucgaacccuauugaugaaugaguuggguguuccauuucauuugggaaccaagcaagugugcauagcaugguccagcucaaguugucacgauggaaaagcauggcugcauguuuguguaacugggcaugaugaaaaugcaacugcuagcuucauuuacgaugggaggcuuguagauaguauugguucaugguccaaaaauauccucaggacccaggagucggaaugcguuuguaucaauggaacuuguacaguaguaaugacugauggaagugcuucagaaagagcugauacuaaaauacuauucauugaagaggggaaaaucguucauauuagcccauugucaggaagugcucagcaugucgaggagugcuccuguuauccucgauauccuggugucagaugugucugcagagacaacuggaaaggcuccaauaggcccaucguagauauaaaugugaaagauuauagcauuguuuccaguuaugugugcucaggacuuguuggagacacacccagaaaaaacgacagcuccagcaguagcuauugccggaauccuaacaaugagaaagggagucauggagugaaaggcugggccuuugaugauggaaaugacguguggaugggaagaacgaucagcgaggaguuacgcucagguuaugaaaccuucaaagucauuggaggcugguccaaaccuaacuccaaauugcagauaaauaggcaagucauaguugacagagguaauagguccgguuauucugguauuuucucuguugaaggcaaaagcugcaucaaucggugcuuuuauguggaguugauaaggggaaggaaacaggaaacugaagucugguggaccucaaacaguauuguuguguuuuguggcaccucagguacauauggaacaggcucauggccugauggggcggacaucaaucucaugccuauauaa

SEQ ID NO: 53947 - RNA, 1410 nt, Artificial Sequence
  derived and/or modified CDS sequence (wt) from neuraminidase__InfluenzaA__AFG72331
augaauccaaaucaaaagauaauaacaauuggcucuguuucucucacuguugccacaauaugcuuccuuaugcaaauugccauccugguaacuacuguaacauugcauuucaagcaauaugagugcaacucccccccaaacaaccaaguaaugcugugugaaccaacaauaauagaaagaaacauaacagagauaguguaucugaccaacaccaccauagagaaagaaauaugccccaaacuagcagaauacagaaauuggucaaagccgcaauguaaaauuacaggauuugcaccuuuuucuaaggacaauucaauucggcuuuccgcugguggagacauuugggugacaagagaaccuuaugugucaugcgauccuggcaaguguuaucaauuugcccuuggacagggaacaacacuaaacaacaggcacucaaaugacacaguacaugauaggaccccuuaucgaacccuauugaugaaugaguuggguguuccauuucauuugggaaccaagcaagugugcauagcaugguccagcucaaguugucacgauggaaaagcauggcugcauguuuguguaacugggcaugaugaaaaugcaacugcuagcuucauuuacgaugggaggcuuguagauaguauugguucaugguccaaaaauauccucaggacccaggagucggaaugcguuuguaucaauggaacuuguacaguaguaaugacugauggaagugcuucagaaagagcugauacuaaaauacuauucauugaagaggggaaaaucguucauauuagcccauugucaggaagugcucagcaugucgaggagugcuccuguuauccucgauauccuggugucagaugugucugcagagacaacuggaaaggcuccaauaggcccaucguagauauaaaugugaaagauuauagcauuguuuccaguuaugugugcucaggacuuguuggagacacacccagaaaaaacgacagcuccagcaguagcuauugccggaauccuaacaaugagaaagggagucauggagugaaaggcugggccuuugaugauggaaaugacguguggaugggaagaacgaucagcgaggaguuacgcucagguuaugaaaccuucaaagucauuggaggcugguccaaaccuaacuccaaauugcagauaaauaggcaagucauaguugacagagguaauagguccgguuauucugguauuuucucuguugaaggcaaaagcugcaucaaucggugcuuuuauguggaguugauaaggggaaggaaacaggaaacugaagucugguggaccucaaacaguauuguuguguuuuguggcaccucagguacauauggaacaggcucauggccugauggggcggacaucaaucucaugccuauauaa

SEQ ID NO: 53948 - RNA, 1410 nt, Artificial Sequence
  derived and/or modified CDS sequence (wt) from neuraminidase__InfluenzaA__AFG72353
augaauccaaaucaaaagauaauaacaauuggcucuguuucucucacuauugccacaauaugcuuccuuaugcaaauugccauccugguaacuacuguaacauugcauuucaagcaauaugagugcaacucccccccaaacaaccaaguaaugcugugugaaccaacaauaauagaaagaaacauaacagagauaguguaucugaccaacaccaccauagagaaagaaauaugccccaaacuagcagaauacagaaauuggucaaagccgcaauguaaaauuacaggauuugcaccuuuuucuaaggacaauucaauucggcuuuccgcugguggagacauuugggugacaagagaaccuuaugugucaugcgauucuggcaaguguuaucaauuugcacuuggacagggaacaacacuaaacaacaggcauucaaaugacacaguacaugauaggaccccuuaucgaacccuauugaugaaugaguuggguguuccauuucauuugggaaccaagcaagugugcauagcaugguccagcucaaguugucacgauggaaaagcauggcugcauguuuguguaacugggcaugaugaaaaugcaacugcuagcuucauuuacgaugggaggcuuguagauaguauugguucaugguccaaaaauauccucaggacccaggagucggaaugcguuugcaucaauggaacuuguacaguaguaaugacugauggaagugcuucagaaagagcugauacuaaaauacuauucauugaagaggggaaaaucguucauauuagcccauugucaggaagugcucagcaugucgaggagugcuccuguuauccucgauauccuggugucagaugugucugcagagacaacuggaaaggcuccaauaggcccaucguagauauaaaugugaaagauuauagcauuguuuccaguuaugugugcucaggacuuguuggagacacacccagaaaaaacgacagcuccagcaguagcuauugccggaauccuaacaaugagaaagggagucauggagugaaaggcugggccuuugaugauggaaaugacguguggaugggaagaacgaucagcgaggaguuacgcucagguuaugaaaccuucaaagucauuggaggcugguccaaaccuaacuccaaauugcagauaaauaggcaagucauaguugacagagguaauagguccgguuauucugguauuuucucuguugagggcaaaagcugcaucaaucggugcuuuuauguggaguugauaaggggaaggaaacaggaaacugaagucugguggaccucaaacaguauuguuguguuuuguggcaccucagguacauauggaacaggcucauggccugauggggcggacaucaaucucaugccuauauaa

SEQ ID NO: 53949 - RNA, 1410 nt, Artificial Sequence; identical to SEQ ID NO: 53946
  derived and/or modified CDS sequence (wt) from neuraminidase__InfluenzaA__AFG72364

SEQ ID NO: 53950 - RNA, 1410 nt, Artificial Sequence
  derived and/or modified CDS sequence (wt) from neuraminidase__InfluenzaA__AFG72430
augaauccaaaucaaaagauaauaacaauuggcucuguuucucucacuauuaccacaauaugcuuccuuaugcaaauugccauccugguaauuacuguaacauugcauuucaagcaaugugaaugcaacucccccccaaacaaccaaguaaugcugugugaaccaacaauaauagaaagaaacauaacagagauaguguaucugaccaacaccaccauagagaaagaaauaugccccaaacuagcagaauacagaaauuggucaaagccgcaauguaaaauuacaggauuugcaccuuuuucuaaggacaacucaauucggcuuuccgcugguggagacauuugggugacaagagaaccuuaugugucaugcgauccuggcaaguguuaucaauuugcccuuggacagggaacaacacuaaacaacaggcauucaaaugacacaguacaugauaggaccccuuaucgaacccuauugaugaaugaguuggguguuccauuucauuugggaaccaagcaagugugcauagcaugguccagcucaaguugucacgauggaaaagcauggcugcauguuuguguaacugggcauaaugaaaaugcaacugcgagcuucauuuacgaugggaggcuuguagauaguauugguucaugguccaaaaauauccucaggacccaggagucggaaugcguuuguaucaauggaacuuguacaguaguaaugacugauggaagugcuucaggaagagcugauacuaaaauacuauucauugaagaggggaaaaucguucauauuagccaauugucaggaagugcucagcaugucgaggagugcuccuguuauccucgauauccuggugucagaugugucugcagagacaacuggaaaggcucuaauaggcccaucguagauauaaaugugaaagauuauagcauuguuuccaguuauguaugcucaggacuuguuggagacacaccccgaaaaaacgacagcuccagcaguagcaauugccuggauccuaacaaugaggaagggggucauggagugaaaggcugggccuuugaugauggaaaugauguguggaugggaagaacgaucagcgagaaguuacgcucagguuaugaaaccuucaaagucauuggaggcugguccaaaccuaacuccaaauugcagauaaauaggcaagucauaguugacagagguaauagguccgguuauucugguauuuucucuguugaaggcaaaagcugcaucaaucggugcuuuuauguggaguugauaaggggaaggaaacaggaaacugaagucugguggaccucaaacaguauuguuguguuuuguggcaccucagguacauauggaacaggcucauggccugauggggcggacaucaaucucaugccuauauaa

SEQ ID NO: 53951 - RNA, 1410 nt, Artificial Sequence
  derived and/or modified CDS sequence (wt) from neuraminidase__InfluenzaA__AFG72452
augaauccaaaucaaaagauaauaacaauuggcucuguuucucucacuauugccacaauaugcuuccuuaugcaaauugccauccugguaacuacugugacauugcauuucaagcaauaugagugcaacucccccccaaacaaccaaguaaugcugugugaaccaacaauaauagaaagaaacauaacagagauaguguauuugacuaacaccaccauagagaaagaaauaugccccaaacuggcagaauacagaaauuggucaaagccgcaauguaaaauuacaggauuugcaccuuuuucuaaggacaauucaauucggcuuuccgcugguggagacauuugggugacaagagaaccuuaugugucaugcgauccuggaaaguguuaucaauuugcacuuggacagggaacaacacuaaacaacaggcauucaaaugacacaguacaugauaggaccccuuaucgaacccuauugaugaaugaguugggugucccauuucauuugggaaccaagcaggugugcauagcaugguccagcucaaguugucacgauggaaaagcauggcugcauguuuguguaacugggcaugaugaaaaugcaacugcuagcuucauuuacgaugggaggcuuguagauaguauugguucaugguccaaaaauauccucaggacccaggagucggaaugcguuuguaucaauggaacuuguacaguaguaaugacugauggaagugcuucagaaagagcugauacuaaaauacuauucauugaagaggggaaaaucguucauauuagcccauugucaggaagugcucagcaugucgaggagugcuccuguuauccucgauauccuggugucagauguguuugcagagacaacuggaaaggcuccaauaggcccaucguagauauaaaugugaaagauuauagcauuguuuccaguuaugugugcucaggacuuguuggagacacacccagaaaaaacgacagcuccagcaguagcuauugccggaauccuaacaaugagaaagggagucauggagugaaaggcugggccuuugaugauggaaaugacguguggaugggaagaacgaucagcgaggaguuacgcucagguuaugaaaccuucaaaguuauuggaggcugguccaaaccuaacuccaaauugcagauaaauaggcaagucauaguugacagagguaauagguccgguuauucugguauuuucucuguugaaggcaaaagcugcaucaaucggugcuuuuauguggaguugauaaggggaaggaaacaggaaacugaagucugguggaccucaaacaguauuguuguguuuuguggcaccucagguacauauggaacaggcucauggccugauggggcggacaucaaucucaugccuauauaa

SEQ ID NO: 53952 - RNA, 1410 nt, Artificial Sequence
  derived and/or modified CDS sequence (wt) from neuraminidase__InfluenzaA__AFG72474
augaauccaaaucaaaagauaauaacaauuggcucuguuucucucacuauugccacaauaugcuuccuuaugcaaauugccauccugguaacuacuguaacauugcauuucaagcaauaugagugcaacucccccccaaacaaccaaguaaugcugugugaaccaacaauaauagaaagaaacauaacagagauaguguauuugacuaacaccaccauagagaaagaaauaugccccaaacuggcagaauacagaaauuggucaaagccgcaaugugaaauuacaggauuugcaccuuuuucuaaggacaauucaauucggcuuuccgcugguggagacauuugggugacaagagaaccuuaugugucaugcgauccuggcaaguguuaucaauuugcacuuggacagggaacaacacuaaacaacaggcauucaaaugacacaguacaugauaggaccccuuaucgaacccuauugaugaaugaguuggguguuccauuucauuugggaaccaagcaagugugcauagcaugguccagcucaaguugucacgauggaaaagcauggcugcauguuuguguaacugggcaugaugaaaaugcaacugcuagcuucauuuacgaugggaggcuuguagauaguauugguucaugguccaaaaauauccucaggacccaggagucggaaugcguuuguaucaauggaacuuguacaguaguaaugacugauggaagugcuucagaaagagcugauacuaaaauacuauucauugaagaggggaaaaucguucauauuagcccauugucaggaagugcucagcaugucgaggagugcuccuguuauccucgauauccuggugucagaugugucugcagagacaacuggaaaggcuccaauaggcccaucguagauauaaaugugaaagauuauagcauuguuuccaguuaugugugcucaggacuuguuggagacacacccagaaaaaacgacagcuccagcaguagcuauugccggaauccuaacaaugagaaagggagucauggagugaaaggcugggccuuugaugauggaaaugacguguggaugggaagaacgaucagcgaggaguuacgcucagguuaugaaaccuucaaaguuauuggaggcugguccaaaccuaacuccaaauugcagauaaauaggcaagucauaguugacagagguaauagguccgguuauucugguauuuucucuguugaaggcaaaagcugcaucaaucggugcuuuuauguggaguugauaaggggaaggaaacaggaaacugaagucugguggaccucaaacaguauuguuguguuuuguggcaccucagguacauauggaacaggcucauggccugauggggcggacaucaaucucaugccuauauaa

SEQ ID NO: 53953 - RNA, 1410 nt, Artificial Sequence
  derived and/or modified CDS sequence (wt) from neuraminidase__InfluenzaA__AFG72485
augaauccaaaucaaaagauaauaacaauuggcucuguuucucucacuauugccacaauaugcuuccuuaugcaaauugccauccugguaacuacuguaacauugcauuucaagcaacaugagugcaacucccccccaaacaaccaaguaaugcugugugaaccaacaauaauagaaagaaacauaacagagauaguguaucugaccaacaccaccauagagaaagaaauaugccccaaacuagcagaauacagaaauuggucaaagccgcaauguaaaauuacaggauuugcaccuuuuucuaaggacaauucaauucggcuuuccgcugguggagacauuugggugacaagagaaccuuaugugucaugcgauccuggcaaguguuaucaauuugcccuuggacagggaacaacacuaaacaacaggcauucaaaugacacaguacaugauaggaccccuuaucgaacccuauugaugaaugaguuggguguuccauuucauuugggaaccaagcaagugugcauagcaugguccagcucaaguugucacgauggaaaagcauggcugcauguuuguguaacugggcaugaugaaaaugcaacugcuagcuucauuuacgaugggaggcuuguagauaguauugguucaugguccaaaaauauccucaggacccaggagucggaaugcguuuguaucaauggaacuuguacaguaguaaugacugauggaagugcuucagaaagagcugauacuaaaauacuauucauugaagaggggaaaaucguucauauuagcccauugucaggaagugcucagcaugucgaggagugcuccuguuauccucgauauccuggugucagaugugucugcagagacaacuggaaaggcuccaauaggcccaucguagauauaaaugugaaagauuauagcauuguuuccaguuaugugugcucaggacuuguuggagacacacccagaaaaaacgacagcuccagcaguagcuauugccggaauccuaacaaugagaaagggagucauggagugaaaggcugggccuuugaugauggaaaugacguguggaugggaagaacgaucagcgaggaguuacgcucagguuaugaaaccuucaaagucauuggaggcugguccaaaccuaacuccaaauugcagauaaauaggcaagucauaguugacagagguaauagguccgguuauucugguauuuucucuguugaaggcaaaagcugcaucaaucggugcuuuuauguggaguugauaaggggaaggaaacaggaaacugaagucugguggaccucaaacaguauuguuguguuuuguggcaccucagguacauauggaacaggcucauggccugauggggcggacaucaaucucaugccuauauaa

SEQ ID NO: 53954 - RNA, 1410 nt, Artificial Sequence
  derived and/or modified CDS sequence (wt) from neuraminidase__InfluenzaA__AFG72507
augaauccaaaucaaaagauaauaacaauuggcucuguuucucucacuauugccacaauaugcuuccuuaugcaaauugccauccugguaacuacuguaacauugcauuucaagcaauaugagugcaacucccccccaagcaaccaaguaaugcugugugaaccaacaauaauagaaagaaacauaacagagauaguguauuugacuaacaccaccauagagaaagaaauaugccccaaauuggcagaauacagaaauuggucaaagccgcaauguaaaauuacaggauuugcaccuuuuucuaaggacaauucaauucggcuuuccgcugguggagacauuugggugacaagagaaccuuaugugucaugcgauccuggcaaguguuaucaauuugcacuuggacagggaacaacacuaaacaacaggcauucaaaugacacaguacaugauaggaccccuuaucgaacccuauugaugaaugaguuggguguuccauuucauuugggaaccaagcaagugugcauagcaugguccagcucaaguugucacgauggaaaagcauggcugcauguuuguguaacugggcaugaugaaaaugcaacugcuagcuucauuuacgaugggaggcuuguagauaguauugguucaugguccaaaaauauccucaggacccaggagucggaaugcguuuguaucaauggaacuuguacaguaguaaugacugauggaagugcuucagaaagagcugauacuaaaauacuauucauugaagaggggaaaaucguucauauuagcccauugucaggaagugcucagcaugucgaggagugcuccuguuauccucgauauccuggugucagaugugucugcagagacaacuggaaaggcuccaauaggcccaucguagauauaaaugugaaagauuauagcauuguuuccaguuaugugugcucaggacuuguuggagacacacccagaaaaaacgacagcuccagcaguagcuauugccggaauccuaacaaugagaaagggagucauggagugaaagguugggccuuugaugauggaaaugacguguggaugggaagaacgaucagcgaggaguuacgcucugguuaugaaaccuucaaaguuauuggaggcugguccaaaccuaacuccaaauugcagauaaauaggcaagucauaguugacagagguaauagguccgguuauucugguauuuucucuguugaaggcaaaagcugcaucaaucggugcuuuuauguggaguugauaaggggaaggaaacaggaaacugaagucugguggaccucaaacaguauuguuguguuuuguggcaccucagguacauauggaacaggcucauggccugauggggcggacaucaaucucaugccuauauaa

SEQ ID NO: 53955 - RNA, 1410 nt, Artificial Sequence
  derived and/or modified CDS sequence (wt) from neuraminidase__InfluenzaA__AFG72529
augaauccaaaucaaaagauaauaacaauuggcucuguuucucucacuauugccacaauaugcuuccuuaugcaaauugccauccugguaacuacuguaacauugcauuucaagcaauaugagugcaacucccccccaaacaaccaaguaaugcugugugaaccaacaauaauagaaagaaacauaacagagauaguguaucugaccaacaccaccauagagaaagaaauaugccccaaacuagcagaauacagaaauuggucaaagccgcaauguaaaauuacaggauuugcaccuuuuucuaaggacaauucaauucggcuuuccgcugguggagacauuugggugacaagagaaccuuaugugucaugcgauccuggcaaguguuaucaauuugcccuuggacagggaacaacacuaaacaacaggcacucaaaugacacaguacaugauaggaccccuuaucgaacccuauugaugaaugaguuggguguuccauuucauuugggaaccaaacaagugugcauagcaugguccagcucaaguugucacgauggaaaagcauggcugcauguuuguguaacugggcaugaugaaaaugcaacugcuagcuucauuuacgaugggaggcuuguagauaguauugguucaugguccaaaaaaauccucaggacccaggagucggaaugcguuuguaucaauggaacuuguacaguaguaaugacugauggaagugcuucagaaagagcugauacuaaaauacuauucauugaagaggggaaaaucguucauauuagcccauugucaggaagugcucagcaugucgaggagugcuccuguuauccucgguauccuggugucagaugugucugcagagacaacuggaaaggcuccaauaggcccaucguagauauaaaugugaaagauuauagcauuguuuccaguuaugugugcucaggacuuguuggagacacacccagaaaaaacgacagcuccagcaguagcuacugccaaaauccuaacaaugagaaugggagucauggagugaaaggcugggccuuugaugauggaaaugacguguggaugggaagaacgaucagcgaggaguuacgcucagguuaugaaaccuucaaagucauuggaggcugguccaaaccuaacuccaaauugcagauaaauaggcaagucauaguugacagagguaauagguccgguuauucugguauuuucucuguugaaggcaaaagcugcaucaaucggugcuuuuauguggaguugauaaggggaaggaaacaggaaacugaagucugguggaccucaaacaguauuguuguguuuuguggcaccucagguacauauggaacaggcucauggccugauggggcggacaucaaucucaugccuauauaa

SEQ ID NO: 53956 - RNA, 1410 nt, Artificial Sequence
  derived and/or modified CDS sequence (wt) from neuraminidase__InfluenzaA__AFG72540
augaauccaaaucaaaagauaauaacaauuggcucuguuucucucacuauugccacaauaugcuuccuuaugcaaauugccauccugguaacuacuguaacauugcauuucaagcaauaugagugcaacccccccccaaacaaccaaguaaugcugugugaaccaacaauaauagaaagaaacauaacagagauaguguaucugaccaacaccaccauaaagaaagaaauaugccccaaacuagcagaauacagaaauuggucaaagccgcaauguaaaauuacaggauuugcaccuuuuucuaaggacaauucaauucggcuuuccgcugguggagacauuugggugacaagagaaccuuaugugucaugcgauccuggcaaguguuaucaauuugcccuuggacagggaacaacacuaaacaacaggcauucaaaugacacaguacaugauaggaccccuuaucgaacccuauugaugaaugaguuggguguuccauuucauuugggaaccaagcaagugugcauagcaugguccagcucaaguugucacgauggaaaagcauggcugcauguuuguguaacugggcaugaugaaaaugcaacugcuagcuucauuuacgaugggaggcuuguagauaguauugguucaugguccaaaaauauccucaggacccaggagucggaaugcguuuguaucaauggaacuuguacaguaguaaugacugauggaagugcuucagaaagagcugauacuaaaauacuauucauugaagaggggaaaaucguucauauuagcccauugucaggaagugcucagcaugucgaggagugcuccuguuauccucgauauccuggugucagaugugucugcagagacaacuggaaaggcuccaauaggcccaucguagauauaaaugugaaagauuauagcauuguuuccaguuaugugugcucaggacuuguuggagacacacccagaaaaaacgacagcuccagcaguagcuauugcuggaauccuaacaaugagaaagggggucauggagugaaaggcugggccuuugaugauggaaaugacguguggaugggaagaacgaucagcgaggaguuacgcucagguuaugaaaccuucaaagucauuggaggcugguccaaaccuaacuccaaauugcagauaaauaggcaagucauaguugacagagguaauagguccgguuauucugguauuuucucuguugaaggcaaaagcugcaucaaucggugcuuuuauguggaguugauaaggggaaggaaacaggaaacugaagucugguggaccucaaacaguauuguuguguuuuguggcaccucagguacauauggaacaggcucauggccugauggggcggacaucaaucucaugccuauauaa

SEQ ID NO: 53957 - RNA, 1410 nt, Artificial Sequence
  derived and/or modified CDS sequence (wt) from neuraminidase__InfluenzaA__AFG72562
augaauccaaaucaaaagauaauaacaauuggcucuguuucucucacuauugccacaauaugcuuccuuaugcaaauugccauccuuguaacuacuguaacauugcauuucaagcaauaugagugcaacucccccccaaacaaccaaguaaugcugugugaaccaacaauaauagaaagaaacauaacagagauaguguaucugaccaacaccaccauagagaaagaaauaugccccaaacuagcagaauacagaaauuggucaaagccgcaauguaaaauuacaggauuugcaccuuuuucuaaggacaauucaauucggcuuuccgcugguggagacauuugggugacaagagaaccuuaugugucaugcgauccuggcaaguguuaucaauuugcccuuggacagggaacaacacuaaacaacaggcauucaaaugacacaguacaugauaggaccccuuaucgaacccuauugaugaaugaguuggguguuccauuucauuugggaaccaagcaagugugcauagcaugguccagcucaaguugucacgauggaaaagcauggcugcauguuuguguaacugggcaugaugaaaaugcaacugcuagcuucauuuacgaugggaggcuuguagauaguauugguucaugguccaaaaauauccucaggacccaggagucggaaugcguuuguaucaauggaacuuguacaguaguaaugacugauggaagugcuucagaaagagcugauacuaaaauacuauucauugaagaggggaaaaucguucauauuagcccauugucaggaagugcucagcaugucgaggagugcuccuguuauccucgauauccuggugucagaugugucugcagagacaacuggaaaggcuccaauaggcccaucguagauauaaaugugaaagauuauagcauuguuuccaguuaugugugcucaggacuuguuggagacacacccagaaaaaacgacagcuccagcaguagcuauugcuggaauccuaacaaugagaaaggggggcauggagugaaaggcugggccuuugaugauggaaaugacguguggaugggaagaacgaucagcgaggaguuacgcucagguuaugaaaccuucaaagucauuggaggcugguccaaaccuaacuccaaauugcagauaaauaggcaagucauaguugacagagguaauagguccgguuauucugguauuuucucuguugaaggcaaaagcugcaucaaucggugcuuuuauguggaguugauaaggggaaggaaacaggaaacugaagucugguggaccucaaacaguauuguuguauuuuguggcaccucagguacauauggaacaggcucauggccugauggggcggacaucaaucucaugccuauauaa

SEQ ID NO: 53958 - RNA, 1410 nt, Artificial Sequence
  derived and/or modified CDS sequence (wt) from neuraminidase__InfluenzaA__AFG72584
augaauccaaaucaaaagauaauaacaauuggcucuguuucucucacuauugccacaauaugcuuccuuaugcagauugccauccugguaacuacuguaacauugcauuucaagcaauaugagugcaacucccccccaaacaaccaaguaaugcugugugaaccaacaauaauagaaagaaacauaacagagauaguguaucugaccaacaccaccauagagaaagaaguaugccccaaacuagcagaauacagaaauuggucaaagccgcaauguaaaauuacaggauuugcaccuuuuucuaaggacaauucaauucggcuuuccgcugguggagacauuugggugacaagagaaccuuaugugucaugcgauccuggcaaguguuaucaauuugcccuuggacagggaacaacacuaaacaacaagcauucaaaugacacaguacaugauaggaccccuuaucgaacccuauugaugaaugaguuggguguuccauuucauuugggaaccaagcaagugugcauagcaugguccagcucaaguugucacgauggaaaagcauggcugcauguuuguguaacugggcaugaugaaaaugcaacugcuagcuucauuuacgaugggaggcuuguagauaguauugguucaugguccaaaaauauccucaggacccaggagucggaaugcguuuguaucaauggaacuuguacaguaguaaugacugauggaagugcuucagaaaaagcugauacuaaaauacuauucauugaagaggggaaaaucguucauauuagcccauugucaggaagugcucagcaugucgaggagugcuccuguuauccucgauauccuggugucagaugugucugcagagacaacuggaaaggcuccaauaggcccaucguagauauaaaugugaaagauuauagcauuguuuccaguuaugugugcucaggacuuguuggagacacacccagaaaaaacgacagcuccagcaguagcuauugcuggaauccuaacaaugagaaagggggucauggagugaaaggcugggccuuugaugauggaaaugacguguggaugggaagaacgaucagcgaggaguuacgcucagguuaugaaaccuucaaagucauuggaggcugguccaaaccuaauuccaaauugcagauaaauaggcaagucauaguugacagagguaauagguccgguuauucugguauuuucucuguugaaggcaaaagcugcaucaaucggugcuuuuauguggaguugauaaggggaaggaaacaggaaacugaagucugguggaccucaaacaguauuguuguguuuuguggcaccucagguacauauggaacaggcucauggccugauggggcggacaucaaucucaugccuauauaa

SEQ ID NO: 53959 - RNA, 1410 nt, Artificial Sequence
  derived and/or modified CDS sequence (wt) from neuraminidase__InfluenzaA__AFG72606
augaauccaaaucaaaagauaauaacaauuggcucuguuucucucacuauugccacaauaugcuuccuuaugcaaauugccauccugguaacuacuguaacauugcauuucaagcaauaugaaugcaacucccccccaaacaaccaaguaaugcuaugugaaccaacaauaauagaaagaaacauaacagagauaguguaucugaccaacaccaccauagagaaagaaauaugccccaaacuagcagaauacagaaauuggucaaagccgcaauguaaaauuacaggauuugcaccuuuuucuaaggacaauucaauucggcuuuccgcugguggagacauuugggugacaagagaaccuuaugugucaugcgauccuggcaaguguuaucaauuugcccuuggacagggaacaacacuaaacaacaggcauucaaaugacacaguacaugauaggaccccuuaucgaacccuauugaugaaugaguuggguguuccauuucauuugggaaccaagcaagugugcauagcaugguccagcucaaguugucacgauggaaaagcauggcugcauguuuguguaacugggcaugaugaaaaugcaacugcuagcuucauuuacgaugggaggcuuguagauaguauugguucaugguccaaaaauauccucaggacccaggagucggaaugcguuuguaucaauggaacuuguacagugguaaugacugauggaagugcuucagaaagagcugauacuaaaauacuauucauugaagaggggaaaaucguucauauuagcccauugucaggaagugcucagcaugucgaggagugcuccuguuauccucgauauccuggugucagaugugucugcagagacaacuggaaaggcuccaauaggcccaucguagauauaaaugugaaagaucauagcauuguuuccaguuaugugugcucaggacuuguuggagacacacccagaaaaaacgacagcuccagcaguagcuauugccugaauccuaacaaugaggaagggggucauggagugaaaggcugggccuuugaugauggaaaugacguguggaugggaagaacgaucagcgagaaguuacgcucagguuaugaaaccuucaaggucauuggaggcugguccaaaccuaacuccaaauugcagauaaauaggcaagucauaguugacagagguaauagguccgguuauucugguauuuucucuguugaaggcaaaagcugcgucaaucggugcuuuuauguggaguugauaaggggaaggaaacaggaaacugaagucugguggaccucaaacaguauuguuguguuuugcggcaccucagguacauauggaacaggcucauggccugauggggcggacauaaaucucaugccuauauaa

SEQ ID NO: 53960 - RNA, 1410 nt, Artificial Sequence
  derived and/or modified CDS sequence (wt) from neuraminidase__InfluenzaA__AFG72617
augaauccaaaucaaaagauaauaacaauuggcucuguuucucucacuauuaccacaauaugcuuccuuaugcaaauugccauccuaguaauuacuguaacauugcauuucaagcaaugugaaugcaacucccccccaaacaaccaaguaaugcugugugaaccaacaauaauagaaagaaacauaacagagauaguguaucugaccaacaccaccauagagaaagaaauaugccccaaacuagcagaauacagaaauuggucaaagccgcaauguaaaauuacaggauuugcaccuuuuucuaaggacaauucaauucggcuuuccgcugguggagacauuugggugacaagagaaccuuaugugucaugcgauccuggcaaguguuaucaauuugcccuuggacagggaacaacacuaaacaacaggcauucaaaugacacaguacaugauaggaccccuuaucgaacccuauugaugaaugaguuggguguuccauuucauuugggaaccaagcaagugugcauagcaugguccagcucaaguugucacgauggaaaagcauggcugcauguuuguguaacugggcauaaugaaaaugcaacugcuagcuucauuuacgaugggaggcuuguagauaguauugguucaugguccaaaaauauccucaggacccaggagucggaaugcguuuguaucaauggaacuuguacaguaguaaugacugauggaagugcuucaggaagagcugauacuaaaauacuauucauugaagaggggaaaaucguucauauuagcccauugucaggaagugcucagcaugucgaggagugcuccuguuauccucgauauccuggugucagaugugucugcagagacaacuggaaaggcuccaauaggcccaucguagauauaaaugugaaagauuauagcauuguuuccaguuaugugugcucaggacuuguuggagacacacccagaaaaaacgacagcuccagcaguagcuauugccugaauccuaacaaugaggaagggggucauggagugaaaggcugggccuuugaugauggaaaugauguguggaugggaagaacgaucagcgagaaguuacgcucagguuaugaaaccuucaaagucauuggaggcugguccaaaccuaacuccaaauugcagauaaauaggcaagucauaguugacagagguaauagguccgguuauucugguauuuucucuguugaaggcaaaagcugcaucaaucggugcuuuuauguggaguugauaaggggaaggaaacaggaaacugaagucugguggaccucaaacaguauuguuguguuuuguggcaccucagguacauauggaacaggcucauggccugauggggcggacaucaaucucaugccuauauaa

SEQ ID NO: 53961 - RNA, 1410 nt, Artificial Sequence
  derived and/or modified CDS sequence (wt) from neuraminidase__InfluenzaA__AFG72628
augaauccaaaucaaaagauaauaacuauuggcucuguuucucucacuauugccacaauaugcuuccuuaugcaaauugccauccugguaacuacuguaacauuacauuucaagcaauaugaaugcaacucccccccaaacaaccaaguaaugcugugugaaccaacaauaauagaaagaaacauaacagagauaguguaucugaccaacaccaccauagagaaggaaauaugccccaaacuagcagaauacagaaauuggucaaagccgcaauguaaaauuacaggauuugcaccuuuuucuaaggacaauucaauucggcuuuccgcugguggggacauuugggugacaagagaaccuuaugugucaugcgauccugacaaguguuaucaauuugcccuuggacagggaacaacacuaaacaacaggcauucaaaugacacaguacaugauaggaccccuuaucgaacccuauugaugaaugaguuggguguuccauuucauuugggaaccaagcaagugugcauagcaugguccagcucaaguugucacgauggaaaagcauggcugcauguuuguguaacugggcaugaugaaaaugcaacugcuagcuucauuuacgaugggaggcuuguagauaguauugguucaugguccaaaaaaauccucaggacccaggagucggaaugcguuuguaucaauggaacuuguacaguaguaaugacugauggaagugcuucaggaagagcugauacuaaaauacuauucauugaagaggggaaaaucguucauauuagcccauugucaggaagugcucagcaugucgaggagugcuccuguuauccucgauauucuggugucagaugugucugcagagacaacuggaaaggcuccaauaggcccaucguagauauaaaugugaaagauuauagcauuguuuccaguuaugugugcucaggacuuguuggagacacacccagaaaaaacgacagcuccagcaguagccauugccugaauccuaacaaugaggaagggggucauggagugaaaggcugggccuuugaugauggaaaugacguguggaugggaagaacgaucagcgagaaguuacgcucagguuaugaaaccuucaaagucauuggaggcugguccaaaccuaacuccaaauugcagauaaauaggcaagucauaguugacagagguaauagguccgguuauucugguauuuucucuguugaaggcaaaagcugcaucaaucggugcuuuuauguggaguugauaaggggaaggaaacaggaaacugaagucugguggaccucaaacaguauuguuguguuuuguggcaccucagguacauauggaacaggcucauggccugauggggcggacaucaaucucaugccuauauaa

SEQ ID NO: 53962 - RNA, 1410 nt, Artificial Sequence
  derived and/or modified CDS sequence (wt) from neuraminidase__InfluenzaA__AFG72639
augaauccaaaucaaaagauaauaacaauuggcucuguuucucucacuauugccacaauaugcuuccuuaugcaaauugccauccugguaacuacuguaacauuacauuucaagcaauaugaaugcaacucccccccaaacaaccaaguaaugcugugugaaccaacaauaauagagagaaacauaacagagauaguguaucugaccaacaccaccauagagaaagaaauaugccccaaacuagcagaauacagaaauuggucaaagccgcaauguaaaauuacaggauuugcaccuuuuuccaaggacaauucaauucggcuuuccgcugguggagacauuugggugacaagagaaccuuaugugucaugcgauccuggcaaguguuaucaauuugcccuuggacagggaacaacacuaaacaacaggcauucaaaugacacaguacaugauaggaccccuuaucgaacccuauugaugaaugaguuggguguuccauuucauuugggaaccaagcaagugugcauagcaugguccagcucaaguugucacgauggaaaagcauggcugcauguuuguguaacugggcaugaugaaaaugcaacugcuagcuucauuuacgaugggaggcuuguagauaguauugguucaugguccaaaaauauccucaggacccaggagucggaaugcguuugcaucaauggaacuuguacaguaguaaugacugauggaagugcuucaggaagagcugauacuaaaauacuauucauugaagaggggaaaaucguucauauuagcccauugucaggaagugcucagcaugucgaggagugcuccuguuauccucgauauccuggugucagaugugucugcagagacaacuggaaaggcuccaauaggcccaucguagauauaaaugugaaagauuauagcauuguuuccaguuaugugugcucaggacuuguuggagacacacccagaaaaaacgacagcuccagcaguagcuauugccugaauccuaacaaugaggaagggggucauggagugaaaggcugggccuuugaugauggaaaugauguguggaugggaagaacgaucagcgagaaguuacgcucagguuaugaaaccuucaaagucauuggaggcugguccaaaccuaacuccaaauugcagauaaauaggcaagucauaguugacagagguaauagguccgguuauucugguauuuucucuguugaaggcaaaagcugcaucaaucggugcuuuuauguggaguugauaaggggaaggaaacaggaaacugaagucugguggaccucaaacaguauuguuguguuuuguggcaccucagguacauauggaacaggcucauggccugauggggcggacaucaaucucaugccuauauaa

SEQ ID NO: 53963 - RNA, 1410 nt, Artificial Sequence
  derived and/or modified CDS sequence (wt) from neuraminidase__InfluenzaA__AFG72650
augaauccaaaucaaaagauaauaacaauuggcucuguuucucucacuauugccacaauaugcuuccuuaugcaaauugccauccugguaacuacuguaacauugcauuucaagcaauaugaaugcaacucccccccaaacaaccaaguaaugcugugugaaccaacaauaauagaaagaaacauaacagagauaguguaucugaccaacaccaccauagagaaagaaauaugccccaaacuagcagaauacagaaauuggucaaagccgcaauguaaaauuacaggauuugcaccuuuuucuaaggacaauucaauucggcuuuccgcugguggagacauuugggugacaagagaaccuuaugugucaugcgauccuggcaaguguuaucaauuugcccuuggacagggaacaacacuaaacaacaggcauucaaaugacacagugcaugauaggaccccuuaucgaacccuauugaugaaugaguuggguguuccauuucauuugggaaccaagcaagugugcauagcaugguccagcucaaguugucacgauggaaaagcauggcugcauguuuguguaacugggcaugaugaaaaugcaacugcuagcuucauuuacgaugggaggcuuguagauaguauugguucaugguccaaaaauauccucaggacccaggagucggaaugcguuuguaucaauggaacuuguacaguaguaaugacugauggaagugcuucagaaagagcugauacuaaaauacuauucauugaagaggggaaaaucguucauauuagcccauugucaggaagugcucagcaugucgaggagugcuccuguuauccucgauauccuggugucagaugugucugcagagacaacuggaaaggcuccaauaggcccaucguagauauaaaugugaaagauuauagcauuguuuccaguuaugugugcucaggacuuguuggagacacacccagaaaaaacgacagcuccagcaguagcuauugccugaauccuaacaaugaggaagggggucauggagugaaaggcugggccuuugaugauggaaaugacguguggaugggaagaacgaucagcgagaaguuacgcucagguuaugaaaccuucaaggucauuggaggcugguccaaaccuaacuccaaauugcagauaaauaggcaagucauaguugacagagguaauagguccgguuauucugguauuuucucuguugaaggcaaaagcugcgucaaucggugcuuuuauguggaguugauaaggggaaggaaacaggaaacugaagucugguggaccucaaacaguauuguuguguuuuguggcaccucagguacauauggaacaggcucauggccugauggggcggacaucaaucucaugccuauauaa

SEQ ID NO: 53964 - RNA, 1410 nt, Artificial Sequence
  derived and/or modified CDS sequence (wt) from neuraminidase__InfluenzaA__AFG72672
augaauccaaaucaaaagauaauaacuauuggcucuguuucucucacuauugccacaauaugcuuccuuaugcaaauugccauccugguaacuacuguaacauuacauuucaagcaauaugaaugcaacucccccccaaacaaccaaguaaugcugugugaaccaacaauaauagaaagaaacauaacagagauaguguaucugaccaacaccaccauagagaaggaaauaugccccaaacuagcagaauacagaaauuggucaaagccgcaauguaaaauuacaggauuugcaccuuuuucuaaggacaauucaauucggcuuuccgcugguggggacauuugggugacaagagaaccuuaugugucaugcgauccugacaaguguuaucaauuugcccuuggacagggaacaacacuaaacaacaggcauucaaaugacacaguacaugauaggaccccuuaucgaacccuauugaugaaugaguuggguguuccauuucauuugggaaccaagcaagugugcauagcaugguccagcucaaguugucacgauggaaaagcauggcugcauguuuguguaacugggcaugaugaaaaugcaacugcuagcuucauuuacgaugggaggcuuguagauaguauugguucaugguccaaaaaaauccucaggacccaggagucggaaugcguuuguaucaauggaacuuguacaguaguaaugacugauggaagugcuucaggaagagcugauacuaaaauacuauucauugaagaggggaaaaucguucauauuagcccauugucaggaagugcucagcaugucgaggagugcuccuguuauccucgauauucuggugucagaugugucugcagagacaacuggaaaggcuccaauaggcccaucguagauauaaaugugaaagauuauagcauuguuuccaguuaugugugcucaggacuuguuggagacacacccagaaaaaacgacagcuccagcaguagccauugccugaauccuaacaaugaggaagggggucauggagugaaaggcugggccuuugaugauggaaaugacguguggaugggaagaacgaucagcgagaaguuacgcucagguuaugaaaccuucaaagucauuggaggcugguccaaaccuaacuccaaauugcagauaaauagacaagucauaguugacagagguaauagguccgguuauucugguauuuucucuguugaaggcaaaagcugcaucaaucggugcuuuuauguggaguugauaaggggaaggaaacaggaaacugaagucugguggaccucaaacaguauuguuguguuuuguggcaccucagguacauauggaacaggcucauggccugauggggcggacaucaaucucaugccuauauaa

SEQ ID NO: 53965 - RNA, 1407 nt, Artificial Sequence
  derived and/or modified CDS sequence (wt) from neuraminidase__InfluenzaA__AFG72683
augaauccaaaucaaaagauaauaacaauuggcucuguuucucucacuauugccacaauaugcuuccuuaugcaaauugccauccugguaauuacuguaacauugcauuucaagcaauaugaaugcaacucccccccaaacaaccaaguaaugcugugugaaccaacaauaauagaaagaaacauaacagagauaguguaucugaccaacaccaccauagagaaagaaauaugccccaaacuagcagaauacagaaauuggucaaagccgcaauguaaaauuacaggauuugcaccuuuuucuaaggacaauucaauucggcuuuccgcugguggagacauuugggugacaagagaaccuuaugugucaugcgauccuggcaaguguuaucaauuugcccuuggacagggaacaacacuaaacaacaggcauucaaaugaaguacaugauaggaccccuuaucgaacccuauugaugaaugaguuggguguuccauuucauuugggaaccaagcaagugugcauagcaugguccagcucaaguugucacgauggaaaagcauggcugcauguuuguguaacugggcauaaugaaaaugcaacugcuagcuucauuuacgaugggaggcuuguagauaguauugguucaugguccaaaaauauccucaggacccaggagucggaaugcguuuguaucaauggaacuuguacaguaguaaugacugauggaagugcuucaggaagagcugauacuaaaauacuauucauugaagaggggaaaaucguucauaucagcccauugucaggaagugcucagcaugucgaggagugcuccuguuauccucgauauccuggugucagaugugucugcagagacaacuggaaaggcuccaauaggcccaucguagauauaaaugugaaagauuauagcauuguuuccaguuaugugugcucaggacuuguuggagacacacccagaaaaaacgacagcuccagcaguagccauugccugaauccuaacaaugaggaagggggucauggagugaaaggcugggccuuugaugauggaaaugauguguggaugggaagaacgaucagcgagaaguuacgcucagguuaugaaaccuucaaagucauuggaggcugguccaaaccuaacuccaaauugcagauaaauaggcaagucauaguugacagagguaauagguccgguuauucugguauuuucucuguugaaggcaaaagcugcaucaaucggugcuuuuauguggaguugauaaggggaaggaaacaggaaacugaagucugguggaccucaaacaguauuguuguguuuuguggcaccucagguacauauggaacaggcucauggccugauggggcggacaucaaucucaugccuauauaa

SEQ ID NO: 53966 - RNA, 1410 nt, Artificial Sequence
  derived and/or modified CDS sequence (wt) from neuraminidase__InfluenzaA__AFG72705
augaauccaaaucaaaagauaauaacgauuggcucuguuucucucacuauugccacaauaugcuuccuuaugcaaauugccauccugguaacuacuguaacauugcauuucaagcaauaugaaugcaacucccccccaaacaaccaaguaaugcugugugaaccaacaauaauagaaagaaacauaacagagauaguguaucugaccaacaccaccauagagaaggaaauaugccccaaacuagcagaauacagaaauuggucaaagccgcaauguaaaauuacaggauuugcaccuuuuucaaaggacaauucaauucggcuuuccgcugguggggacauuugggugacaagagaaccuuaugugucaugcgauccugacaaguguuaucaauuugcccuuggacagggaacaacacuaaacaacaggcauucaaaugacacaguacaugauaggaccccuuaucgaacccuauugaugaaugaguuggguguuccauuucauuugggaaccaagcaagugugcauagcaugguccagcucaaguugucacgauggaaaagcauggcugcauguuuguguaacugggcaugaugaaaaugcaacugcuagcuucauuuacgaugggaggcuuguagauaguauugguucaugguccaaaaaaauccucaggacccaggagucggaaugcguuuguaucaauggaacuuguacaguaguaaugacugaugggagugcuucaggaagagcugauacuaaaauacuauucauugaggaggggaaaaucguucauauuagccaauugucaggaagugcucagcaugucgaggagugcuccuguuauccucgauauccuggugucagaugugucugcagagacaacuggaaaggcuccaauaggcccaucguagauauaaauguaaaggaucauagcauuguuuccaguuaugugugcucaggacuuguuggagacacacccagaaaaaacgacagcuccagcaguagccauugccugaauccuaacaaugaagaagggggucauggagugaaaggcugggccuuugaugauggaaaugacguguggaugggaagaacgaucagcgagaaguuacgaucagguuaugaaaccuucaaagucauugaaggcugguccaaaccuaacuccaaauugcagauaaauaggcaagucauaguugacagagguaauagguccgguuauucugguauuuucucuguugaaggcaaaagcugcaucaaucggugcuuuuauguggaguugauaaggggaaggaaacaggaaacugaaguaugguggaccucaaacaguauuguuguguuuuguggcaccucagguacauauggaacaggcucauggccugauggggcggacaucaaucucaugccuauauaa

SEQ ID NO: 53967 - RNA, 1410 nt, Artificial Sequence
  derived and/or modified CDS sequence (wt) from neuraminidase__InfluenzaA__AFG72716
augaauccaaaucaaaagauaauaacaauuggcucuguuucucucacuauuaccacaauaugcuuccuuaugcaaauugccauccugguaauuacuguaacauugcauuucaagcaaugugaaugcaacucccccccaaacaaccaaguaaugcugugugaaccaacaauaauagaaagaaacauaacagagauaguguaucugaccaacaccaccauagagaaagaaauaugccccaaacuagcagaauacagaaauuggucaaagccgcaauguaaaauuacaggauuugcaccuuuuucuaaggacaauucaauucggcuuuccgcugguggagacauuugggugacaagagaaccuuaugugucaugcgauccuggcaaguguuaucaauuugcccuuggacagggaacaacacuaaacaacaggcauucaaaugacacaguacaugauaggaccccuuaucgaacccuauugaugaaugaguuggguguuccauuucauuugggaaccaagcaagugugcauagcaugguccagcucaaguugucacgauggaaaagcauggcugcauguuuguguaacuggacauaaugaaaaugcaacugcgagcuucauuuacgaugggaggcuuguagauaguauugguucaugguccaaaaauauccucaggacccaggagucggaaugcguuuguaucaauggaacuuguacaguaguaaugacugauggaagugcuucaggaagagcugauacuaaaauacuauucauugaagaggggaaaaucguucauauuagcccauugucaggaagugcucagcaugucgaggagugcuccuguuauccucgauauccuggugucagaugugucugcagagacaacuggaaaggcuccaauaggcccaucguagauauaaaugugaaagauuauagcauuguuuccaguuaugugugcucaggacuuguuggagacacacccagaaaaaacgacagcuccagcaguagcuauugccuggauccuaacaaugaggaagggggucauggagugaaaggcugggccuuugaugauggaaaugauguguggaugggaagaacgaucagcgagaagucacgcucagguuaugaaaccuucaaagucauuggaggcugguccaaaccuaacuccaaauugcagauaaauaggcaagucauaguugacagagguaauagguccgguuauucugguauuuucucuguugaaggcaaaagcugcaucaaucggugcuuuuauguggaguugauaaggggaaggagacaggaaacugaagucugguggaccucaaacaguauuguuguguuuuguggcaccucagguacauauggaacaggcucauggccugauggggcggacaucaaucucaugccuauauaa

SEQ ID NO: 53968 - RNA, 1410 nt, Artificial Sequence
  derived and/or modified CDS sequence (wt) from neuraminidase__InfluenzaA__AFG72738
augaauccaaaucaaaagauaauaacaauuggcucuguuucucucacuauuaccacaauaugcuuccuuaugcaaauugccauccugguaauuacuguaacauugcauuucaagcaaugugaaugcaacucccccccaaacaaccaaguaaugcugugugaaccaacaauaauagaaagaaacauaacagagauaguguaucugaccaacaccaccauagagaaagaaauaugccccaaacuagcagaauacagaaauuggucaaagccgcaauguaaaauuacaggauuugcaccuuuuucuaaggacaacucaauucggcuuuccgcugguggagacauuugggugacaagagaaccuuaugugucaugcgauccuggcaaguguuaucaauuugcccuuggacagggaacaacacuaaacaacaggcauucaaaugacacaguacaugauaggaccccuuaucgaacccuauugaugaaugaguuggguguuccauuucauuugggaaccaagcaagugugcauagcaugguccagcucaaguugucacgauggaaaagcauggcugcauguuuguguaacugggcauaaugaaaaugcaacugcgagcuucaucuacgaugggaggcuuguagauaguauugguucaugguccaaaaauauccucaggacccaggagucggaaugcguuuguaucaauggaacuuguacaguaguaaugacugauggaagugcuucaggaagagcugauacuaaaauacuauucauugaagaggggaaaaucguucauauuagccaauugucaggaagugcucagcaugucgaggagugcuccuguuauccucgauauccuggugucagaugugucugcagagacaacuggaaaggcucuaauaggcccaucguagauauaaaugugaaagauuauagcauuguuuccaguuauguaugcucaggacuuguuggagacacacccagaaaaaacgacagcuccagcaguagcuauugccuggauccuaacaaugaggaagggggucauggagugaaaggcugggccuuugaugauggaaaugauguguggaugggaagaacgaucagcgagaaguuacgcucagguuaugaaaccuucaaagucauuggaggcugguccaaaccuaacuccaaauugcagauaaauaggcaagucauaguugacagagguaauagguccgguuauucugguauuuucucuguugaaggcaaaagcugcaucaaucggugcuuuuauguggaguugauaaggggaaggaaacaggaaacugaagucugguggaccucaaacaguauuguuguguuuuguggcaccucagguacauauggaacaggcucauggccugauggggcggacaucaaucucaugccuauauaa

SEQ ID NO: 53969 - RNA, 1410 nt, Artificial Sequence
  derived and/or modified CDS sequence (wt) from neuraminidase__InfluenzaA__AFG72749
augaauccaaaucaaaagauaauaacaauuggcucuguuucucucacuauugccacaauaugcuuccuuaugcaaauugccauccugguaacuacuguaacauugcauuucaagcaauaugagugcaacucccccccaaacaaccaaguaaugcugugugaaccaacaauaauagaaagaaacauaacagagauaguguauuugacuaacaccaccauagagaaagaaauaugccccaaacuggcagaauacagaaauuggucaaagccgcaauguaaaauuacaggauuugcaccuuuuucuaaggacaauucaauucggcuuuccgcugguggagacauuugggugacaagagaaccuuaugugucaugcgauccuggcaaguguuaucaauuugcacuuggacagggaacaacacuaaacaacaggcauucaaaugacacaguacaugauaggaccccuuaucgaacccuauugaugaaugaguuggguguuccauuucauuugggaaccaagcaagugugcauagcaugguccagcucaaguugucacgauggaaaagcauggcugcauguuuguguaacugggcaugaugaaaaugcaacugcuagcuucauuuacgaugggaggcuuguagauaguauugguucaugguccaaaaauauccucaggacccaggagucggaaugcguuuguaucaauggaacuuguacaguaguaaugacugauggaagugcuucagaaagagcugauacuaaaauacuauucauugaagaggggaaaaucguucauauuagcccauugucaggaagugcucagcaugucgaggagugcuccuguuauccucgauauccuggugucagaugugucugcagagacaacuggaaaggcuccaauaggcccaucguagauauaaaugugaaagauuauagcauuguuuccaguuaugugugcucaggacuuguuggagacacacccagaaaaaacgacagcuccagcaguagcuauugccggaauccuaacaaugagaaagggagucauggagugaaaggcugggccuuugaugauggaaaugacguguggaugggaagaacgaucagcgaggaguuacgcucagguuaugaaaccuucaaagucauuggaggcugguccaaaccuaacuccaaauugcagauaaauaggcaagucauaguugacagagguaauagguccgguuauucugguauuuucucuguugaaggcaaaagcugcaucaaucggugcuuuuauguggaguugauaaggggaaggaaacaggaaacugaagucugguggaccucaaacaguauuguuguguuuuguggcaccucagguacauauggaacaggcucauggccugauggggcggacaucaaucucaugccuauauaa

SEQ ID NO: 53970 - RNA, 1410 nt, Artificial Sequence; identical to SEQ ID NO: 48725
  derived and/or modified CDS sequence (wt) from neuraminidase__InfluenzaA__AFG72760

SEQ ID NO: 53971 - RNA, 1410 nt, Artificial Sequence; identical to SEQ ID NO: 46071
  derived and/or modified CDS sequence (wt) from neuraminidase__InfluenzaA__AFG72771

SEQ ID NO: 53972 - RNA, 1410 nt, Artificial Sequence
  derived and/or modified CDS sequence (wt) from neuraminidase__InfluenzaA__AFG72782
augaauccaaaucaaaagauaauaacgauuggcucuguuucucucacuauugccacaauaugcuuccuuaugcaaauugccauccugguaacuacuguaacauugcauuucaagcaauaugaaugcaacucucucccaaacaaccaaguaaugcugugugaaccaacaauaauagaaagaaacauaacagagauaguguaucugaccaacaccaccauagagaaggaaauaugccccaaacuagcagaauacagaaauuggucaaagccgcaauguaaaauuacaggauuugcaccuuuuucuaaggacaauucaauucggcuuuccgcugguggggacauuugggugacaagagaaccuuaugugucaugcgauccugacaaguguuaucaauuugcccuuggacagggaacaacacuaaacaacaggcauucaaaugacacaguacaugauaggaccccuuaucgaacccuauugaugaaugaguuggguguuccauuucauuugggaaccaagcaagugugcauagcaugguccagcucaaguugucacgauggaaaagcauggcugcauguuuguguaacugggcacgaugaaaaugcaacugcuagcuucauuuacgaugggaggcuuguagauaguauugguucaugguccaaaaaaauccucaggacccaggagucggaaugcguuuguaucaauggaacuuguacaguaguaaugacugaugggagugcuucaggaagagcugauacuaaaauacuauucauugaggaggggaaaaucauucauacuagccaauugucaggaagugcucagcaugucgaggagugcucauguuauccucgauauccuggugucagaugugucugcagagacaacuggaaaggcuccaauaggcccauuguagauauaaauguaaaggauuauagcauuguuuccaguuaugugugcucaggacuuguuggagacacacccagaaaaaacgacagcuccagcaguagccauugccugaauccuaacaaugaggaagggggucauggagugaaaggcugggccuuugaugauggaaaugacguguggaugggaagaacgaucagcgagaaauuccgcucagguuaugaaaccuucaaagucauugaaggcugguccaaaccuaacuccaaauugcagauaaauaggcaagucauaguugacagagauaauagguccgguuauucugguauuuucucuguugaaggcaaaagcugcaucaaucggugcuuuuauguggaguugauaaggggaaggaaacaggaaacugaagucugguggaccucaaacaguauuguuguguuuuguggcaccucagguacauauggaacaggcucauggccugauggggcggacaucaaucucaugccuauauaa

SEQ ID NO: 53973 - RNA, 1410 nt, Artificial Sequence
  derived and/or modified CDS sequence (wt) from neuraminidase__InfluenzaA__AFG72793
augaauccaaaucaaaagauaauaacgauuggcucuguuucucucaccauugccacaauaugcuuccuuaugcaaauugccauccugguaacuacuguaacauugcauuucaagcaauaugaaugcaacucccccccaaacaaccaagugaugcugugugaaccaacaauaauagaaagaaacauaacagagauaguguaucugaccaacaccaccauagagaaggaaauaugccccaaacuagcagaauacagaaauuggucaaagccgcaauguaacauuacaggauuugcaccuuuuucuaaggacaauucgauucggcuuuccgcugguggggacaucugggugacaagagaaccuuaugugucaugcgauccugacaaguguuaucaauuugcccuuggacagggaacaacacuaaacaacgggcauucaaaugacacaguacaugauaggaccccuuaucggacccuauugaugaaugaguuggguguuccauuucauuugggaaccaagcaagugugcauagcaugguccagcucaaguugucacgauggaaaagcauggcugcauguuuguguaacgggggaugaugaaaaugcaacugcuagcuucauuuacaaugggaggcuuguagauaguauugguucaugguccaaaaaaauccucaggacccaggagucggaaugcguuuguaucaauggaacuuguacaguaguaaugacugaugggagugcuucaggaaaagcugauacuaaaauacuauucauugaggaggggaaaaucguucauacuagcccauugucaggaagugcucagcaugucgaggaaugcuccuguuauccucgauauccuggugucagaugugucugcagagacaacuggaaaggcuccaauaggcccaucguagauauaaauguaaaggauuauagcauuguuuccaguuaugugugcucaggacuuguuggagacacacccagaaaaaacgacagcuccagcaguagccauugcuuggauccuaacaaugaggaagguggucauggagugaaaggcugggccuuugaugauggaaaugacguguggaugggaagaacgaucagcgagaaguuacgcucaggauaugaaaccuucaaagucauugaaggcugguccaaacccaacuccaaauugcagauaaauaggcaagucauaguugacagagguaauagguccgguuauucugguauuuucucuguugaaggcaaaagcugcaucaaucggugcuuuuauguggaguugauaaggggaaggaaacaggaaacugaagucuuguggaccucaaacaguauuguuguguuuuguggcaccucagguacauauggaacaggcucauggccugauggggcggacaucaaucucaugccuauauaa

SEQ ID NO: 53974 - RNA, 1410 nt, Artificial Sequence; identical to SEQ ID NO: 48483
  derived and/or modified CDS sequence (wt) from neuraminidase__InfluenzaA__AFG72804

SEQ ID NO: 53975 - RNA, 1410 nt, Artificial Sequence; identical to SEQ ID NO: 53783
  derived and/or modified CDS sequence (wt) from neuraminidase__InfluenzaA__AFG72826

SEQ ID NO: 53976 - RNA, 1410 nt, Artificial Sequence
  derived and/or modified CDS sequence (wt) from neuraminidase__InfluenzaA__AFG72837
augaauccaaaucaaaagauaauaacaauuggcucuguuucucucaccauugccacaauaugcuuccuuaugcaaauugccauccugguaacuacuguaacauugcauuucaagcaguaugaaugcaacucccccccaaacaaccaaguaaugcugugugaaccaacaauaauagaaagaaacauaacagagauaguguaucugaccaacaccaccauagagaaggaaauaugccccaaacuagcagaauacagaaauuggucaaagccgcaauguaacauuacaggauuugcaccuuuuucuaaggacaauucgauucggcuuuccgcugguggggacaucugggugacaagagaaccuuaugugucaugcgauccugacaaguguuaucaauuugcccuugggcagggaacaacacuaaacaacgggcauucaaaugacacaguacaugagaggaccccuuaccggacccuauugaugaaugaguuggguguuccauuucauuugggaaccaagcaagugugcauagcaugguccagcucaaguugucacgauggaaaagcauggcugcauguuuguguaacuggggaugaugaaaaugcaacugcuagcuucauuuacaaugggaggcuuguagauaguauugguucaugguccaaaaaaauacucaggacccaggagucggaaugcguuuguaucaauggaacuuguacaguaguaaugacugaugggagcgcuucaggaaaagcugauacuaaaauacuauucauugaggaggggaaaaucguucauauuagcacauugucaggaagugcucagcaugucgaggagugcuccuguuauccucgauauccuggugucagaugugucugcagagacaacuggaaaggcuccaauaggcccaucguagauauaaauguaaaggauuauagcauuguuuccaguuaugugugcucaggacuuguuggagacacacccagaaaaaacgacagcuucagcaguagccauugccuagauccuaacaaugaggaagguggucauggagugaaaggcugggccuuugaugauggaaaugacguguggauggggagaacgaucagcgagaaguuacgcucagguuaugaaaccuucaaagucaucgagggcugguccaaaccuaacuccaaauuacagauaaauaggcaagucauaguugaaagagguaacagguccgguuauucugguauuuucuccguugaaggcaaaagcugcaucaaucggugcuuuuauguggaguugauaaggggaaggaaagaggaaacugaagucugguggaccucaaacaguauuguuguguuuuguggcaccucagguacauauggaacaggcucauggccugauggggcggauaucaaucucaugccuauauaa

SEQ ID NO: 53977 - RNA, 1413 nt, Artificial Sequence
  derived and/or modified CDS sequence (wt) from neuraminidase__InfluenzaA__AFG72848
augaauccaaaucaaaagauaauaacaauuggcucuguuucucucaccauugccacaauaugcuuccuuaugcaaauugccauccugguaacuacuguaacauugcauuucaagcaguaugaaugcaacucccccccaaacaaccaaguaaugcugugugaaccaacaauaauagaaagaaacauaacagagauaguguaucugaccaauaccacuauagagaaggaaauaugccccaaaucagcagaauacagaaauuggucaaagccgcaauguaacauuacaggauuugcaccuuuuucuaaggacaauucgauucggcuuuccgcugguggggacaucugggugacaagagagccuuaugugucaugcgauccugacaaguguuaucaauuugcccuugggcagggaacaacacuaaacaacgggcauucaaaugacacaguacaugauaggaccccuuaccggacccuauugaugaaugaauuggguguuccauuucauuugggaaccaggcaagugugcauagcaugguccagcucaaguugucacgauggaaaagcauggcugcauguuuguguaacuggggaugauaaaaaugcaacugcuaguuucauuuacaaugggaggcuuguagauaguauugguucaugguccaaaaaauauauacucagaacccaggagucggaaugcguuuguaucaauggaacuuguacaguaguaaugacugaugggagcgcuucaggaaaagcugauacuaaaauacuauucauugaggaggggaaaaucauucauauuagcacauugucaggaagugcucagcaugucgaggagugcuccuguuauccucgauauccuggugucagauguguaugcagagacaacuggaaaggcuccaauaggcccaucguagauauaaauguaaaggauuauagcauuguuuccaguuaugugugcucaggacuuguuggagacacacccagaaaaaacgacagcuccagcaguagccauugccuagauccuaacaaugaggaagguggucauggagugaaaggcugggccuuugaugauggaaaugacguguggaugggaagaacgaucagcgagaaguuacgcucagguuaugaaaccuucaaagucaucgaaggcugguccaaaccuaacuccaaauuacagauaaauaggcaagucauaguugaaagagguaacagguccgguuauucugguauuuucuccguugaaggcaaaagcugcaucaaucggugcuuuuauguggaguugauaaggggaaggaaagaggaaacugaagucugguggaccucaaacaguauuguuguguuuuguggcaccucagguacauauggaacaggcucauggccugauggggcggauaucaaucucaugccuauauaa

SEQ ID NO: 53978 - RNA, 1410 nt, Artificial Sequence
  derived and/or modified CDS sequence (wt) from neuraminidase__InfluenzaA__AFG72859
augaauccaaaucaaaagauaauaacgauuggcucuguuucucucaccauuuccacaauaugcuucuucaugcaaauugccauccugauaacuacuguaacauugcauuucaagcaauaugaauucaacucccccccaaacaaccaagugaugcugugugaaccaacaauaauagaaagaaacauaacagagauaguguaucugaccaacaccaccauagagaaggaaauaugccccaaacuagcagaauacagaaauuggucaaagccgcaauguaacauuacaggauuugcaccuuuuucuaaggacaauucgauucggcuuuccgccgguggggacaucugggugacaagagaaccuuaugugucaugcgauccugacaaguguuaucaauuugcccuuggacagggaacaacacuaaacaacgugcauucaaaugacauaguacaugauaggaccccuuaucggacccuauugaugaaugaguuggguguuccauuucaucuggggaccaagcaagugugcauagcaugguccagcucaaguugucacgauggaaaagcauggcugcauguuuguguaacgggggaugaugaaaaugcaacugcuagcuucauuuacaaugggagacuuguagauaguauuguuucaugguccaaaaaaauccucaggacccaggagucagaaugcguuuguaucaauggaacuuguacaguaguaaugacugaugggagugcuucaggaaaagcugauacuaaaauacuauucauugaggaggggaaaaucguucauacuagcacauugucaggaagugcucagcaugucgaggaguguuccuguuauccucgauauccuggugucagaugugucugcagagacaauuggaaaggcuccaauaggcccaucguagauauaaacauaaaggauuauagcauuguuuccaguuaugugugcucaggacuuguuggagacacacccagaaaaaacgacagcuccagcaguagccauugcuuggauccaaacaaugaggaagguggucauggagugaaaggcugggccuuugaugauggaaaugacguguggaugggaagaacgaucagcgagaaguuacgcucaggauacgaaaccuucaaagucauugaaggcugguccaacccuaacuccaaauugcagauaaauaggcaagucauaguugacagagguaauagguccgguuauucugguauuuucucuguugaaggcaaaagcugcaucaaucggugcuuuuauguggaguugauaagaggaagaaaacaggaaacugaagucuuguggaccucaaacaguauuguuguguuuuguggcaccucagguacauauggaacaggcucauggccugauggggcggacaucaaucucaugccuauauaa

SEQ ID NO: 53979 - RNA, 1410 nt, Artificial Sequence
  derived and/or modified CDS sequence (wt) from neuraminidase__InfluenzaA__AFG72870
augaauccaaaucaaaagauaauaacaauuggcucuguuucucucaccauugccacaauaugcuuccuuaugcaaauugccauccugguaacuacuguaacauugcauuucaagcaguaugaaugcaacucccccccaaauaaccaaguaaugcugugugaaccaacaauaauagaaagaaacauaacagagauaguguaucugaccaacaccaccauagagaaggaaauaugccccaaacuagcagaauacagaaauuggucaaagccgcaauguaacaucacaggauuugcaccuuuuucuaaggacaauucgauucggcuuuccgcugguggggacaucugggugacaagagaaccuuaugugucaugcgauccugacaaguguuaucaauuugcacuuggacagggaacaacacuaaacaacgggcauucaaaugacacaguacaugauaggaccccuuaccggacccuauugaugaaugaguuggguguuccauuucauuugggaaccaagcaagugugcauagcaugguccagcucaaguugucacgauggaaaagcauggcugcauguuuguguaacuggagaugaugaaaaugcaacugcuagcuucauuuacaaugggaggcuuguagauaguauugguucaugguccaaaaaaauacucaggacccaggagucggaaugcguuuguaucaauggaacuuguacaguaguaaugacugaugggagcacuucaggaaaagcugauacuaaaauacuauucauugaggaggggaaaaucguucauauuagcacauugucaggaagugcucagcauguagaggagugcuccuguuauccucgauauccuggugucagaugugucugcagggacaacuggaaaggcuccaauaggcccaucguagauauaaauguaaaggauuauagcauuguuuccaguuaugugugcucaggacuuguuggagacacacccagaaaaaaugacagcuucagcaguagccauugccuagauccuaacaaugaggaagguggucauggagugaagggcugggccuuugaugauggaaaugacguuuggaugggaagaacgaucagcgagaaguuacgcucagguuaugaaaccuucaaagucaucgaaggcugguccaaaccuaacuccaaauugcagauaaauaggcaagucauaguugaaagaggaaacagguccgguuauucugguauuuucuccguugaaagcaaaagcugcaucaaucggugcuuuuauguggaguugauaaggggaaggaaagaggaaacugaagucugguggaccucaaacaguauuguuguguuuuguggcacuucagguacauauggaacaggcucauggccugauggggcggauaucaaucucaugccuauauaa

SEQ ID NO: 53980 - RNA, 1410 nt, Artificial Sequence
  derived and/or modified CDS sequence (wt) from neuraminidase__InfluenzaA__AFG72892
augaauccaaaucaaaagauaauaacgauuggcucuguuucucucaccauuuccacaauaugcuucuucaugcaaauugccaucuugauaacuacuguaacauugcauuucaagcaauaugaauucaacucccccccaaacaaccaagugaugcugugugaaccaacaauaauagaaagaaacauaacagagauaguguaucugaccaacaccaccauagagaaggaaauaugccccaaacuagcagaauacagaaauuggucaaagccgcaaugugacauuacaggauuugcaccuuuuucuaaggacaauucgauuaggcuuuccgcugguggggacaucugggugacaagagaaccuuaugugucaugcgauccugacaaguguuaucaauuugcccuuggacagggaacaacacuaaacaacgugcauucaaaugacacaguacaugauaggaccccuuaucggacccuauugaugaaugaguuagguguuccauuucaucuggggaccaagcaagugugcauagcaugguccagcucaaguugucacgauggaaaagcauggcugcauguuuguguaacgggggaugauaaaaaugcaacugcuagcuucauuuacaaugggaggcuuguagauaguauuguuucaugguccaaagaaauccucagaacccaggagucagaaugcguuuguaucaauggaacuuguacaguaguaaugacugaugggagugcuucaggaaaagcugauacuaaaauacuauucauugaggaggggaaaaucguucauacuagcacauugucaggaagugcucagcaugucgaggagugcuccugcuauccucgauauccuggugucagaugugucugcagagacaacuggaaaggcuccaauaggcccaucguagauauaaacauaaaggauuauagcauuguuuccaguuaugugugcucaggacuuguuggagacacacccagaaaaaacgacagcuccagcaguagccauugcuuggauccuaacaaugaagaagguggucauggagugaaaggcugggccuuugaugauggaaaugacguguggaugggaagaacgaucagcgagaaguuacgcucaggauaugaaaccuucaaagucauugaaggcugguccaacccuaauuccaaauugcagauaaauaggcaagucauaguugacagagguaauagguccgguuauucugguauuuucucuguugaaggcaaaagcugcaucaaucggugcuuuuauguggaguugauaaggggaagaaaagagaaaacugaagucuuguggaccucaaacaguauuguuguguuuuguggcaccucagguacauauggaacaggcucauggccugauggggcggacaucaaucucaugccuauauaa

SEQ ID NO: 53981 - RNA, 1410 nt, Artificial Sequence
  derived and/or modified CDS sequence (wt) from neuraminidase__InfluenzaA__AFG72903
augaauccaaaucaaaagauaauaacgauuggcucuguuucucucaccauuuccacaauaugcuucuucaugcaaauugccaucuugauaacuacuguaacauugcauuucaagcaauaugaauucaacucccccccaaacaaccaagugaugcugugugaaccaacaauaauagaaagaaacauaacagagauaguguaucugaccaacaccaccauagagaaggaaauaugccccaaacuagcagaauacagaaauuggucaaagccgcaauguaacauuacaggauuugcaccuuuuucuaaggacaauucgauuaggcuuuccgcugguggggacaucugggugacaagagaaccuuaugugucaugcgauccugacaaguguuaucaauuugcccuuggacagggaacaacacuaaacaacgugcauucaaaugacacaguacaugauaggaccccuuaucggacccuacugaugaaugaguuagguguuccauuucaucuggggaccaagcaagugugcauagcaugguccagcucaaguugucacgauggaaaagcauggcugcauguuuguguaacgggggaugauaaaaaugcaacugcuagcuucauuuacaaugggaggcuuguagauaguauuguuucaugguccaaagaaauccucaggacccaggagucagaaugcguuuguaucaauggaacuuguacaguaguaaugacugaugggagugcuucaggaaaagcugauacuaaaauacuauucauugaggaggggaaaaucguucauacuagcacauugucaggaagugcucagcaugucgaggagugcuccugcuauccucgauauccuggugucagaugugucugcagagacaacuggaaaggcuccaauaggcccauaguagauauaaacauaaaggauuauaguauuguuuccaguuaugugugcucaggacuuguuggagacacacccagaaaaaaagauagcuccagcaguagccauugcuuggauccuaacaaugaagaagguggucauggagugaaaggcugggccuuugaugauggaaaugacguguggaugggaagaacgaucagcgagaaguuacgcucaggauaugaaaccuucaaagucauugaaggcugguccaacccuaauuccaaauugcagauaaauaggcaagucauaguugacagaggugauagguccgguuauucugguauuuucucuguugaaggcaaaagcugcaucaaucggugcuuuuauguggaguugauaaggggaagaaaagaggaaacugaagucuuguggaccucaaacaguauuguuguguuuuguggcaccucagguacauauggaacaggcucauggccugauggggcggacaucaaucucaugccuauauaa

SEQ ID NO: 53982 - RNA, 1410 nt, Artificial Sequence
  derived and/or modified CDS sequence (wt) from neuraminidase__InfluenzaA__AFG72936
augaauccaaaucaaaagauaauaacgauuggcucuguuucucucaccauuuccacaauaugcuucuucauacaaauugccaucuugauaacuacuguaacauugcauuucaagcaauaugaauucaacucccccccaaacaaccaagugaugcugugugaaccaacaauaauagaaagaaacauaacagagauaguguaucugaccaacaccaccauagagaaggaaauaugccccaaacuagcagaauacagaaauuggucaaagccgcaaugugacauuacaggauuugcaccuuuuucuaaggacaauucgauuaggcuuuccgcugguggggacaucugggugacaagagaaccuuaugugucaugcgauccugacaaguguuaucaauuugcccuuggacagggaacaacacuaaacaacgugcauucaaauaacauaguacgugauaggaccccuuaucggacccuauugaugaaugaguuagguguuccuuuucaucuggggaccaagcaagugugcauagcaugguccagcucaaguugucacgauggaaaagcauggcugcauguuuguauaacgggggaugauaaaaaugcaacugcuagcuucauuuacaaugggaggcuuguagauaguguuguuucaugguccaaagaaauccucaggacccaggagucagaaugcgucuguaucaauggaacuuguacaguaguaaugacugaugggagugcuucaggaaaagcugauacuaaaauacuauucauugaggaggggaaaaucguucauacuagcacauugucaggaagugcucagcaugucgaggagugcucuugcuauccucgauauccuggugucagaugugucugcagagacaacuggaaaggcuccaauaggcccaucguagauauaaacauaaaggaucauagcauuguuuccaguuauguguguucaggacuuguuggagacacacccagaaaaaacgacagcuccagcaguagccauuguuuggauccuaacaaugaagaagguggucauggagugaaaggcugggccuuugaugauggaaaugacguguggaugggaagaacgaucagcgagaagucacgcuuaggguaugaaaccuucaaagucauugaaggcugguccaaccauaaguccaaauugcagauaaauaggcaagucauaguugacagagguaauagguccgguuauucugguauuuucucuguugaaggcaaaagcugcaucaaucggugcuuuuauguggaguugauuaggggaagaaaagaggaaacugaagucuuguggaccucaaacaguauuguuguguuuuguggcaccucagguacauauggaacaggcucauggccugauggggcggaccucaaucucaugccuauauaa

SEQ ID NO: 53983 - RNA, 1410 nt, Artificial Sequence
  derived and/or modified CDS sequence (wt) from neuraminidase__InfluenzaA__AFG72958
augaacccaaaucaaaagauaauaacgauuggcucuguuucucucaccauuuccacaauaugcuucuucaugcaaauugccaucuugauaacuacuguaacauugcauuucaagcaauaugaauucaacucccccccaaacaaccaagugaugcugugugaaccaacaauaauagaaagaaacauaacagagauaguguaucugaccaacaccaccauagagaaggaaauaugccccaaacuagcagaauacagaaauuggucaaagccgcaaugugacauuacaggauuugcaccuuuuucuaaggacaauucgauuaggcuuuccgccgguggggacaucugggugacaagagaaccuuaugugucaugcgauccugacaaguguuaucaauuugcccuuggacagggaacaacacuaaacaacgugcauucaaauaacauaguacgugauaggaccccuuaucggacccuauugaugaaugaguuagguguuccuuuucaucuggggaccaagcaagugugcauagcaugguccagcucaaguugucacgauggaaaagcauggcugcauguuuguauaacgggggaugauaaaaaugcaacugcuagcuucauuuacaaugggaggcuuguagauaguguuguuucaugguccaaagaaauccucaggacccaggagucagaaugcguuuguaucaauggaacuuguacaguaguaaugacugaugggagugcuucaggaaaagcugauacuaaaauacuauucauugaggaggggaaaaucguucauacuagcacauugucaggaagugcucagcaugucgaggagugcucuugcuauccucgauauccuggugucagaugugucugcagagacaacuggaaaggcuccaauaggcccaucguagauauaaacauaaaggaucauagcauuguuuccaguuauguguguucaggacuuguuggagacacacccagaaaaaacgacagcuccagcaguagccauuguuuggauccuaacaaugaagaagguggucauggagugaaaggcugggccuuugaugauggaaaugacguguggaugggaagaacgaucaacgagacgucacgcuuaggguaugaaaccuucaaagucauugaaggcugguccaacccuaaguccaaauugcagauaaauaggcaagucauaguugacagagguaauagguccgguuauucugguauuuucucuguugaaggcaagagcugcaucaaucggugcuuuuauguggaguugauuaggggaagaaaagaggaaacugaagucuuguggaccucaaacaguauuguuguguuuuguggcaccucagguacauauggaacaggcucauggccugauggggcggaccucaaucucaugccuauauaa

SEQ ID NO: 53984 - RNA, 1410 nt, Artificial Sequence
  derived and/or modified CDS sequence (wt) from neuraminidase__InfluenzaA__AFG98811
augaauccaaaucaaaagauaauaacaauuggcucugucucucucaccauugcaacaguaugcuuccucaugcagauugccauccugguaacuacuguaacauugcauuuuaagcaauaugagugcgacucccccgcgagcaaccaaguaaugccgugugaaccaauaauaauagaaaggaacauaacagagauaguguauuugaauaacaccaccauagagaaagagauaugccccaaaguaguggaauacagaaauuggucaaagccgcaaugucaaauuacaggauuugcaccuuuuucuaaggacaauucaauccggcuuucugcugguggggacauuugggugacgagagaaccuuaugugucaugcgauccuggcaaguguuaucaauuugcacucgggcaggggaccacacuagacaacaaacauucaaaugacacaauacaugauagaaucccucaucgaacccuauuaaugaaugaguuggguguuccauuucauuuaggaaccaggcaaguguguauagcaugguccagcucaaguugucacgauggaaaagcauggcugcauguuuguaucacuggggaugauaaaaaugcaacugcuagcuucauuuaugacgggaggcuuguggacaguauugguucauggucucaaaauauccucagaacccaggagucagaaugcguuuguaucaaugggaccugcacaguaguaaugacugauggaagugcuucaggaagagccgauacuagaauacuauucauugaagaggggaaaauuguccauauuagcccauugucaggaagugcucagcauguagaagaguguuccuguuauccuagauauccuggcgucagauguaucugcagagacaacuggaaaggcucuaauaggcccgucguagacauaaauauggaagauuauagcauugauuccaguuaugugugcucagggcuuguuggcgacacaccuagaaacgacgacagaucuagcaauagcaauugcaggaauccuaacaaugagagagggaaucaaggagugaaaggcugggccuuugacaauggagaugacguguggaugggaagaacgaucagcaaggauuuacgcucagguuaugaaacuuucaaagucauuggugguugguccacaccuaauuccaaaucgcagaucaauagacaagucauaguugacagcgauaaucggucagguuacucugguauuuucucuguugagggcaaaagcugcaucaauaggugcuuuuauguggaguugauaaggggaaggaaacaggagacuagaguaugguggaccucaaacaguauuguuguguuuuguggcacuucagguaccuauggaacaggcucauggccugauggggcgaacaucaauuucaugccuauauaa

SEQ ID NO: 53985 - RNA, 1410 nt, Artificial Sequence
  derived and/or modified CDS sequence (wt) from neuraminidase__InfluenzaA__AFG98822
augaauccaaaucaaaagauaauaacaauuggcucugucucucucaucauugcaacaguaugcuuccucaugcagauugccauccugguaacuacuguaacauugcauuuuaaacaacaugagugcgacucccccucgagcaaccaaguaaugcugugugaaccaauaauaauagaaaggaacauaacagagauaguguauuugaauaacaccaccauagagaaagagacaugccccaaauuaguggaauacagaaauuggucaaagccgcaauguaaaauuacaggauuugcaccuuuuucuaaggacaauucaauccgacucucugcugguggggacauuugggugacgagagagccuuaugugucaugcgauccuggcaaguguuaucaauuugcacucgggcaggggaccacacuagacaacaaacauucaaaugacacaauacaugauagaaucccacaucgaacccuauugaugaaugaguuggguguuccauuucauuuaggaaccaggcaaguguguauagcaugguccagcucaaguugucacgaugggaaagcauggcugcauguuugugucacuggggaugauaaaaaugcaacugcuagcuucauuuaugacgggaggcuuguggacaguauugguucauggucucaaaauauccucaggacccaggagucggaaugcguuuguaucaaugguacuugcacaguaguaaugacugaugggagugcuucagggagagccgauacuagaauacuauucauugaagaggggaaaauuguccauauuagcccguugucaggaagugcucagcauguagaggaguguuccuguuauccucgauauccugacgucagauguaucugcagagacaacuggaaaggcucuaauaggcccaucguagacauaaauaugaaagauuauagcauugauuccaguuaugugugcucagggcuuguuggcgacacaccuagaaacgacgacagaucuagcaagagcaauugcaggaauccuaacaaugagagagggaaucacggagugaaaggcugggccuuugacaauggaaaugacguguggaugggaagaacgaucagcaaggauuuacgcucagguuaugaaacuuucaaagucauuggugguugguccacaccuaauuccaaaucgcagaucaauaggcaagucauaguugacagcgauaaucggucagguuauucugguauuuucucuguugagggcaaaagcugcaucaauaggugcuuuuauguggaguugauaaggggaagggaacaggagacuagaguaugguggacuucaaacaguauuguuguguuuuguggcacuucagguaccuauggaacaggcucauggccugauggggcgaacaucaacuucaugccuauauaa

SEQ ID NO: 53986 - RNA, 1410 nt, Artificial Sequence; identical to SEQ ID NO: 52139
  derived and/or modified CDS sequence (wt) from neuraminidase__InfluenzaA__AFG98833

SEQ ID NO: 53987 - RNA, 1410 nt, Artificial Sequence
  derived and/or modified CDS sequence (wt) from neuraminidase__InfluenzaA__AFG98844
augaauccaaaucaaaagauaauaacaauuggcucugucucucucaccauugcaacaauaugcuuccucaugcagauugccauccugguaacuacuguaacauugcauuucaagcaauaugagugcgacucccccgcgaacaaccaagugaugccgugugaaccaauaauaauagaaaggaacauaacagagauaguguauuugacuaacaccaccauagagaaagagaugugccccaaauuaguggaauacaggaauuggucaaagccgcaauguaaaauuacaggauuugcaccuuuuucuaaggacaauucaauucggcuuucugcugguggggacauuugggugacgagagaaccuuaugugucaugcgauccuggcaaguguuaucaauuugcacucgggcaggggaccacacuaaacaacagacauucaaaugacacaauacaugauagaaucccucaucgaacccuauugaugaaugaguuggguguuccauuucauuugggaaccaggcaaguguguauagcaugguccagcucaaguugucacgauggaaaagcauggcugcauguuugugucacuggggaugauaaaaaugcaacugcuagcuucauuuacgaugggaggcuuguggacaguauugguucauggucucaaaauauccucaggacccaggagucggaaugcguuuguaucaauaggacuuguacaguaguaaugacugauggaagugcuucaggaaaagcugauacuagaauacuauucauugaagaggggaaaauuguucauauuagcccauugucaggaagugcucagcauguagaggaguguuccuguuauccucgauauccuggugucagauguaucugcagagacaacuggaaaggcucuaauaggcccgucguagauauaaaugugaaagauuauagcauugauuccaguuaugugugcucagggcuuguuggcgacacacccagaaacaacgacagaucuagcaguagcuauugccggaauccuaacaaugagagagggaaucacggagugaaaggcugggccuuugacgaugaaaaugacguguggaugggaagaacgaucagcaaggauucacgcucagguuaugaaaccuucaaagucauuggugguugguccacaccuaauuccaaaucgcagauaaauaggcaagucauaguugacagcgauaauaggucagguuauucugguauuuucucuguugagggcaaaagcugcaucaauaggugcuuuuauguggaguuaauaaggggaagggaacaggagacuagaguaugguggaccucaaacaguauuguuguguuuuguggcacuucagguaccuaugggacaggcucauggccugauggggcggacaucaaucucaugccuauauaa

SEQ ID NO: 53988 - RNA, 1410 nt, Artificial Sequence; identical to SEQ ID NO: 46345
  derived and/or modified CDS sequence (wt) from neuraminidase__InfluenzaA__AFG98855

SEQ ID NO: 53989 - RNA, 1410 nt, Artificial Sequence
  derived and/or modified CDS sequence (wt) from neuraminidase__InfluenzaA__AFG98866
augaauccaaaucaaaagauaauaacaauuggcucugucucucucaccauugcaacaauaugcuuccucaugcagauugccauccugguaacuacuguaacauugcauuucaagcaauaugagugcgacucccccgcgaacaaccaaguaaugccgugugaaccaauaauaauagaaaggaacauaacagagauaguguauuugacuaacaccaccauagagaaagagauaugccccaaauuaguggaauacaggaaauggucaaagccgcaauguaaaauuacaggauuugcaccuuuuucuaaggacaauucaauucggcuuucugcugguggggacauuugggugacgagagaaccuuaugugucaugcgauccuggcaaguguuaucaauuugcacucgggcagggaaccacacuagacaacaaacauucaaaugacacaauacaugauagaaucccucaucgaacccuauugaugaaugaguuggguguuccauuucauuugggaaccaggcaaguguguauagcaugguccagcucaaguugucacgauggaaaagcauggcugcauguuugugucacuggggaugauaaaaaugcaacugcuagcuucauuuacgaugggaggcuuguggacaguauugguucauggucucaaaauauccucaggacccaggagucggaaugcguuuguaucaaugggacuuguacaguaguaaugacugauggaagugcuucaggaagagcugauacuagaauacuauucauugaagaggggaaaauuguucauauuagcccauugucaggaagugcucagcauguagaggaguguuccuguuauccucgauauccuggugucagauguaucugcagagacaacuggaaaggcucuaauaggcccgucguagauauaaaugugaaagauuauagcauugauuccaguuaugugugcucagggcuuguuggcgacacacccagaaacaaugacagaucuagcaauagcuauugccggaauccuaacaaugagagagggaaucacggagugaaaggcugggccuuugacgauggaaaugacguguggaugggaagaacgaucagcaaggauucacgcucagguuaugaaaccuucaaagucauuggugguugguccacaccuaauuccaaaucgcagauaaauaggcaagucauaguugacagcgauaauaggucagguuauucugguauuuucucuguugagggcaaaagcugcaucaauaggugcuuuuauguggaguugauaaggggaagggaacaggagacuagaguaugguggaccucaaacaguauuguuguguuuuguggcacuucagguaccuaugggacaggcucauggccugauggggcggacaucaaucucaugccuauauaa

SEQ ID NO: 53990 - RNA, 1410 nt, Artificial Sequence
  derived and/or modified CDS sequence (wt) from neuraminidase__InfluenzaA__AFG98877
augaauccaaaucaaaagauaauaacaauuggcucugucucucucaccauugcaacaauaugcuuccucaugcagauugccauccugguaacuacuguaacauugcauuucaagcaauaugagugcgacucccccccgaacaaccaaguaaugccgugugaaccaauaauaauagaaaggaacauaacagagauaguguauuugacuaacaccaccauagagaaagagauaugccccaaauuaguggaauacaggaauuggucaaagccgcaauguaaaauuacaggauuugcaccuuuuucuaaggacaauucaauucggcuuucugcugguggggacauuugggugacgagagaaccuuaugugucaugcgauccuggcaaguguuaucaauuugcacucgggcaggggaccacacuagacaacaaacauucaaaugacacaauacaugauagaaccccucaucgaacccuauugaugaaugaguuggguguuccauuucauuugggaaccaggcaaguguguauagcaugguccagcucaaguugucacgauggaaaagcauggcugcauguuugugucacuggguaugauaaaaaugcaacugcuagcuucauuuacgaugggaggcuuguagacaguauugguucauggucucaaaauauccucaggacccaggagucggaaugcguuuguaucaaugggacuuguacaguaguaaugacugauggaagugcuucaggaagagcugauacuaaaauacuauucauugaagaggggaaaauuguucauauuagcccauugucaggaagugcucagcauguagaggaguguuccuguuauccucgauauccuggugucagauguaucugcagagacaacuggaaaggcucuaauaggcccgucguagauauaaaugugaaagauuauagcauugauuccaguuaugugugcucagggcuuguuggcgacacacccagaaacaacgacagaucuagcaauagcuauugccggaauccuaacaaugagaaagggaaucacggagugaaaggcugggccuuugacgauggaaaugacguguggaugggaagaacgaucagcgaggauucacgcucagguuaugaaaccuucaaagucauuggugguugguccacaccuaauuccaaauugcagauaaauaggcaagucauaguugacagcgauaauaggucagguuauucugguauuuucucuguugagggcaaaagcugcaucaauaggugcuuuuauguggaguugauaaggggaagggaacaggaaacuagaguaugguggaccucaaacaguauuguuguguuuuguggcacuucagguaccuaugggacaggcucauggccugauggggcggacaucaaucucaugccuauauaa

SEQ ID NO: 53991 - RNA, 1410 nt, Artificial Sequence
  derived and/or modified CDS sequence (wt) from neuraminidase__InfluenzaA__AFG98888
augaauccaaaucaaaagauaauaacaauuggcucugucucucucaccauugcaacaauaugcuuccucaugcagauugccauccugguaacuacuguaacauugcauuucaagcaauaugagugcgacucccccgcgaacaaccaaguaaugccgugugaaccaauaauaauagaaaggaacauaacagagauaguguauuugacuaacaccaccauagagaaagagauaugccccaaauuaguggaauacaggaauuggucaaagccgcaauguaaaauuacaggauuugcaccuuuuucuaaggacaauucaauucggcuuucugcugguggggacauuugggugacgagagaaccuuaugugucaugcgauccuggcaaguguuaucaauuugcacucgggcaggggaccacacuagacaacaaacauucaaaugauacaauacaugauagaaccccucaucgaacccuauugaugaaugaguuggguguuccauuucauuugggaaccaggcaaguguguauagcaugguccagcucaaguugucacgauggaaaagcauggcugcauguuugugucacuggguaugauaaaaaugcaacugcuagcuucauuuacgaugggaggcuuguagacaguauugguucauggucucaaaauauccucaggacccaggagucggaaugcguuuguaucaaugggacuuguacaguaguaaugacugauggaagugcuucaggaagagcugauacuaaaauacuauucauugaagaggggaaaauuguucauaucagcccauugucaggaagugcucagcauguagaggaguguuccuguuauccucgauauccuggugucagauguaucugcagagacaacuggaaaggcucuaauaggcccgucguagauauaaaugugaaagauuauagcauugauuccaguuaugugugcucagggcuuguuggcgacacacccagaaacaacgacagaucuagcaauagcuauugccggaauccuaacaaugagaaagggaaucacggagugaaaggcugggccuuugacgauggaaaugacguguggaugggaagaacgaucagcgaggauucacgcucagguuaugaaaccuucaaagucauuggugguugguccacaccuaauuccaaauugcagauaaauaggcaagucauaguugacagcgauaauaggucagguuauucugguauuuucucuguugagggcaaaagcugcaucaauaggugcuuuuauguggaguugauaaggggaagggaacaggaaacuagaguaugguggaccucaaacaguauuguuguguuuuguggcacuucagguaccuaugggacaggcucauggccugauggggcggacaucaaucucaugccuauauaa

SEQ ID NO: 53992 - RNA, 1410 nt, Artificial Sequence
  derived and/or modified CDS sequence (wt) from neuraminidase__InfluenzaA__AFG98899
augaauccaaaucaaaagauaauaacaauuggcucugucucucucaucauugcaacaauaugcuuccucaugcagauugccauccugguaacuaccguaacauugcauuucaagcaauaugagugcgacucccccgcgaacaaccaaguaaugccgugugaaccaauaauaauagaaaggaacauaacagagauaguguauuugacuaacaccaccauagagaaagagauaugccccaaauuaguggaauacaggaauuggucaaagccgcaauguaaaauuacaggauuugcaccuuuuucuaaggacaauucaauucggcuuucugcugguggggacauuugggugacgagagaaccuuaugugucaugcgauccuggcaaguguuaucaauuugcacucgggcaggggaccacacuagacaacaaacauucaaaugacacaauacaugauagaaccccucaucgaacccuauugaugaaugaguuggguguuccauuucauuugggaaccaggcaaguguguauagcaugguccagcucaaguugucacgauggaaaagcauggcugcauguuugugucacuggguaugauaaaaaugcaacugcuagcuucauuuacgaugggaggcuuguagacaguauugguucauggucucaaaauauccucaggacccaggagucggaaugcguuuguaucaaugggacuuguacaguaguaaugacugauggaagugcuucaggaagagcugauacuaaaauacuauucauugaagaggggaaaauuguucauauuagcccauugucaggaagugcucagcauguagaggaguguuccuguuauccucgauauccuggugucagauguaucugcagagacaacuggaaaggcucuaauaggcccgucguagauauaaaugugaaagauuauagcauugauuccaguuaugugugcucagggcuuguuggcgacacacccagaaacaacgacagaucuagcaauagcuauugccggaauccuaacaaugagaaagggaaucacggagugaaaggcugggccuuugacgauggaaaugacguguggaugggaagaacgaucagcgaggauucacgcucagguuaugaaaccuucaaagucauuggugguugguccacaccuaauuccaaauugcagauaaauaggcaagucauaguugacagcgauaauagaucagguuauucugguauuuucucuguugagggcaaaagcugcaucaauaggugcuuuuauguggaguugauaaggggaagggaacaggaaacuagaguaugguggaccucaaacagcauuguuguguuuuguggcacuucagguaccuaugggacaggcucauggccugauggggcggacaucaaucucaugccuauauaa

SEQ ID NO: 53993 - RNA, 1410 nt, Artificial Sequence
  derived and/or modified CDS sequence (wt) from neuraminidase__InfluenzaA__AFG98910
augaauccaaaucaaaagauaauaacaauuggcucugucucucucaccauugcaacaauaugcuuccucaugcagauugccauccugguaacuaccguaacauugcauuucaagcaauaugagugcgacucccccgcgaacaaccaaguaaugccgugugaaccaauaauaauagaaaggaacauaacagagauaguguauuugacuaacaccaccauagagaaagagauaugccccaaauuaguggaauacaggaauuggucaaagccgcaauguaaaauuacaggauuugcaccuuuuuccaaggacaauucaauucggcuuucugcugguggggacauuugggugacgagagaaccuuaugugucaugcgauccuggcaaguguuaucaauuugcacucggucaggggaccacacuagacaacaaacauucaaaugacacaauacaugauagaaccccucaucgaacccuauugaugaaugaguuggguguuccauuucauuugggaaccaggcaaguguguauagcaugguccagcucaaguugucacgauggaaaagcauggcugcauguuugugucacuggguaugauaaaaaugcaacugcuagcuucauuuacgaugggaggcuuguagacaguauugguucauggucucaaaauauccucaggacccaggagucggaaugcguuuguaucaaugggacuuguacaguaguaaugacugauggaagugcaucaggaagagcugauacuaaaauacuauucauugaagaggggaaaauuguucauauuagcccauugucaggaagugcucagcauguagaggaguguuccuguuauccucgauauccuggugucagauguaucugcagagacaacuggaaaggcucuaauaggcccgucguagauauaaaugugaaagauuauagcauugauuccaguuaugugugcucagggcuuguuggcgacacacccagaaacaacgacagaucuagcaauagcuauugccggaauccuaacaaugagaaagggaaucacggagugaaaggcugggccuuugacgauggaaaugacguguggaugggaagaacgaucagcgaggauucacgcucagguuaugaaaccuucaaagucauuggugguugguccacacccaauuccaaauugcagauaaauaggcaagucauaguugacagcgauaauagaucagguuauucugguauuuucucuguugagggcaaaagcugcaucaauaggugcuuuuauguggaguugauaaggggaagggaacaggaaacuagaguaugguggaccucaaacaguauuguuguguuuuguggcacuucagguaccuaugggacaggcucauggccugauggggcggacaucaaucucaugccuauauaa

SEQ ID NO: 53994 - RNA, 1410 nt, Artificial Sequence; identical to SEQ ID NO: 53993
  derived and/or modified CDS sequence (wt) from neuraminidase__InfluenzaA__AFG98921

SEQ ID NO: 53995 - RNA, 1410 nt, Artificial Sequence
  derived and/or modified CDS sequence (wt) from neuraminidase__InfluenzaA__AFG98932
augaauccaaaucaaaagauaauaacaauuggcucugucucucucaccauugcaacaauaugcuuccucaugcagauugccauccugguaacuaccguaacauugcauuucaagcaauaugagugcgacucccccgcgaacaaccaaguaaugccgugugaaccaauaauaguagaaaggaacauaacagagauaguguauuugacuaacaccaccauagagaaagagauaugccccaaauuaguggaauacaggaaauggucaaagccgcaauguaaaauuacaggauuugcaccuuuuuccaaggacaauucaauucggcuuucugcugguggggacauuugggugacgagagaaccuuaugugucaugcgauccuggcaaguguuaucaauuugcacucggucaggggaccacacuagacaacaaacauucaaaugacacaauacaugauagaaccccucaucgaacccuauugaugaaugaguuggguguuccauuucauuugggaaccaggcaaguguguauagcaugguccagcucaaguugucacgauggaaaagcauggcugcauguuugugucacuggguaugauaaaaaugcaacugcuagcuucauuuacgaugggaggcuuguagacaguauugguucauggucucaaaauauccucaggacccaggagucggaaugcguuuguaucaaugggacuuguacaguaguaaugacugauggaagugcaucaggaagagcugauacuaaaauacuauucauugaagaggggaaaauuguucauauuagcccauugucaggaagugcucagcauguagaggaguguuccuguuauccucgauauccuggugucagauguaucugcagagacaacuggaaaggcucuaauaggcccgucguagauauaaaugugaaagacuauagcauugauuccaguuaugugugcucagggcuuguuggcgacacacccagaaacaacgacagaucuagcaauagcuauugccggaauccuaacaaugagaaagggaaucacggagugaaaggcugggccuuugacgauggaaaugacguguggaugggaagaacaaucagcgaggauucacgcucagguuaugaaaccuucaaagucauuggugguugguccacacccaauuccaaauugcagauaaauaggcaagucauaguugacagugauaauagaucagguuauucugguauuuucucuguugagggcaaaagcugcaucaauaggugcuuuuauguggaguugauaaggggaagggaacaggaaacuagaguaugguggaccucaaacaguauuguuguguuuuguggcacuucagguaccuaugggacaggcucauggccugauggggcggacaucaaucucaugccuauauaa

SEQ ID NO: 53996 - RNA, 1410 nt, Artificial Sequence
  derived and/or modified CDS sequence (wt) from neuraminidase__InfluenzaA__AFG98943
augaauccaaaucaaaagauaauaacaauuggcucugucucucucaccauugcaacaauaugcuuccucaugcagauugccauccugguaacuaccguaacauugcauuucaagcaauaugagugcgacucccccgcgaacaaccaaguaaugccgugugaaccaauaauaauagaaaggaacauaacagagauaguguauuugacuaacaccaccauagagaaagagauaugccccaaauuaguggaauacaggaauuggucaaagccgcaauguaaaauuacaggauuugcaccuuuuuccaaggacaauucaauucggcuuucugcugguggggacauuugggugacgagagaaccuuaugugucaugcgauccuggcaaguguuaucaauuugcacucggucaggggaccacacuagacaacaaacauucaaaugacacaauacaugauagaaccccucaucgaacccuauugaugaaugaguuggguguuccauuucauuugggaaccaggcaaguguguauagcaugguccagcucaaguugucacgauggaaaagcauggcugcauguuugugucacuggguaugauaaaaaugcaacugcuagcuucauuuacgaugggaggcuuguagacaguauugguucauggucucaaaauauccucaggacccaggagucggaaugcguuuguaucaaugggacuuguacaguaguaaugacugauggaagugcaucaggaagagcugauacuaaaauacuauucauugaagaggggaaaauuguucauauuagcccauugucaggaagugcucagcauguagaggaguguuccuguuauccucgauauccuggugucagauguaucugcagagacaacuggaaaggcucuaauaggcccgucguagauauaaaugugaaagauuauagcauugauuccaguuaugugugcucagggcuuguuggcgacacacccagaaaaaacgacagaucuagcaauagcuauugccggaauccuaacaaugagaaagggaaucacggagugaaaggcugggccuuugacgauggaaaugacguguggaugggaagaacgaucagcgaggauucacgcucagguuaugaaaccuucaaagucauuggugguugguccacacccaauuccaaauugcagauaaauaggcaagucauaguugacagcgauaauagaucagguuauucugguauuuucucuguugagggcaaaagcugcaucaauaggugcuuuuauguggaguugauaaggggaagggaacaggaaacuagaguaugguggaccucaaacaguauuguuguguuuuguggcacuucagguaccuaugggacaggcucauggccugauggggcggacaucgaucucaugccuauauaa

SEQ ID NO: 53997 - RNA, 1410 nt, Artificial Sequence
  derived and/or modified CDS sequence (wt) from neuraminidase__InfluenzaA__AFG98965
augaauccaaaucaaaagauaauaacaauuggcucugucucucucaccauugcaacaauaugcuuccucaugcagauugccauccugguaacuacuguaacauugcauuucaagcaguaugagugcgacucccccgcgaacaaucaaguaaugccgugugaaccaacaauaauagaaaggaacauaacagagauaguguauuugacuaacaucaccauagaaaaagagauaugccccaaauuaguggaauacaggaauuggucaaagccgcaauguaaaauuacaggauuugcaccuuuuucuaaggacaauucaauucggcuuucugcugguggggacauuugggugacgagagaaccuuaugugucaugcgauccuggcaaguguuaucaauuugcacucgggcaggggaccacacuagacaacaaacauucaaaugacacaauacaugauagaaccccucaucgaacccuauugaugaaugaguuggguguuccauuucauuugggaaccaggcaaguguguauagcaugguccagcucaaguugucacgauggaaaagcauggcugcauguuugugucacuggguaugauaaaaaugcaacugcuagcuucauuuacgaugggaggcuuguagacaguauugguucauggucucaaaauauccucaggacccaggagucggaaugcguuuguaucaaugggacuuguacaguaguaaugacugauggaagugcuucaggaagagcugauacuaaaauacuauucauugaagaggggaaaauuguucauauuagcccauugucaggaagugcucagcauguagaggaguguuccuguuacccucgauauccuggugucagauguaucugcagagacaacuggaaaggcucuaauaggcccgucguagauauaaaugugaaagauuauagcauugauuccaguuaugugugcucagggcuuguuggcgacacacccagaaacaacgacagaucuagcaauagcuauugccggaauccuaacaaugagaaagggaaucacggagugaaaggcugggccuuugacgauggaaaugacguguggaugggaagaacgaucagcgaggauucacgcucagguuaugaaaccuucaaagucauuggugguugguccacaccuaauuccaaauugcagauaaauaggcaagucauaguugacagcgauaauaggucagguuauucugguauuuucucuguugagggcaaaagcugcaucaauaggugcuuuuauguggaguugauaaggggaagggaacaggaaacuagaguaugguggaccucaaacaguauuguuguguuuuguggcacuucagguaccuauggggcaggcucauggccugauggggcggacaucaaucucaugccuauauaa

SEQ ID NO: 53998 - RNA, 1410 nt, Artificial Sequence
  derived and/or modified CDS sequence (wt) from neuraminidase__InfluenzaA__AFG98976
augaauccaaaucaaaagauaauaacaauuggcucugucucucucaccauugcaacaauaugcuuccucaugcagauugccauccugguaacuacuguaacauugcauuucaagcaauaugagugcgacucccccgcgaacaaccaaguaaugccgugugaaccaauaauaauagaaaggaacauaacagagauaguguauuuggcuaacaccaccauagagaaagagauaugccccaaauuaguggaauacagaaauuggucaaagccgcaauguaaaauuacaggauuugcaccuuuuucuaaggacaauucaauucggcuuucugcugguggggacauuugggugacgagagaaccuuaugugucaugcgauccuggcaaguguuaucaauuugcacucgggcaggggaccacacuagacaacaaacauucaaaugacacaauacaugauagaaccccucaucgaacccuauugaugaaugaguuggguguuccauuucauuugggaaccaggcaaguguguauagcaugguccagcucaaguugucacgauggaaaagcauggcugcauguuugugucacuggguaugauaaaaaugcaacugcuagcuucauuuacgaugggaggcuuguagacaguauugguucauggucuaaaaauauccucaggacccaggagucggaaugcguuuguaucaaugggacuuguacaguaguaaugacugauggaagugcuucaggaagagcugauacuaaaauacuauucauugaagaggggaaaauuguucauauuagcccauugucaggaagugcucaacauguagaggaguguuccuguuauccucgauauccuggugucagauguaucugcagagacaacuggaaaggcucuaauaggcccgucguagauauaaaugugaaagauuauagcauugauuccaguuaugugugcucagggcuuguuggcgacacacccagaaacaacgacagaucuagcaguagcuauugccggaauccuaacaaugagaaagggaaucauggagugaaaggcugggccuuugacgauggaaaugacguguggaugggaagaacgaucagcgaggauucacgcucagguuaugaaaccuucaaagucauuggugguugguccacaccuaauuccaaauugcagauaaauaggcaagucauaguugauagcgauaauaggucagguuauucugguguuuucucuguugagggcaaaagcugcaucaauagaugcuuuuauguggaguugauaaggggaagggaacuggaaacuagagucugguggaccucaaacaguauuguuguguuuuguggcacuucagguaccuaugggacaggcucauggccugauggggcggacaucaaucucaugccuauauaa

SEQ ID NO: 53999 - RNA, 1410 nt, Artificial Sequence; identical to SEQ ID NO: 53998
  derived and/or modified CDS sequence (wt) from neuraminidase__InfluenzaA__AFG98987

SEQ ID NO: 54000 - RNA, 1410 nt, Artificial Sequence
  derived and/or modified CDS sequence (wt) from neuraminidase__InfluenzaA__AFG98998
augaauccaaaucaaaagauaauaacaauuggcucugucucucucaccauugcaacaauaugcuuccucaugcagauugccauccugguaacuacuguaacauugcauuucaagcaauaugagugcgacucccccgcgaacaaccaaguaaugccgugugaaccaauaauaauagaaaggaacauaacagagauaguguauuugacuaacaccaccauagaaaaagagauaugccccaaauuaguggaauacaggaauuggucaaagccacaauguaaaauuacaggauuugcaccuuucucuaaggacaauucaauucggcuuucugcugguggggacauuugggugacgagagaaccuuaugugucaugcgauccuggcaaauguuaucaauuugcacucgggcaggggaccacacuagaaaacaaacauucaaaugacacaauacaugauagaaccccucaucgaacccuauugaugaaugaguuggguguuccauuucacuugggaaccaggcaaguguguauagcaugguccagcucaaguugucacgauggaaaagcauggcugcauguuugugucacuggguaugauaaaaaugcaacugcuagcuucauuuacgaugggaggcuuguagacagcauugguucauggucucaaaauauccucaggacccaggagucggaauguguuuguaucaaugggacuuguacaguaguaaugacugauggaagugcuucaggaagagcugauacuaaaauacuauucauugaagaggggaaaauuguucauauuagcccauugucaggaagugcucagcauguagaggaguguuccuguuauccucgauauccuggugucagauguaucugcagagacaacuggaaaggcucuaauaggccagucguagauauaaaugugaaagauuauagcauugauuccaguuaugugugcucagggcuuguuggcgacacacccagaaaaaacgacagaucuagcaguagcuauugccggaauccuaacaaugaaaaagggaaucacggagugaaaggcugggccuuugacgauggaaaugacguguggaugggaagaacgaucagcgaggauucacgcucagguuaugaaaccuucaaagucauuggugguugguccacaccuaauuccaaauugcagauaaauaggcaagucauaguugacagcgcuaauaggucagguuauucugguauuuucucuguugagggcaaaagcugcaucaauaggugcuuuuauguggaguugauaaggggaagggaacaggaaacuagaguaugguggaccucaaacaguauuguuguguuuuguggcacuucagguaccuaugggacaggcucauggccugauggggcggacaucaaucucaugccuauauaa

SEQ ID NO: 54001 - RNA, 1410 nt, Artificial Sequence
  derived and/or modified CDS sequence (wt) from neuraminidase__InfluenzaA__AFG99009
augaauccaaaucaaaagauaauaacaauuggcucugucucucucaccauugcaacaauaugcuuccucaugcagauugccauccugguaacuacuguaacauugcauuucaagcaauaugagugcgacucccccgcgaacaaccaaguaaugccgugugaaccaauaauaauagaaaggaacauaacagagauaguguauuuggcuaacaccaccauagagaaagagauaugccccaaauuaguggaauacagaaauuggucaaagccgcaauguaaaauuacaggauuugcaccuuuuuccaaggacaauucaauucggcuuucugcugguggggacauuugggugacgagagaaccuuaugugucaugcgauccuggcaaguguuaucaauuugcacucgggcaggggaccacacuagacaacaaacauucaaaugacacaauacaugauagaaccccucaucgaacccuauugaugaaugaguuggguguuccauuucauuugggaaccaggcaaguguguauagcaugguccagcucaaguugucacgauggaaaagcauggcugcauguuugugucacuggguaugauaaaaaugcaacugcuagcuucauuuacgaugggaggcuuguagacaguauugguucauggucuaaaaauauccucaggacccaggagucggaaugcguuuguaucaaugggacuuguacaguaguaaugacugauggaagugcuucaggaagagcugauacuaaaauacuauucauugaagaggggaaaauuguucauauuagcccauugucaggaagugcucaacauguagaggaguguuccuguuauccucgauauccuggugucagauguaucugcagagacaacuggaaaggcucuaauaggcccgucguagauauaaaugugaaagauuauagcauugauuccaguuaugugugcucagggcuuguuggcgacacacccagaaacaacgacagaucuagcaguagcuauugccggaauccuaacaaugagaaagggaaucauggagugaaaggcugggccuuugacgauggaaaugacguguggaugggaagaacgaucagcgaggauucacgcucagguuaugaaaccuucaaagucauuggugguugguccacaccuaauuccaaauugcagauaaauaggcaagucauaguugauagcgauaauaggucagguuauucugguguuuucucuguugagggcaaaagcugcaucaauagaugcuuuuauguggaguugauaaggggaagggaacuggaaacuagagucugguggaccucaaacaguauuguuguguuuuguggcacuucagguaccuaugggacaggcucauggccugauggggcggacaucaaucucaugccuauauaa

SEQ ID NO: 54002 - RNA, 1410 nt, Artificial Sequence
  derived and/or modified CDS sequence (wt) from neuraminidase__InfluenzaA__AFG99020
augaauccaaaucaaaagauaauaacaauuggcucugucucucucaccauugcaacaauaugcuuccucaugcagauugccauccugguaaccacuguaacauugcauuucaagcaauaugagugcgacuccccagcgaacaaccaaguaaugccgugugaaccaauaauaauagaaaggaacauaacagagauaguguauuugacuaacaccaccauagaaaaagagauaugccccaaauuaguggaauacaggaauuggucaaagccacaauguaaaauuacaggauuugcaccuuucucuaaggacaauucaauucggcuuucugcugguggggacauuugggugacgagagaaccuuaugugucaugcgauccuggcaaguguuaucaauuugcacucgggcaggggaccacacuagacaacaaacauucaaaugacacaauacaugauagaaccccucaucgaacccuauugaugaaugaguuggguguuccauuucacuugggaaccaggcaaguguguauagcaugguccagcucaaguugucacgauggaaaagcauggcugcauguuugugucacuggguaugauaaaaaugcaacugcuagcuucauuuacgaugggaggcuuguagacagcauugguucauggucucaaaauauccucaggacccaggagucggaauguguuuguaucaaugggacuuguacaguaguaaugacugauggaagugcuucaggaagagcugauacuaaaauacuauucauugaagaggggaaaauuguucauacuagcccauugucaggaagugcucagcauguagaggaguguuccuguuauccucgauauccuggugucagauguaucugcagagacaacuggaaaggcucuaauaggccagucguagauauaaaugugaaagauuauagcauugauuccaguuaugugugcucagggcuugugggcgacacacccagaaacaaugacagaucuagcaguagcuauugccggaauccuaacaaugaaaaagggacucacggagugaaaggcugggccuuugacgauggaaaugacguguggaugggaagaacgaucagcgaggauucacgcucagguuaugaaaccuucaaagucauuggugguugguccacaccuaauuccaaauugcagauaaauaggcaagucauaguugacagcgauaauaggucagguuauucugguauuuucucuguugagggcaaaagcugcaucaauaggugcuuuuauguggaguugauaaggggaagggaacaggaaacuagaguaugguggaccucaaacaguauuguuguguuuuguggcacuucagguaccuaugggacaggcucauggccugauggggcggacaucaauaucaugccuauauaa

SEQ ID NO: 54003 - RNA, 1410 nt, Artificial Sequence
  derived and/or modified CDS sequence (wt) from neuraminidase__InfluenzaA__AFG99031
augaauccaaaucaaaagauaauaacaauuggcucugucucucucaccauugcaacaauaugcuuccucaugcagauugccauccugguaaccacuguaacauugcauuucaagcaauaugagugcgacuccccagcaaacaaccaaguaaugccgugugaaccaauaauaauagaaaggaacauaacagagauaguguauuugacuaacaccaccauagaaaaagagauaugccccaaauuaguggaauacaggaauuggucaaagccacaauguaaaauuacaggauuugcaccuuucucuaaggacaauucaauucggcuuucugcugguggggacauuugggugacgagagaaccuuaugugucaugcgauccuggcaaguguuaucaauuugcacucgggcaggggaccacacuagacaacaaacauucaaaugacacaauacaugauagaaccccucaucgaacccuauugaugaaugaauuggguguuccauuucacuugggaaccaggcaaguguguauagcaugguccagcucaaguugucacgauggaaaagcauggcugcauguuugugucacuggguaugauaaaaaugcaacugcuagcuucauuuacgaugggaggcuuguagacagcauugguucauggucucaaaauauccucaggacccaggagucggaauguguuuguaucaaugggacuuguacaguaguaaugacugauggaagugcuucaggaagagcugauacuaaaauacuauucauugaagaggggaaaauuguucauacuagcccauugucaggaagugcucagcauguagaggaguguuccuguuauccucgauauccuggugucagauguaucugcagagacaacuggagaggcucuaauaggccagucguagauauaaaugugaaagauuauagcauugauuccaguuaugugugcucagggcuugugggcgacacacccagaaacaacgacagaucuagcaguagcuauugccggaauccuaacaaugaaaaagggacucacggagugaaaggcugggccuuugacgauggaaaugacguguggaugggaagaacgaucagcgaggauucacgcucagguuaugaaaccuucaaagucauuggugguugguccacaccuaauuccaaauugcagauaaauaggcaagucauaguugacagcgauaauaggucagguuauucugguauuuucucuguugagggcaaaagcugcaucaauaggugcuuuuauguggaguugguaaggggaagggaacaggaaacuagaguaugguggaccucaaacaguauuguuguguuuuguggcacuucagguaccuaugggacaggcucauggccugauggggcggacaucaaucucaugccuauauaa

SEQ ID NO: 54004 - RNA, 1410 nt, Artificial Sequence; identical to SEQ ID NO: 46588
  derived and/or modified CDS sequence (wt) from neuraminidase__InfluenzaA__AFG99042

SEQ ID NO: 54005 - RNA, 1410 nt, Artificial Sequence
  derived and/or modified CDS sequence (wt) from neuraminidase__InfluenzaA__AFG99053
augaauccaaaucaaaagauaauaacaauuggcucugucucucucaccauugcaacaauaugcuuccucaugcagauugccauccugguaaccacuguaacauugcauuucaagcaauaugagugcgacuccccagcgaacaaccaaguaaugccgugugaaccaauaauaauagaaaggaacauaacagagauaguguauuugacuaacaccaccauagaaaaagagauaugccccaaauuaguggaauacaggaauuggucaaagccacaauguaaaauuacaggauuugcaccuuucucuaaggacaauucaauucggcuuucugcugguggggacauuugggugacgagagaaccuuaugugucaugcgauccuggcaaguguuaucaauuugcacucgggcaggggaccacacuagacaacaaacauucaaaugacacaauacaugauagaaccccucaucgaacccuauugaugaaugaguuggguguuccauuucacuugggaaccaggcaaguguguauagcaugguccagcucaaguugucacgauggaaaagcauggcugcauguuugugucacuggguaugauaaaaaugcaacugcuagcuucauuuacgaugggaggcuuguagacagcauugguucauggucucaaaauauccucaggacccaggagucggaauguguuuguaucaaugggacuuguacaguaguaaugacugauggaagugcuucaggaagagcugauacuaaaauacuauucauugaagaggggaaaauuguucauacuagcucauugucaggaagugcucagcauguagaggaguguuccuguuauccucgauauccuggugucagauguaucugcagagacaacuggaaaggcucuaauaggccagucguagauauaaaugugaaagauuauagcauugauuccaguuaugugugcucagggcuugugggcgacacacccagaaacaacgacagaucuagcaguagcuauugccggaauccuaacaaugaaaaagggacucacggagugaaaggcugggccuuugacgauggaaaugacguguggaugggaagaacgaucagcgaggauucacgcucagguuaugaaaccuucaaagucauuggugguugguccauaccuaauuccaaauugcagauaaauaggcaagucauaguugacagcgauaauaggucagguuauucugguauuuucucuguugagggcaaaagcugcaucaauaggugcuuuuauguggaguugauaaggggaagggaacaggaaacuagaguaugguggaccucaaacaguauuguuguguuuuguggcacuucagguaccuaugggacaggcucauggccugauggggcggacaucaaucucaugccuauauaa

SEQ ID NO: 54006 - RNA, 1410 nt, Artificial Sequence
  derived and/or modified CDS sequence (wt) from neuraminidase__InfluenzaA__AFG99064
augaauccaaaucaaaagauaauaacaauuggcucugucucucucaccauugcaacaguaugcuuccucaugcaaauugccauccugguaacuacuguaacauugcauuucaagcaauaugagugcgacucccccccgaacaaccaaguaaugccgugugaaccaauaauaauagaaaggaacguaacagagauaguguauuugacuaacaccaccauagagaaagagauaugccccaaauuaguggaauacagaaauuggucaaagccgcaauguaaaauuacaggauuugcaccuuuuucuaaggacaauucaauucgacuuucugcugguggggacauuugggugacgagagaaccuuaugugucaugcgauccuagcaaguguuaucaauuugcacucgggcaggggaccacacuagacaacaaacauucaaaugacacaauacaugauagaaccccucaucgaacccuauugaugaaugaguuggguguuccauuucauuugggaaccaggcaaguguguauagcaugguccagcucaaguugucacgauggaaaagcauggcugcauguuuguaucacuggguaugacaaaaaugcaacugcuagcuucauuuacgaugggaggcuuguagacaguauugguucauggucuaaaaauauccucaggacccaggagucggaaugcguuuguaucaaugggacuuguacaguaguaaugacugauggaagugcuucagaaagagcugacacuaaaauacuauucauugaagaggggaaaauuguucauauuagcccauugucaggaagugcucagcauguagaggaguguuccuguuauccucgauauccuggugucagauguaucugcagagacaacuggaaaggcucuaauaggcccgucguagauauaaaugugaaagauuauagcauuguuuccaguuaugugugcucagggcuuguuggcgacacacccagaaaaaacgacagaucuagcaguagcuauugccggaauccuaacaaugagaaagggaaucauggagugaaaggcugggccuuugacgauggaaaugacguguggaugggaagaacgaucagcgaggagucacgcucagguuaugaaaccuucaaagucauuggugguugguccacaccuaauuccaaauugcaaauaaauaggcaagucauaguugacagcgauaauagguccgguuauucugguauuuucucuguugagggcaaaagcugcaucaauaggugcuuuuauguggaguugauaaggggaagggaacaggaaacuagagucugguggaccucaaacaguauuguuguguuuuguggcacuucagguaccuaugggacaggcucauggccugauggggcggacaucaaucucaugccuauauaa

SEQ ID NO: 54007 - RNA, 1410 nt, Artificial Sequence
  derived and/or modified CDS sequence (wt) from neuraminidase__InfluenzaA__AFG99086
augaauccaaaucaaaagauaauaacaauuggcucugucucucucaccauugcaacaauaugcuuccucaugcaaauugccauccugguaacuacuguaacauugcauuucaagcaauaugagugcgacucccccgcgaacaaccaaguaaugccgugugaaccaauaauaauagaaaggaacguaacagagauaguguauuugacuaacaccaccauagaaaaggagauaugccccaaauuaguggaauacagaaauuggucaaagccgcaauguaaaauuacaggauuugcaccuuuuucuaaggacaauucaauucgacuuucugcugguggggacauuugggugacgagagaaccuuaugugucaugcgauccuggcaaguguuaucaauuugcacucgggcaggggaccacacuagacaacaaacauucaaaugacacaauacaugauagaaccccuuaucgaacccuauugaugaaugaguuggguguuccauuucauuugggaaccaggcaaguguguauagcaugguccagcucaaguugucacgauggaaaagcauggcugcauguuugugucacuggguaugauaaaaaugcaacugcuagcuucauuuacgaugggaggcuuguagacaguauugguucauggucuaaaaauauccucaggacccaggagucggaaugcguuuguaucaaugggacuuguacaguaguaaugacugauggaagugcuucagaaagagcugacacuaaaauacuauucauugaagaggggaaaauuguucauauuagcccauugucaggaagugcucagcauguagaggaguguuccuguuauccucgauauccuggugucagauguaucugcagagacaacuggaaaggcucuaauaggcccgucguagauauaaaugugaaagauuauagcauuguuuccaguuaugugugcucagggcuuguuggcgacacacccagaaaaaacgacagaucuagcaguagcuauugccggaauccuaacaaugagaaagggaaucauggagugaaaggcugggccuuugaugauggaaaugacguguggaugggaagaacgaucagcgaggagucacgcucagguuaugaaaccuucaaagucauuggugguugguccacaccuaauuccaaauugcagauaaauaggcaagucauaguugacagcgauaauagguccgguuauucugguauuuucucuguugagggcaaaagcugcaucaauaggugcuuuuauguggaguugauaaggggaagagaacaggaaacuagagucugguggacaucaaacaguauuguuguguuuuguggcacuucagguaccuaugggacaggcucauggccugauggggcggacaucaaucucaugccuauauaa

SEQ ID NO: 54008 - RNA, 1410 nt, Artificial Sequence
  derived and/or modified CDS sequence (wt) from neuraminidase__InfluenzaA__AFG99097
augaauccaaaucaaaagauaauaacaauuggcucugucucucucaccauugcaacaauaugcuuccucaugcaaauugccauccugguaacuacuguaacauugcauuucaagcaauaugagugcgacucccccgcgaacaaccaaguaaugccgugugaaccaauaauaauagaaaggaacguaacagagauaguguauuugacuaacaccaccauagaaaaagagauaugccccaaauuaguggaauacagaaauuggucaaagccgcaauguaaaauuacaggauuugcaccuuuuucuaaggacaauucaauucgacuuucugcugguggggacauuugggugacgagagaaccuuaugugucaugcgauccuggcaaguguuaucaauuugcacucgggcaggggaccacacuagacaacaaacauucaaaugacacaauacaugauagaaccccuuaucgaacccuauugaugaaugaguuggguguuccauuucauuugggaaccaggcaaguguguauagcaugguccagcucaaguugucacgauggaaaagcauggcugcauguuugugucacuggguaugauaaaaaugcaacugcuagcuucauuuacgaugggaggcuuguagacaguauugguucaugguccaaaaauauccucaggacccaggagucggaaugcguuuguaucaaugggacuuguacaguaguaaugacugauggaagugcuucagaaagagcugacacuaaaauacuauucauugaagaggggaaaauuguucauauuagcccauugucaggaagugcucagcauguagaggaguguuccuguuauccucgauauccuggugucagauguaucugcagagacaacuggaaaggcucuaauaggcccgucguagauauaaaugugaaagauuauagcauuguuuccaguuaugugugcucagggcuuguuggcgacacacccagaaaaaacgacagaucuagcaguagcuauugccggaauccuaacaaugagaaagggaaucauggagugaaaggcugggccuuugaugauggaaaugacguguggaugggaagaacgaucagcgaggagucacgcuuagguuaugaaaccuucaaagucauuggugguugguccacaccuaauuccaaauugcagauaaauaggcaagucauaguugacagcgauaauagguccgguuauucugguauuuucucuguugagggcaaaagcugcaucaauaggugcuuuuauguggaguugauaaggggaagagaacaggaaacuagagucugguggacaucaaacaguauuguuguguuuuguggcacuucagguaccuaugggacaggcucauggccugauggagcggacaucaaucucaugccuauauaa

SEQ ID NO: 54009 - RNA, 1410 nt, Artificial Sequence
  derived and/or modified CDS sequence (wt) from neuraminidase__InfluenzaA__AFG99119
augaauccaaaucaaaagauaauaacaauuggcucugucucucucaccauugcaacaauaugcuuccuuaugcaaauugccauccugguaacuacuguaacauugcauuucaagcaauaugagugcagcucccccccaaacaaccaaguaaugccgugugaaccaauaauaauagaaagaaacauaacagagauaguguauuugacuaacaccaccauagagaaagagauaugccccaaacuaguggaauacagaaauuggucaaagccgcaauguaaaauuacaggauuugcaccuuuuucuaaggacaauucaauucggcuuucugcugguggggacauuugggugacgagagaaccuuaugugucaugcgauccuggcaaguguuaucaauuugcacucgggcaggggaccacacuagacaacaagcauucaaaugacacaauacaugauaggaccccuuaucgaacccuauugaugaaugaguuggguguuccauuucauuugggaaccaggcaaguguguauagcaugguccagcucaaguugucacgauggaaaagcauggcugcauguuugugucacugggcaugauaaaaaugcaacugcuagcuucauuuacgaugggaggcuuguagacaguauugguucaugguccaaaaauauccucaggacccaggagucggaaugcguuuguaucaaugggacuuguacaguaguaaugacugauggaagugcuucagaaagagcugauacuaaaauacuauucauugaagaggggaaaaucguucauauuagcccauugucaggaagugcucagcauguagaggaguguucauguuauccucgauauccuggugucagaugugucugcagagacaacuggaaaggcuccaauaggcccaucguagauauaaaugugaaagauuauagcauuguuuccaguuaugugugcucagggcuuguuggcgacacacccagaaaaaacgacagaucuagcaguagcuauugccggaauccuaacaaugagaaagggaaucauggagugaaaggcugggccuuugacgauggaaaugacguguggaugggaagaacgaucagcgaggagucacgcucagguuaugaaaccuucaaagucauuggugguugguccacaccuaauuccaaauugcagauaaauaggcaagucauaguugacagcgauaauagguccgguuauucugguauuuucucuguugagggcaaaagcugcaucaauaggugcuuuuauguggaguugauaaggggaagggaacaggaaacuagagucugguggaccucaaacaguauuguuguguuuuguggcaccucagguaccuauggaacaggcucauggccugauggggcggacaucaaucucaugccuauauaa

SEQ ID NO: 54010 - RNA, 1410 nt, Artificial Sequence
  derived and/or modified CDS sequence (wt) from neuraminidase__InfluenzaA__AFG99130
augaauccaaaucaaaagauaauaacaauuggcucugucucucucaccauugcaacaauaugcuuccuuaugcaaauugccauccugguaacuacuguaacauugcauuucaagcaauaugagugcagcucccccccaaacaaccaaguaaugccguguggaccaauaauaauagaaagaaacauaacagagauaguguauuugacuaacaccaccauagagaaagagauaugccccaaacuaguggaauacagaaauuggucaaagccgcaauguaaaauuacaggauuugcaccuuuuucuaaggacaauucaauucggcuuucugcugguggggacauuugggugacgagagaaccuuaugugucaugcgauccuggcaaguguuaucaauuugcacucgggcaggggaccacacuagacaacaagcauucaaaugacacaauacaugauaggaccccuuaucgaacccuauugaugaaugaguuggguguuccauuucauuugggaaccaggcaaguguguauagcaugguccagcucaaguugucacgauggaaaagcauggcugcauguuugugucacugggcaugauaaaaaugcaacugcuagcuucauuuacgaugggaggcuuguagacaguauugguucaugguccaaaaauauccucaggacccaggagucggaaugcguuuguaucaaugggacuuguacaguaguaaugaccgauggaagugcuucagaaagagcugauacuaaaauacuauucauugaagaggggaaaaucguucauauuagcccauugucaggaagugcucagcauguagaggaguguuccuguuauccucgauauccuggugucagaugugucugcagagacaacuggaaaggcuccaauaggcccgucguagauauaaaugugaaagauuauagcauuguuuccaguuaugugugcucagggcuuguuggcgacacacccagaaaaaacgacagaucuagcaguagcuauugccggaauccuaacaaugagaaagggaaucauggagugaaaggcugggccuuugacgauggaaaugacguguggaugggaagaacgaucagcgaggagucacgcucagguuaugaaaccuucaaagucauuggugguugguccacaccuaauuccaaauugcagacaaauaggcaagucauaguugacagcgauaauagguccgguuauucugguauuuucucuguugagggcaaaagcugcaucaauaggugcuuuuauguggaguugauaaggggaagggaacaggaaacuagagucugguggaccucaaacaguauuguuguguuuuguggcacuucagguaccuauggaacaggcucauggccugauggagcggacaucaaucucaugccuauauaa

SEQ ID NO: 54011 - RNA, 1410 nt, Artificial Sequence
  derived and/or modified CDS sequence (wt) from neuraminidase__InfluenzaA__AFG99141
augaauccaaaucaaaagauaauaacaauugguucugucucucucaccauugcaacaauaugcuuccuuaugcaaauugccauucugguaacuacuguaacauugcauuucaagcaauaugagugcagcucccccccaaacaaccaaguaaugccgugugaaccaauaauaauagaaagaaacauaacagagauaguguauuugacuaacaccaccauagagaaagagauaugccccaaacuaguggaauacagaaauuggucaaagccgcaauguaaaauuacaggauuugcaccuuuuucuaaggacaauucaauucggcuuucugcugguggggacauuugggugacgagagaaccuuaugugucaugcgauccuggcaaguguuaucaauuugcacucgggcaggggaccacacuagacaacaagcauucaaaugacacaauacaugauaggaccccuuaucgaacccuauugaugaaugaguuggguguuccauuucauuugggaaccaggcaaguguguauagcaugguccagcucaaguugucacgauggaaaagcauggcugcauguuugugucacugggcaugauaaaaaugcaacugcuagcuucauuuacgaugggaggcuuguagacaguauugguucaugguccaaaaauauccucaggacccaggagucggaauguguuuguaucaaugggacuuguacaguaguaaugacugauggaagugcuucagaaagagcugaaacuaaaauacuauucauugaagaggggaaaaucguucauauuagcccauugucaggaagugcucagcauguagaggaguguuccuguuauccucgauauccuggugucagaugugucugcagagacaacuggaaaggcuccaauaggcccgucguagauauaaaugugaaagauuauagcauuguuuccaguuaugugugcucagggcuuguuggcgacacacccagaaaaaacgacagaucuagcaguagcuauugccggaauccuaacaaugagaaagggaaucauggagugaaaggcugggccuuugacgauggaaaugacguguggaugggaagaacgaucagcgaggagucacgcucagguuaugaaaccuucaaggucauuggugguugguccacaccuaauuccaaauugcagauaaauaggcaagucauaguugacagcgauaauagguccgguuauucugguauuuucucuguugagggcaaaagcugcaucaauaggugcuuuuauguggaguugauaaggggaagggaacaggaaacuagagucugguggaccucaaacaguauuguuguguuuuguggcacuucagguaccuauggaacaggcucauggccugauggagcggacaucaaucucaugccuauauaa

SEQ ID NO: 54012 - RNA, 1410 nt, Artificial Sequence
  derived and/or modified CDS sequence (wt) from neuraminidase__InfluenzaA__AFG99152
augaauccaaaucaaaagauaaugacaauuggcucuguuucucucaccauugcaacaauaugcuuccuuaugcaaauugccauccugguaacuacuguaacauugcauuucaagcauuaugaguucagcucccccccaaacaaccaaguaaugccgugugaaccaauaauaauagaaagaaacauaacagagauaguguauuugacuaacaccaccauagagaaagagguaugccccaaacuaguggaauacagaaauuggucaaagccgcaauguaaaauuacaggauuugcaccuuuuucuaaggacaauucaauucggcuuuccgcugguggggacauuugggugacgagagaaccuuaugugucaugcgauccuggcaaguguuaucaauuugcacucgggcagggaaccacacuaaacaacaagcauucaaaugacacaauacaugauaggaccccuuaucgaacccuauugaugaaugaguuggguguuccauuucauuugggaaccaggcaagugugcauagcaugguccagcucaaguugucacgauggaaaagcauggcugcauguuugugucacugggcaugauaaaaaugcaacugcuagcuucauuuacgaugggaggcuuguagacaguauugguucaugguccaaaaauauccucaggacccaggagucggaaugcguuuguaucaaugggacuuguacaguaguaaugacugauggaagugcuucaggaagagcugacacuaaaauacuauucauugaagaggggaaaaucguucauauuagcccauugucaggaagugcccagcauguagaggaguguuccuguuauccucgauauccuggugucagauguguuugcagagacaacuggaaaggcuccaauaggcccaucguagauauaaaugugaaagauuauagcauuguuuccaguuaugugugcucagggcuuguuggcgacacacccagaaaaaacgacagaucuagcaguagcuauugccggaauccuaacaaugagaaagggaaucauggagugaaaggcugggccuuugacgauggaaaugacguguggaugggaagaacgauuggcgaggaguuacgcucagguuaugaaaccuucaaagucauuggugguugguccacaccuaauuccaaauugcagauaaauagacaagucauaguugacagcgauaauagguccgguuauucugguauuuucucuguugagggcaaaagcugcaucaauaggugcuuuuauguggaguugauaagaggaagggaacaggaaacuagagucuuguggaccucaaacaguauuguuguguuuuguggcaccucagguaccuauggaacaggcucauggccugauggagcggacaucaaucucaugccuauauaa

SEQ ID NO: 54013 - RNA, 1410 nt, Artificial Sequence; identical to SEQ ID NO: 51007
  derived and/or modified CDS sequence (wt) from neuraminidase__InfluenzaA__AFG99163

SEQ ID NO: 54014 - RNA, 1410 nt, Artificial Sequence
  derived and/or modified CDS sequence (wt) from neuraminidase__InfluenzaA__AFG99174
augaauccaagucaaaagauaauaacaauugguucugucucucucaccauugcaacaauaugcuuccuuaugcaaaucgccauucugguaacuacuguaacauugcauuucaagcaauaugagugcagcucccccccaaacaaccaaguaaugccgugugaaccaauaauaauagaaagaaacauaacagagauaguguauuugacuaacaccaccauagagaaagagauaugccccaaacuaauggaauacagaaauuggucaaagccgcaauguaaaauuacaggauuugcaccuuuuucuaaggacaauucaauucggcuuucugcugguggggacauuugggugacgagagaaccuuaugugucaugcgauccuggcaaguguuaucaauuugcacucgggcaggggaccacacuagacaacaagcauucaaaugacacaauacaugauaggaccccuuaucgaacccuacugaugaaugaguuggguguuccauuucauuugggaaccaggcaaguguguauagcaugguccagcucaaguugucacgauggaaaagcauggcugcauguuugugucacugggcaugauaaaaaugcaacugcuagcuucauuuacgaugggaggcuuguggacaguauugguucaugguccaaaaauauccucaggacccaggagucggaauguguuuguaucaaugggacuuguacaguaguaaugacugauggaagugcuucagaaagagcugaaacuaaaauacuauucauugaagaggggaaaaucguucauauuagcccauugucaggaagugcucagcauguagaggaguguuccuguuauccucgauauccuggugucagaugugucugcagagacaacuggaaaggcuccaauaggcccgucguagauauaaaugugaaagauuauagcauuguuuccaguuaugugugcucagggcuuguuggugacacacccagaaaaaacgacagaucuagcaguagcuauugucggaauccuaacaaugagaaagggaaucauggagugaaaggcugggccuuugacgauggaaaugacguguggaugggaagaacgaucagcgaggagucacgcucagguuaugaaaccuucaaggucauuggugguugguccacaccuaauuccaaauugcagauaaauaggcaagucauaguugacagcgauaauagguccgguuauucugguauuuucucuguugagggcaaaagcugcaucaauaggugcuuuuauguggaguugauaaggggaagggaacaggaaacuagagucugguggaccucaaacaguauuguuguguuuuguggcacuucagguaccuauggaacaggcucauggccugauggagcggacaucaaucucaugccuauauaa

SEQ ID NO: 54015 - RNA, 1410 nt, Artificial Sequence
  derived and/or modified CDS sequence (wt) from neuraminidase__InfluenzaA__AFG99185
augaauccaaaucaaaagauaauaacaauuggcucuguuucucucaccauugcaacaauaugcuuccuuaugcaaauugccauccugguaacuacuguaacacugcauuucaagcaauaugagugcagcucccccccaaacaaucaaguaaugccgugugaaccaauaauaauagaaagaaacauaacagagauaguguauuugacuaacaccaccauagagaaagagauaugccccaaacuaguggaauacagaaauuggucaaagccgcaauguaaaauuacaggauuugcaccuuuuucuaaggacaauucaauucggcuuuccgcugguggggacauuugggugacgagagaaccuuaugugucaugcgauccuggcaaguguuaucaauuugcacucgggcagggaaccacacuaaacaacaagcauucaaaugacacaauacaugauaggaccccuuaucgaacccuauugaugaaugaguugggugucccauuucauuugggaaccaagcaagugugcauagcaugguccagcucaaguugucacgauggaaaagcauggcugcauguuugugucacugggcaugauaaaaaugcaacugcuagcuucauuuacgaugggaggcuuguagacaguauugguucaugguccaaaaauauucucaggacccaggagucggagugcguuuguaucaaugggacuuguacaguaguaaugacugauggaagugcuucagaaagagcugauacuaaaauacuauucauugaagaggggaaaaucguucauauuagcccauugucaggaagugcucagcauguagaggaguguuccuguuauccucgguauccuggugucagaugugucugcagagacaacuggaaaggcuccaauaggcccaucguagauauaaaugugaaagauuauagcauuguuuccaguuaugugugcucagggcuuguuggcgacacacccagaaaaaacgacagauccagcaguagcuauugccggaauccuaacaaugagaaagggaaucauggagugaaaggcugggccuuugacgauggaaaugacguguggaugggaagaacgauuggcgaggaguuacgcucagguuaugaaaccuucaaagucauuggugguugguccacaccuaacuccaaauugcagauaaauaggcaagucauaguugacagcaaaaauaggucagguuauucugguauuuucucuguugagggcaaaagcugcaucaauaggugcuuuuauguggaguugauaaggggaagggaacaggaaacuagagucugguggaccucaaacaguauuguuguguuuugugguaccucagguacauauggaacaggcucauggccugauggagcggacaucaaucucaugccuauauaa

SEQ ID NO: 54016 - RNA, 1410 nt, Artificial Sequence
  derived and/or modified CDS sequence (wt) from neuraminidase__InfluenzaA__AFG99196
augaauccaaaucaaaagauaauaacaauuggcucuguuucucucaccauugcaacaauaugcuuccuuacgcaaauugccauccugguaacuacuguaacauugcauuucaagcaauaugagugcagcuccuccccaaacaaccaaguaaugccgugugaaccaauaauaauagaaagaaacauaacagagauaguguauuugacuaacaccaccauagagaaagagauaugccccaaacuaguggaauacagaaauuggucaaagccgcaauguaaaauuacaggauuugcaccuuuuucuaaggacaauucaauucggcuuuccgcugguggggacauuugggugacgagagaaccuuaugugucaugcgauccuggcaaguguuaucaauuugcacucgggcagggaaccacacuaaacaacaagcauucaaaugacacaauacaugauaggaccccuuaucgaacccuauugaugaaugaguuggguguuccauuucauuugggaaccaagcaagugugcauagcaugguccagcucaaguugucacgauggaaaagcauggcugcauguuuguaucacugggcaugauaaaaaugcaacugcuagcuucauuuacgaugggaggcuuguagacaguauugguucaugguccaaaaauauccucaggacccaggagucggaaugcguuuguaucaaugggacuuguacaguaguaaugacugauggaagugcuucagaaagagcugauacuaaaauacuauucauugaagaggggaaaaucguucauauuagcccauugucaggaagugcucagcauguagaggaguguuccuguuauccucgauauccuggugucagaugugucugcagagacaacuggaaaggcuccaauaggcccaucguagauauaaauguaaaagauuauagcauuguuuccaguuaugugugcucagggcuuguuggcgacacacccagaaaaaacgacagauccagcaguagcuauugccggaauccuaacaaugagaaagggaaucauggagugaaaggcugggccuuugacgauggaaaugacguguggaugggaagaacgauuggcgaggaguuacgcucagguuaugaaaccuucaaagucauuggugguugguccacaccuaacuccaaauugcagauaaauaggcaagucauaguugacagcgguaauagguccgguuauucugguauuuucucuguugagggcaaaagcugcaucaauaggugcuuuuauguggaguugauaaggggaagggaacaggaaacuagagucugguggaccucaaacaguauuguuguguuuuguggcaccucagguacauauggaacaggcucauggccugauggagcggacaucaaucucaugccuauauaa

SEQ ID NO: 54017 - RNA, 1410 nt, Artificial Sequence
  derived and/or modified CDS sequence (wt) from neuraminidase__InfluenzaA__AFG99207
augaauccaaaucaaaagauaauaacaauuggcucuguuucucucaccauugcaacaauaugcuuccuuaugcaaauugccauccugguaacuacuguaacacugcauuucaagccauaugagugcagcucccccccaaacaaccaaguaaugccgugugaaccaauaauaauagaaagaaacauaacagagauaguguauuugacuaacaccaccauagagaaagagauaugccccaaacuaguggaauacagaaauuggucaaagccgcaauguaaaauuacaggauuugcaccuuuuucuaaggacaauucaauucggcuuuccgcugguggggacauuugggugacgagagaaccuuaugugucaugcgauccuggcaaguguuaucaauuugcacucgggcagggaaccacacuaaacaacaagcauucaaaugacacaauacaugauaggaccccuuaucgaacccuauugaugaaugaguugggugucccauuucauuuggggaccaagcaagugugcauagcaugguccagcucaaguugucacgauggaaaagcauggcugcauguuugugucacugggcaugauaaaaaugcaacugcuagcuucauuuacgaugggaggcuuguagacaguauugguucaugguccaaaaauauccucaggacccaggagucggagugcguuuguaucaaugggacuuguacaguaguaaugacugauggaagugcuucagaaagagcugauacuaaaauacuauucauugaagaggggaaaaucguucauauuagcccauugucaggaagugcucaacauguagaggaguguuccuguuauccucgauauccuggugucagaugugucugcagagacaacuggaaaggcuccaauaggcccaucguagauauaaaugugaaagauuauagcauuguuuccaguuaugugugcucagggcuuguuggcgacacacccagaaaaaacgacagauccagcaguagcuauugccggaauccuaacaaugagaaagggaaucauggagugaaaggcugggccuuugacgauggaaaugacguguggaugggaagaacgauuggcgaggaguuacgcucagguuaugaaaccuucaaagucauuggugguugguccacaccuaacuccaaauugcagauaaauaggcaagucauaguugacagcaaaaguaggucagguuauucugguauuuucucuguugagggcaaaagcugcaucaauaggugcuuuuauguggaguugauaaggggaagggaacaggaaacuagagucugguggaccucaaacaguauuguuguguuuuguggcaccucagguacauauggaacaggcucauggccugauggagcggacaucaaucucaugccuauauaa

SEQ ID NO: 54018 - RNA, 1410 nt, Artificial Sequence
  derived and/or modified CDS sequence (wt) from neuraminidase__InfluenzaA__AFG99218
augaauccaaaucaaaagauaauaacaauuggcucuguuucucucaccauugcaacaauaugcuuccuuaugcaaauugccauccugguaacuacuguaacacugcauuucaagcaauaugagugcagcucccccccaaacaaucaaguaaugccgugugaaccaauaauaauagaaagaaacauaacaaagauaguguauuugacuaacaccaccauagagaaagagauaugccccaaacuaguggaauacagaaauuggucaaagccgcaauguaaaauuacaggauuugcaccuuuuucuaaggacaauucaauucggcuuuccgcugguggggacauuugggugacgagagaaccuuaugugucaugcgauccuggcaaguguuaucaauuugcacucgggcagggaaccacacuaaacaacaagcauucaaaugacacaauacaugauaggaccccuuaucgaacccuauugaugaaugaguugggggucccauuucauuugggaaccaagcaagugugcauagcaugguccagcucaaguugucacgauggaaaagcauggcugcauguuugugucacugggcaugauaaaaaugcaacugcuagcuucauuuacgaugggaggcuuguagacaguauugguucaugguccaaaaauauucucaggacccaggagucggagugcguuuguaucaauggaacuuguacaguaguaaugacugauggaagugcuucagaaagagcugauacuaaaauacuauucauugaagaggggaaaauaguucauauuagcccauugucaggaagugcucagcauguagaggaguguuccuguuauccucgguauccuggugucagaugugucugcagagacaacuggaaaggcuccaauaggcccaucguagauauaaaugugaaagauuauagcauuguuuccaguuaugugugcucagggcuuguuggcgacacacccagaaaaaacgacagauccagcaguagcuauugccagaauccuaacaaugagaaagggaaucauggagugaaaggcugggccuuugacgauggaaaugacguguggaugggaagaacgauuggcgaggaguuacgcucagguuaugaaaccuucaaagucauuggugguugguccacaccuaacuccaaauugcagauaaauaggcaagucauaguugacagcaaaaauaggucagguuauucugguauuuucucuguugagggcaaaagcugcaucaauaggugcuuuuauguggaguugauaaggggaagggaacaggaaacuagagucugguggaccucaaacaguauuguuguguuuuguggcaccucagguacauauggaacaggcucauggccugauggagcggacaucaaucucaugccuauauaa

SEQ ID NO: 54019 - RNA, 1410 nt, Artificial Sequence
  derived and/or modified CDS sequence (wt) from neuraminidase__InfluenzaA__AFG99229
augaauccaaaucaaaagauaauaacaauuggcucuguuucucucaccauugcaacaauaugcuuccuuaugcaaauugccauccugguaacuacuguaacacugcauuucaagcaauaugagugcagcucccccccaaacaaucaaguaaugccgugugaaccaauaauaauagaaagaaacauaacaaagauaguguauuugacuaacaccaccauagagaaagagauaugccccaaacuaguggaauacagaaauuggucaaagccgcaauguaaaauuacaggauuugcaccuuuuucuaaggacaauucaauucggcuuuccgcugguggggacauuugggugacgagagaaccuuaugugucaugcgauccugggaaguguuaucaauuugcacucgggcagggaaccacacuaaacaacaagcauucaaaugacacaauacaugauaggaccccuuaucgaacccuauugaugaaugaguugggugucccauuucauuugggaaccaagcaagugugcauagcaugguccagcucaaguugucacgauggaaaagcauggcugcauguuugugucacugggcaugacaaaaaugcaacugcuagcuucauuuacgaugggaggcuuguagacaguauugguucaugguccaaaaauauucucaggacccaggaaucggagugcguuuguaucaaugggacuuguacaguaguaaugacugauggaagugcuucagaaagagcugauacuaaaauacuauucauugaagaggggaaaaucguucauauuagcccauugucaggaagugcucagcauguagaggaguguuccuguuauccucgguauccuggugucagaugugucugcagagacaacuggaaaggcuccaauaggcccaucguagauauaaaugugaaagauuauagcauuguuuccaguuaugugugcucagggcuuguuggcgacacacccagaaaaaacgacagauccagcaguagcuauugccggaauccuaacaaugagaaagggaaucauggagugaaaggcugggccuuugacgauggaaaugacguguggaugggaagaacgauuggcgaggaguuacgcucagguuaugaaaccuucaaagucauuggugguugguccacaccuaacuccaaauugcagauaaauaggcaagucauaguugacagcaaaaauaggucagguuauucugguauuuucucuguugagggcaaaagcugcaucaauaggugcuuuuauguggaguugauaaggggaagggaacaggaaacuagagucugguggaccucaaacaguauuguuguguuuugugguaccucagguacauauggaacaggcucauggccugauggagcggacaucaaucucaugccuauauaa

SEQ ID NO: 54020 - RNA, 1410 nt, Artificial Sequence
  derived and/or modified CDS sequence (wt) from neuraminidase__InfluenzaA__AFG99240
augaauccaaaucaaaagauaauaacaauuggcucuguuucucucaccauugcaacaauaugcuuccuuaugcaaauugccauccugguaacuacuguaacacugcauuucaagcaauaugagugcagcucccccccaagcaaucaaguaaugccgugugaaccaauaauaauagaaagaaacauaacagagauaguguauuugaccaacaccaccauagagaaagagauaugccccaaaccaguggaauacagaaauuggucaaagccgcaaugcaaaauuacaggauuugcacccuuuucuaaggacaauucaauucggcuuuccgcugguggggacauuugggugacgagagaaccuuaugugucaugcgauccuggcaaguguuaucaauuugcacucgggcagggaaccacacuaaacaacaagcauucaaaugacacaauacaugauaggaccccuuaucgaacccuauugaugaaugaguugggugucccauuucauuugggaaccaagcaagugugcauagcaugguccagcucaaguugucacgauggaaaagcauggcugcauguuugugucacugggcaugauaaaaaugcaacugcuagcuucauuuacgaugggaggcuuguagacaguauugguucaugguccaaaaauauucucaggacccaggagucggagugcguuuguaucaaugggacuuguacaguaguaaugacugauggaagugcuucagaaagagcugauacuaaaauacuauucauugaagaggggaaaaucguucauauuagcccauuaucaggaagugcucagcauguagaggaguguuccuguuauccucgguauccuggugucagaugugucugcagagacaacuggaaaggcuccaauaggcccaucguagauauaaaugugaaagauuauagcauuguuuccaguuaugugugcucagggcuuguuggcgacacacccagaaaaaaugacagauucagcaguagcuauugccggaauccuaacaaugagaaagggaaucauggagugaaaggcugggccuuugacgauggaaaugacguguggaugggaagaacaauuggcgaggaguuacgcucagguuaugaaaccuucaaagucauuggugguugguccacaccuaacuccaaauugcagauaaauaggcaagucauaguugacagcaaaaauaggucagguuauucugguauuuucucuguugagggcaaaagcugcaucaauaggugcuuuuauguagaguugauaaggggaagggaacaggaaacuagagucugguggaccucaaacaguauuguuguguuuugugguaccucagguacauauggaacaggcucauggccugauggagcggacaucaaucucaugccuauauaa

SEQ ID NO: 54021 - RNA, 1410 nt, Artificial Sequence
  derived and/or modified CDS sequence (wt) from neuraminidase__InfluenzaA__AFG99251
augaauccaaaucaaaagauaauaacaauuggcucuguuucucucacuauugccacaauaugcuuucuuaugcaaauugccauccugguaacuacuguaacauugcauuucaagcaauaugagugcagcucccccccaaacaaccaaguaaugccgugugaaccaacaauaauagaaagaaacauaacagagauaguguauuugacuaacaccaccauagagaaagagauaugccccaaacuaguagaauacagaaauuggucaaagccgcaauguaaaauuacaggauuugcaccuuuuucuaaggacaauucaauucggcuuuccgcugguggagacauuugggugacaagagaaccuuaugugucaugcgauccuggcaaguguuaucaauuugcacuugggcagggaaccacacuaaacaacaggcauucaaaugacacaguacaugauaggaccccuuaucgaacccucuugaugaaugaguuggguguuccauuucauuugggaaccaagcaagugugcauagcaugguccagcucaaguugucacgauggaaaagcauggcugcauguuugugucacugggcaugauaaaaaugcaacugcuagcuucauuuacgaugggaggcuuguagacaguauugguucaugguccaaaaauauccucaggacccaggagucggaaugcguuuguaucaaugggacuuguacaguaguaaugacugauggaagugcuucagaaagagcugauacuaaaauacuauucauugaagaggggaaaaucguucauauuagcccauugucaggaagugcucagcauguagaggagugcuccuguuauccucgauauccuggugucagaugugucugcagagacaacuggaaaggcuccaauaggcccaucguagauauaaaugugaaagauuauagcauuguuuccaguuaugugugcucagggcuuguuggagacacacccagaaaaaacgacagauccagcaguagcuauugccggaauccuaacaaugagaaagggagucauggagugaaaggcugggccuuugacgauggaaaugacguguggaugggaagaacgaucggagaggaguuacgcucagguuaugaaaccuucaaagucauuggagguugguccacaccuaacuccaaauugcagauaaauaggcaagucauaguugacagcgguaauagguccgguuauucugguauuuucucuguugagggcaaaagcugcaucaaucggugcuuuuauguggaguugauaaggggaagggaacaggaaacuagagucugguggaccucaaacaguauuguuguguuuuguggcaccucagguacauauggaacaggcucauggccugauggggcggacaucaaucucaugccuauauaa

SEQ ID NO: 54022 - RNA, 1410 nt, Artificial Sequence
  derived and/or modified CDS sequence (wt) from neuraminidase__InfluenzaA__AFG99273
augaauccaaaucaaaagauaauaacaauuggcucuguuucucucaccauugccacaaugugcuuccuuaugcaaauugccauccugguaacuacuguaacacugcauuucaagcaauaugagugcagcucccccccaaacaaccaaguaaugccgugugaaccaacaauaauagaaagaaacauaacagagauaguguauuugacuaacaccaccauagagaaagagauaugccccaaacuaguagaauacagaaauuggucaaagccgcaauguaaaauuacaggauuugcaccuuuuucuaaggacaauucaauucggcuuuccgcugguggagacauuugggugacaagagaaccuuaugugucaugcgauccuggcaaguguuaucaauuugcacuugggcagggaaccacacuaaacaacaggcauucaaaugacacaguacaugauagaaccccuuaucgaacccucuugaugaaugaauuggguguuccauuucauuugggaaccaagcaagugugcauagcaugguccagcucaaguugucacgauggaaaagcauggcugcauguuugugucacugggcaugauaaaaaugcaacugcuagcuucauuuacgaugggaggcuuguagacaguauugguucaugguccaaaaauauccucaggacccaggagucggaaugcguuuguaucaaugggacuuguacaguaguaaugacugauggaagugcuucagaaagagcugauacuaaaauacuauucauugaagaggggaaaaucguucauauuagcccauugucaggaagugcucagcauguagaggagugcuccuguuauccucgauauccuggugucagaugugucugcagagacaacuggaaaggcuccaauaggcccaucguagauauaaaugugaaagauuauagcauuguuuccaguuaugugugcucagggcuuguuggagacacacccagaaaaaacgacagauccagcaguagcuauugccggaauccuaacaaugagaaagggagucauggggugaaaggcugggccuuugacgauggaaaugacguguggaugggaagaacgaucggcgaggaguuacgcucagguuaugaaaccuucaaagucauuggagguugguccacaccuaacuccaaauugcagauaaauaggcaagucauaguugacagcgguaauagguccgguuauucugguauuuucucuguugagggcaaaagcugcaucaaucggugcuuuuauguggaguugauaaggggaagggaacaggaaacuagagucugguggaccucaaacaguauuguuguguuuuguggcaccucagguacauauggaacaggcucauggccugauggggcggacaucaaucucaugccuauauaa

SEQ ID NO: 54023 - RNA, 1410 nt, Artificial Sequence
  derived and/or modified CDS sequence (wt) from neuraminidase__InfluenzaA__AFG99284
augaauccaaaucaaaagauaauaacaauuggcucuguuucucucaccauugcaacaauaugcuuccuuaugcaaauugccauccugguaacuacuguaacacugcauuucaagcaauaugagugcagcucccccccaagcaaucaaguaaugccgugugaaccaauaauaauagaaagaaacauaacaaagauaguguacuugacuaacaccaccauagagaaagagauaugccccaaacuaguggaauacagaaacuggucaaagccgcaauguaaaauuacaggauuugcaccuuuuucuaaggacaauucaauucggcuuuccgcugguggggacauuugggugacgagagaaccuuaugugucaugcgauccuagcaaguguuaucaauuugcacucgggcagggaaccacacuaaacaacaagcauucaaaugacacaauacaugauaggaccccuuaucgaacccuauuaaugaaugaguugggugucccauuccauuugggaaccaagcaagugugcauagcaugguccagcucaaguugucacgauggaaaagcauggcugcauguuugugucacuggacaugaugauaaugcaacugcuagcuucauuuacgaugggaggcuuguagacaguauugguucaugguccaaaaauauucucaggacccaggagucggagugcguuuguaucaaugggacuuguacaguaguaaugacugauggaagugcuucagagagagcugauacuaaaauacuauucauugaagaggggaaaaucguucauauuagcccauugucaggaagugcucagcauguagaggaguguucuuguuauccucgguauccuggugucagaugugucugcagagacaauuggaaaggcuccaauaggcccaucguagauauaaaugugaaagauuauagcauuguuuccaguuaugugugcucagggcuuguuggcgacacacccagaaaaaacgacagauccagcaguagcuauugccggaauccuaacaaugagaaagggagucauggagugaaaggcugggccuuugacgauggaaaugacguguggauggggagaacgauuggcgaggaguuacgcucagguuaugaaaccuucaaagucauuggugguugguccacaccuaacuccaaauugcagauaaauaggcaagucauaguugacagcaaaaauaggucagguuauucugguauuuucucuguugagggcaaaagcugcaucaauaggugcuuuuauguggaguugauaaggggaagggaacaggaaacuagagucugguggaccucaaacaguauuguuguguuuuguggcaccucagguacauauggaacaggcucauggccugauggagcggacaucaaucucaugccuauauaa

SEQ ID NO: 54024 - RNA, 1410 nt, Artificial Sequence
  derived and/or modified CDS sequence (wt) from neuraminidase__InfluenzaA__AFG99295
augaauccaaaucaaaagauaauaacaauuggcucuguuucucucaccauugccacaauaugcuuucuuaugcaaauugccauccugguaacuacuguaacauugcauuucaagcaauaugagugcagcucccccccgaacaaccaaguaaugccgugugaaccaacaauaauagaaagaaacauaaccgagauaguguauuugacuaacaccaccauagagaaagagauaugccccaaacuaguagaauacagaaauuggucaaagccgcaauguaaaauuacaggauuugcaccuuuuucuaaggacaauucaauucggcuuuccgcugguggagacauuugggugacaagagaaccuuaugugucaugcgauccugacaaguguuaucaauuugcacuugggcagggaaccacacuaaacaacaggcauucaaaugacacaguacaugauaggaccccuuaucgaacccucuugaugaaugaguuggguguuccauuucauuugggaaccaagcaggugugcauagcaugguccagcucaaguugucacgauggaaaagcauggcugcauguuugugucacugggcaugauaaaaaugcaacugcuagcuucauuuacaaugggcggcuuguagacaguauugguucaugguccaaaaauauccucaggacccaggagucggaaugcguuuguaucaaugggacuuguacaguaguaaugacugauggaagugcuucagaaagagcugauacuaaaauacuauucauugaagaggggaagaucguucauauuagcccauugucagggagugcucagcauguagaggagugcuccuguuauccucgauauccuggugucagaugugucugcagagacaacuggaaaggcuccaauaggcccaucguagauauaaaugugaaagauuauagcauuauuuccaguuaugugugcucagggcuuguuggagacacacccagaaaaaacgacagauccagcaguagcuauugccagaauccuaacaaugagaaagggagccauggagugaaaggcugggccuuugaugauggaaaugacguguggaugggaagaacgaucggcgaggaguuacgcucagguuaugaaaccuucaaagucauuggagguugguccacaccuaacuccaaauugcagauaaauaggcaagucauaguugacagcgguaauagguccgguuauucugguauuuucucuguugagggcaaaagcugcaucaaucggugcuuuuauguggaguugauaaggggaaggaaacaggaaacuagagucugguggaccucaaacaguauuguuguguuuuguggcaccucagguacauauggaacaggcucauggccugauggggcggacaucaaucucaugccuauauaa

SEQ ID NO: 54025 - RNA, 1410 nt, Artificial Sequence
  derived and/or modified CDS sequence (wt) from neuraminidase__InfluenzaA__AFG99317
augaauccaaaucaaaagauaauaacaauuggcucuguuucucucaccauugccacaauaugcuuccuuaugcaaauugccauccugguaacuacuguaacauugcauuucaagcaauaugagugcagcucccccccaaacaaccaaguaaugccgugugaaccaacaauaauagaaagaaacauaacagagauaguguauuugacuaauaccaccauagagaaagagauaugucccaaacuaguagaauacagaaauuggucaaagccgcaauguaauauuacaggauuugcaccuuuuucuaaggacaauucaauucggcuuucugcugguggagacauuugggugacaagagaaccuuaugugucaugcgauccuggcaaguguuaucaauuugcacuugggcagggaaccacacuaaacaacaggcauucaaaugacacaguacaugauaggaccccuuaucgaacccucuugaugaaugaguuggguguuccauuucauuugggaaccaagcaagugugcauagcaugguccagcucaaguugucacgauggaaaagcauggcugcauguuugugucacugggcaugaugaaaaugcaacugcuagcuucauuuacgaugggaggcuuguagacaguauugguucaugguccaaaaauauucucaggacccaggagucggaaugcguuuguaucaaugggacuuguacaguaguaaugacugauggaagugcuucagaaagagcugauacuaaaauacuauucauugaagaggggaaaaucguucacauuagcccauugucaggaagugcucagcauguagaggaguguuccuguuauccucgauauccuggugucagaugugucugcagagacaacuggaaaggcuccaauaggcccaucguagauauaaaugugaaagauuauagcauuguuuccaguuaugugugcucagggcuugucggagacacacccagaaaaaacgacagauccagcaguagcuauugccggaauccuaacaaugagaaagggagucauggagugaaaggcugggccuuugacgauggaaaugacguguggaugggaagaacgaucgacgaggaguuacgcucagguuaugaaaccuucaaagucauuggagguugguccacaccuaacuccaaauugcagauaaauaggcaagucauaguugacagcgguaauaggucugguuauucugguauuuucucuguugagggcaaaagcugcaucaaucggugcuuuuauguggaguugauaaggggaaggaaacaggaaacuagagucugguggaccucaaacaguauuguuguguuuuguggcaccucagguacauauggaacaggcucauggccugauggggcggacaucaaucucaugccuauauaa

SEQ ID NO: 54026 - RNA, 1410 nt, Artificial Sequence
  derived and/or modified CDS sequence (wt) from neuraminidase__InfluenzaA__AFG99328
augaauccaaaucaaaagauaauaacaauuggcucuguuucucucacccuugccacaauaugcuuccuuaugcaaauugccauccugguaacuacuguaacauugcauuucaagcaauaugagugcagcucccccccaaacaaccaaguaaugccgugcgaaccaacaauaauagaaagaaacauaacagagauaguguauuugaccaacaccaccauagagaaagagauaugccccaaacuaguagaauacagaaauuggucaaagccgcaauguaaaauuacaggauuugcaccuuuuucuaaggacaauucaauucggcuuuccgcugguggagacauuuggguaacaagagaaccuuaugugucaugcgauccuagcaaguguuaucaauuugcacuugggcagggaaccacacuaaacaacaggcauucaaaugacacaguacaugauaggaccccuuaucgaacucucuugaugaaugaguuggguguuccauuucauuugggaaccaggcaagugugcauggcaugguccagcucaagcugccacgauggaaaagcauggcugcauguuugugucacugggcaugaugaaaaugcaacugcuagcuucauuuacgaugggaggcuuguagacaguauugguucaugguccaaaaauguccucaggacccaggagucggaaugcguuuguaucaaugggacuuguacaguaguaaugacugauggaagugcuucagaaagagcugauacuaaaauacuauucauugaagaggggaaaaucguucauauuagcccauugucaggaaaugcucagcauguggaggagugcuccuguuauccucgauauccuggugucagaugugucugcagagacaacuggaaaggcuccaauaggcccaucguagauauaaaugugaaagauuauagcauuguuuccaguuaugugugcucagggcuuguuggagacacacccagaaaaaacgacagauccagcaguagcuauugccggaauccuaauaaugagaaagggagucauggagugaaaggcugggccuuugacgauggaaaugacguguggaugggaagaacgaucggcgaggaguuacgcucagguuaugaaaccuucaaagucauuggagguugguccacaccuaacuccaaauugcagauaaauaggcaagucauaguugacagcgguaauagguccgguuauucugguauuuucucuguugagggcaaaagcugcaucaaucggugcuuuuauguggaguugauaaggggaaggaaacaggaaacuagagucugguggaccucaaacaguauuguuguguuuugcggcaccucagguacauauggaacaggcucauggccugauggggcggacaucaaucucaugccuauauaa

SEQ ID NO: 54027 - RNA, 1410 nt, Artificial Sequence
  derived and/or modified CDS sequence (wt) from neuraminidase__InfluenzaA__AFG99350
augaauccaaaucaaaagauaauaacaauuggcucuguuucucucacccuugccacaauaugcuuccuuaugcaaauugccauccugguaacuacuguaacauugcauuucaagcaauaugagugcagcucccccccaaacaaccaaguaaugccgugcgaaccaacaauaauagaaagaaacauaacagagauaguguauuugaccaacaccaccauagagaaagagauaugccccaaacuaguagaauacagaaauuggucaaagccgcaauguaaaauuacaggauuugcaccuuuuucuaaggacaauucaauucggcuuuccgcugguggagacauuuggguaacaagagaaccuuaugugucaugcgauccuagcaaguguuaucaauuugcacuugggcagggaaccacacuaaacaacaggcauucaaaugacacaguacaugauaggaccccuuaucgaacucucuugaugaaugaguuggguguuccauuucauuugggaaccaggcaagugugcauggcaugguccagcucaagcugccacgauggaaaagcauggcugcauguuugugucacugggcaugaugaaaaugcaacugcuagcuucauuuacgaugggaggcuuguagacaguauugguucaugguccaaaaauauccucaggacccaggagucggaaugcguuuguaucaaugggacuuguacaguaguaaugacugauggaagugcuucagaaagagcugauacuaaaauacuauucauugaagaggggaaaaucguucauauuagcccauugucaggaagugcucagcauguggaggagugcuccuguuauccucgauauccuggugucagaugugucugcagagacaacuggaaaggcuccaauaggcccaucguagauauaaaugugaaagauuauagcauuguuuccaguuaugugugcucagggcuuguuggagacacacccagaaaaaacgacagauccagcaguagcuauugccggaauccuaauaaugagaaagggagucauggagugaaaggcugggccuuugacgauggaaaugacguguggaugggaagaacgaucggcgaggaguuacgcucagguuaugaaaccuucaaagucauuggagguugguccacaccuaacuccaaauugcagauaaauaggcaagucauaguugacagcgguaauagguccgguuauucugguauuuucucuguugagggcaaaagcugcaucaaucggugcuuuuauguggaguugauaaggggaaggaaacaggaaacuagagucugguggaccucaaacaguauuguuguguuuugcggcaccucagguacauauggaacaggcucauggccugauggggcggacaucaaucucaugccuauauaa

SEQ ID NO: 54028 - RNA, 1410 nt, Artificial Sequence
  derived and/or modified CDS sequence (wt) from neuraminidase__InfluenzaA__AFG99361
augaauccaaaucaaaagauaauaacaauuggcucuguuucucucacuauugccacaauaugcuuccuuaugcaaauugccauccugguaacuacuguaacauugcauuucaagcaauaugagugcaacucccccccaaacaaccaaguaaugcugugugaaccaacaauaauagaaagaaacauaacagagauaguguaucugaccaacaccaccauagagaaagaaaaaugccccaaacuagcagaauacagaaauuggucaaagccgcaauguaaaauuacaggauuugcaccuuuuucuaaggacaauucaauucggcuuuccgcugguggagacauuugggugacaagagaaccuuaugugucaugcgauccuggcaaguguuaucaauuugcccuuggacagggaacaacacuaaacaacaggcacucaaaugacacaguacaugauaggaccccuuaucgaacccuauugaugaaugaguuggguguuccauuucauuugggaaccaagcaagugugcauagcaugguccagcucaaguugucacgauggaaaagcauggcugcauguuuguguaacugggcaugaugaaaaugcaacugcuagcuucauuuacgaugggaggcuuguagauaguauugguucaugguccaaaaauauccucaggacccaggagucggaaugcguuuguaucaauggaacuuguacaguaguaaugacugauggaagugcuucagaaagagcugauacuaaaauacuauucauugaagaggggaaaaucguucauauuagcccauugucaggaagugcucagcaugucgaggagugcuccuguuauccucgauauccuggugucagaugugucugcagagacaacuggaaaggcuccaauaggcccaucguagauauaaaugugaaagauuauagcauuguuuccaguuaugugugcucaggacuuguuggagacacacccagaaaaaacgacagcuccagcaguagcuauugccggaauccuaacaaugagaaagggagucauggagugaaaggcugggccuuugaugauggaaaugacguguggaugggaagaacgaucagcgaggaguuacgcucagguuaugaaaccuucaaagucauuggaggcugguccaaaccuaacuccaaauugcagauaaauaggcaagucauaguugacagagguaauagguccgguuauucugguauuuucucuguugaaggcaaaagcugcaucaaucggugcuuuuauguggaguugauaaggggaaggaaacaggaaacugaagucugguggaccucaaacaguauuguuguguuuuguggcaccucagguacauauggaacaggcucauggccugauggggcggacaucaaucucaugccuauauaa

SEQ ID NO: 54029 - RNA, 1410 nt, Artificial Sequence
  derived and/or modified CDS sequence (wt) from neuraminidase__InfluenzaA__AFG99383
augaauccaaaucaaaagauaauaacaauuggcucuguuucucucaccauugccacaauaugcuuccuuaugcaaauugccauccugguaacuacuguaacauugcauuucaagcaauaugagugcagcucccccccaaacaaccaaguaaugccgugugaaccaacaauaauagaaagaaacauaacagagauaguguauuugacuaacaccaccauagagaaagagauaugccccaaacuaguagaauacagaaauuggucaaagccgcaauguaaaauuacaggauuugcaccuuuuucuaaggacaauucaauucggcuuuccgcugguggagacauuugggugacaagagaaccuuaugugucaugcgauccuggcaaguguuaucaauuugcacuuggacagggaaccacacuaaacaacaggcauucaaaugacacaguacaugauaggaccccuuaucgaacccucuugaugaaugaguuggguguuccauuucauuugggaaccaagcaagugugcauagcaugguccagcucaaguugucacgauggaaaagcauggcugcauguuugugucacugggcaugaugaaaaugcaacugcuagcuucauuuacgaugggaggcuuguagauaguauugguucaugguccaaaaauauccucaggacccaggagucggaaugcguuuguaucaaugggacuuguacaguaguaaugacugauggaagugcuucagaaagagcugauacuaaaauacuauucauugaagaggggaaaaucguucauauuagcccauugucaggaagugcucagcauguagaggagugcuccuguuauccucgauauccuggugucagaugugucugcagagacaacuggaaaggcuccaauaggcccaucguagauauaaaugugaaagauuauagcauuguuuccaguuaugugugcucagggcuuguuggagacacacccagaaaaaacgacagcuccagcaguagcuauugccggaauccuaacaaugagaaagggagucauggagugaaaggcugggccuuugacgauggaaaugacguguggaugggaagaacgaucggcgaggaguuacgcucagguuaugaaaccuucaaagucauuggagguugguccacaccuaacuccaaauugcagauaaauaggcaagucauaguugacagcgguaauagguccgguuauucugguauuuucucuguugagggcaaaagcugcaucaaucggugcuuuuauguggaguugauaaggggaaggaaacaggaaacuaaagucugguggaccucaaacaguauuguuguguuuuguggcaccucagguacauauggaacaggcucauggccugauggggcggacaucaaucucaugccuauauaa

SEQ ID NO: 54030 - RNA, 1410 nt, Artificial Sequence; identical to SEQ ID NO: 54029
  derived and/or modified CDS sequence (wt) from neuraminidase__InfluenzaA__AFG99394

SEQ ID NO: 54031 - RNA, 1410 nt, Artificial Sequence
  derived and/or modified CDS sequence (wt) from neuraminidase__InfluenzaA__AFG99405
augaauccaaaucaaaagauaauaacaauuggcucuguuucucucaccauugccacaauaugcuuccuuaugcaaauugccauccugguaacuacuguaacauugcauuucaagcaauaugagugcagcucccccccaaacaaccaaguaaugccgugugaaccaacaauaauagaaagaaacauaacagagauaguguauuugacuaacaccaccauagagaaagagauaugccccaaacuaguagaauacagaaauuggucaaagccgcaauguaaaauuacaggauuugcaccuuuuucuaaggacaauucaauucggcuuuccgcugguggagacauuugggugacaagagaaccuuaugugucaugcgauccuggcaaguguuaucaauuugcacuugggcagggaaccacacuaaacaacaggcauucaaaugacacaguacaugauaggaccccuuaucgaacccucuugaugaaugaguuggguguuccauuucauuugggaaccaagcaagugugcauagcaugguccagcucaaguugucacgauggaaaagcauggcugcauguuugugucacugggcaugauaaaaaugcaacugcuagcuucauuuacgaugggaggcuuguagacaguauugguucaugguccaaaaauauccucaggacccaggagucggaaugcguuuguaucaaugggacuuguacaguaguaaugacugauggaagugcuucagaaagagcugauacuaaaauacuauucauugaagaggggaaaaucguucauauuagcccauugucaggaagugcucagcauguagaggagugcuccuguuauccucgauauccuggugucagaugugucugcagagacaacuggaaaggcuccaauaggcccaucguagauauaaaugugaaagauuauagcauuauuuccaguuaugugugcucagggcuuguuggagacacacccagaaaaaacgacagauccagcaguagcuauugccggaauccuaacaaugagaaagggagucauggagugaaaggcugggccuuugacgauggaaaugacguguggaugggaagaacgaucggcgaggaguuacgcucagguuaugaaaccuucaaagucauuggagguugguccacaccuaacuccaaauugcagauaaauaggcaagucauaguugacagcgguaauagguccgguuauucugguauuuucucuguugagggcaaaagcugcaucaaucggugcuuuuauguggaguugauaaggggaagggaacaggaaacuagagucugguggaccucaaacaguauuguuguguuuugugguaccucagguacauauggaacaggcucauggccugauggggcggacaucaaucucaugccuauauaa

SEQ ID NO: 54032 - RNA, 1410 nt, Artificial Sequence
  derived and/or modified CDS sequence (wt) from neuraminidase__InfluenzaA__AFG99416
augaauccaaaucaaaagauaauaacaauuggcucuguuucucucaccauugccacaauaugcuuccuuaugcaaauugccauccugguaacuacuguaacauugcauuucaagcaauaugagugcagcucccccccaaacaaccaaguaaugccgugugaaccaacaauaauagaaagaaacauaacagagauaguguauuugacuaacaccaccauagagaaagagauaugccccaaacuaguagaauacagaaauuggucaaagccgcaauguaaaauuacaggauuugcaccuuuuucuaaggacaauucaauucggcuuuccgcugguggagacauuugggugacaagagaaccuuaugugucaugcgauccuggcaaguguuaucaauuugcacuuggacagggaaccacacuaaacaacaggcauucaaaugacacaguacaugauaggaccccuuaucgaacccucuugaugaaugaguuggguguuccauuucauuugggaaccaagcaagugugcauagcaugguccagcucaaguugucacgauggaaaagcauggcugcauguuugugucacugggcaugaugaaaaugcaacugcuagcuucauuuaugaugggaggcuuguagauaguauugguucaugguccaaaaauauccucaggacccaggagucggaaugcguuuguaucaaugggacuuguacaguaguaaugacugauggaagugcuucagaaagagcugauacuaaaauacuauucauugaagaggggaaaaucauucauauuagcccauugucaggaagugcucagcauguagaggagugcuccuguuauccucgauauccuggugucagaugugucugcagagacaacuggaaaggcuccaauaggcccaucguagauauaaaugugaaagauuauagcauuguuuccaguuaugugugcucagggcuuguuggagacacacccagaaaaaacgacagcuccagcaguagcuauugccggaauccuaacaaugagaaagggagucauggagugaaaggcugggccuuugacgauggaaaugacguguggaugggaagaacgaucggcgaggaguuacgcucagguuaugaaaccuucaaagucauuggagguugguccacaccuaacuccaaauugcagauaaauaggcaagucauaguugacggcgguaauagguccgguuauucugguauuuucucuguugagggcaaaagcugcaucaaucggugcuuuuauguggaguugauaaggggaaggaaacaggaaacuaaagucugguggaccucaaacaguauuguuguguuuuguggcaccucagguacauauggaacaggcucauggccugauggggcggacaucaaucucaugccuauauaa

SEQ ID NO: 54033 - RNA, 1410 nt, Artificial Sequence
  derived and/or modified CDS sequence (wt) from neuraminidase__InfluenzaA__AFG99427
augaauccaaaucaaaagauaauaacaauuggcucuguuucucucaccauugccacaauaugcuuccuuaugcaaauugccauccugguaacuacuguaacauugcauuucaagcaauaugagugcagcucccccccaaacaaccaaguaaugccgugugaaccaacaauaauagaaagaaacauaacagagauaguguauuugacuaacaccaccauagagaaagagguaugccccaaacuaguagaauacagaaauuggucaaagccgcaauguaaaauuacaggauuugcaccuuuuucuaaggacaauucaauucggcuuuccgcugguggagacauuugggugacaagagaaccuuaugugucaugcgauccuggcaaguguuaucaauuugcacuuggacagggaaccacacuaaacaacaggcauucaaaugacacaguacaugauaggaccccuuaucgaacccucuugaugaaugaguuggguguuccauuucauuugggaaccaagcaagugugcauagcaugguccagcucaaguugucacgauggaaaagcauggcugcauguuugugucacugggcaugaugaaaaugcaacugcuagcuucauuuacgaugggaggcuuguagauaguauugguucaugguccaaaaauauccucaggacccaggagucggaaugcguuuguaucaaugggacuuguacaguaguaaugacugauggaagugcuucagaaagagcugauacuaaaauacuauucauugaagaggggaaaaucauucauauuagcccauugucaggaagugcucagcauguagaggagugcuccuguuauccucgauauccuggugucagaugugucugcagagacaacuggaaaggcuccaauaggcccaucguagauauaaaugugaaagauuauagcauuguuuccaguuaugugugcucagggcuuguuggagacacacccagaaaaaacgacagcuccagcaguagcuauugccggaauccuaacaaugagaaagggagucauggagugaaaggcugggccuuugacgauggaaaugacguguggaugggaagaacgaucggcgaggaguuacgcucagguuaugaaaccuucaaagucauuggagguugguccacaccuaacuccaaauugcagauaaauaggcaagucauaguugacagcgguaauagguccgguuauucugguauuuucucuguugagggcaaaagcugcaucaaucggugcuuuuauguggaguugauaaggggaaggaaacaggaaacuaaagucugguggaccucaaacaguauuguuguguuuuguggcaccucagguacauauggaacaggcucauggccugauggggcggacaucaaucucaugccuauauaa

SEQ ID NO: 54034 - RNA, 1410 nt, Artificial Sequence
  derived and/or modified CDS sequence (wt) from neuraminidase__InfluenzaA__AFG99438
augaauccaaaucaaaagauaauaacaauuggcucuguuucucucaccauugccacaauaugcuuccuuaugcaaauugccauccugguaacuacuguaacauugcauuucaggcaauaugagugcagcucccccccaaacaaccaaguaaugccgugcgaaccaacaauaauagaaagaaacauaacagagauaguguauuugacuaacaccaccauagagaaagagauaugccccaaacuaguagaauacagaaauuggucaaagccgcaauguaaaauuacaggauuugcaccuuuuucuaaggacaauucaauucggcuuuccgcugguggagacauuugggugacaagagaaccuuaugugucgugcgauccuggcaaguguuaucaauuugcacuugggcagggaaccacacuaaacaacaggcauucaaaugacacaguacaugauaggaccccuuaucgaacccucuugaugaaugaguuggguguuccauuucauuugggaaccaagcaagugugcauggcaugguccagcucaagcugucacgauggaaaagcauggcugcauguuugugucacugggcaugaugaaaaugcaacugcuagcuucauuuacgaugggaggcuuguagacaguauugguucaugguccaaaaauauccucaggacccaggagucggaaugcguuuguaucaaugggacuuguacaguaguaaugacugauggaagugcuucagaaagagcugauacuaaaauacuauucauugaagaggggaaaaucguucauauuagcccauugucaggaagugcucagcauguagaggagugcuccuguuauccucgauauccuggugucagaugugucugcagagacaacuggaaaggcuccaauaggcccaucguagauauaaaugugaaagauuauagcauugucuccaguuaugugugcucagggcuuguuggagacacacccagaaaaaacgacagauccagcaguagcuauugccggaauccuaacaaugagaaagggagucauggagugaaaggcugggccuuugacgauggaaaugacguguggaugggaagaacgaucggcgaggaguuacgcucagguuaugaaaccuucaaagucauuggagguugguccacaccuaacuccaaauugcagauaaauaggcaagucauaguugacagcgguaauagguccgguuauucugguauuuucucuguugagggcaaaagcugcaucaaucggugcuuuuauguggaguugauaaggggaaggaaacaggaaacuagagucugguggaccucaaacaguauuguuguguuuuguggcaccucagguacauauggaacaggcucauggccugauggggcggacaucaaucucaugccuauauaa

SEQ ID NO: 54035 - RNA, 1410 nt, Artificial Sequence
  derived and/or modified CDS sequence (wt) from neuraminidase__InfluenzaA__AFG99449
augaauccaaaucaaaagauaauaacaauuggcucuguuucucucaccauugccacaauaugcuuccuuaugcaaauugccauccugguaacuacuguaacauugcauuucaggcaauaugagugcagcucccccccaaacaaccaaguaaugccgugcgaaccaacaauaauagaaagaaacauaacagagauaguguauuugacuaacaccaccauagagaaagagauaugccccaaacuaguagaauacagaaauuggucaaagccgcaauguaaaauuacaggauuugcaccuuuuucuaaggacaauucaauucggcuuuccgcugguggagacauuugggugacaagagaaccuuaugugucaugcgauccuggcaaguguuaucaauuugcacuugggcagggaaccacacuaaacaacaggcauucaaaugacacaguacaugauaggaccccuuaucgaacccucuugaugaaugaguuggguguuccauuucauuugggaaccaagcaagugugcauggcaugguccagcucaagcugucacgaugggaaagcauggcugcauguuugugucacugggcaugaugaaaaugcaacugcuagcuucauuuacgaugggaggcuuguagacaguauugguucaugguccaaaaauauccucaggacccaggagucggaaugcguuuguaucaaugggacuuguacaguaguaaugacugauggaagugcuucagaaagagcugauacuaaaauacuauucauugaagaggggaaaaucguucauauuagcccauugucaggaagugcucagcauguagaggagugcuccuguuauccucgauauccuggugucagaugugucugcagagacaacuggaaaggcuccaauaggcccaucguagauauaaaugugaaagauuauagcauugucuccaguuaugugugcucagggcuuguuggagacacacccagaaaaaacgacagauccagcaguagcuauugccggaauccuaacaaugagaaagggagucauggagugaaaggcugggccuuugacgauggaaaugacguguggaugggaagaacgaucggcgaggaguuacgcucagguuaugaaaccuucaaagucauuggagguugguccacaccuaacuccaaauugcagauaaauaggcaagucauaguugacagcgguaauagguccgguuauucugguauuuucucuguugagggcaaaaacugcaucaaucggugcuuuuauguggaguugauaaggggaaggaaacaggaaacuagagucugguggaccucaaacaguauuguuguguuuuguggcaccucagguacauauggaacaggcucauggccugauggggcggacaucaaucucaugccuauauaa

SEQ ID NO: 54036 - RNA, 1410 nt, Artificial Sequence
  derived and/or modified CDS sequence (wt) from neuraminidase__InfluenzaA__AFG99471
augaauccaaaucaaaagauaauaacaauuggcucuguuucucucauccuugccacaauaugcuuccuuaugcaaauugccauccugguaacuacuguaacauugcauuucaagcaauaugagugcagcucccccccaaacaaccaaguaaugccgugcgaaccaacaauaauagaaagaaacauaacagagauaguguauuugacuaacaccaccauagagaaagagauaugccccaaacuaguagaauacagaaauuggucaaagccgcaauguaaaauuacaggauuugcaccuuuuucuaaggacaauucaauucggcuuuccgcugguggagacauuuggguaacaagagaaccuuaugugucaugcgauccuggcaaguguuaucaauuugcacuugggcagggaaccacacuaaacaacaggcauucaaaugacacaguacaugauaggaacccuuaucgaacucucuugaugaaugaguuggguguuccauuucauuugggaaccaggcaagugugcauggcaugguccagcucaagcugccacgauggaaaagcauggcugcauguuugugucacugggcaugaugaaaaugcaacugcuagcuucauuuacgaugggaggcuuguagacaguauugguucaugguccaaaaauauccucaggacccaggagucggaaugcguuuguaucaaugggacuuguacaguaguaaugacugauggaagugcuucagaaagagcugauacuaaaauacuauucauugaagaggggaaaaucguucauauuagcccauugucaggaagugcucagcauguggaggagugcuccuguuauccucgauauccuggugucagaugugucugcagagacaacuggaaaggcuccaauaggcccaucguagauauaaaugugaaagauuauagcauuguuuccaguuaugugugcucagggcuuguuggagacacacccagaaaaaacgacagauccagcaguagcuauugccggaauccuaauaaugagaaagggagucauggagugaaagguugggccuuugacgauggaaaugacguguggaugggaagaacgaucggcgaggaguuacgcucagguuaugaaaccuucaaagucauuggagguugguccacaccuaacuccaaauugcagauaaauaggcaagucauaguugacagcgguaauagguccgguuauucugguauuuucucuguugagggcaaaagcugcaucaaucggugcuuuuauguggaguugauaaggggaaggaaacaggaaacuagagucugguggaccucaaacaguauuguuguguuuugcggcaccucagguacauauggaacaggcucauggccugauggggcggacaucaaucucaugccuauauaa

SEQ ID NO: 54037 - RNA, 1410 nt, Artificial Sequence
  derived and/or modified CDS sequence (wt) from neuraminidase__InfluenzaA__AFG99482
augaauccaaaucaaaagauaauaacaauuggcucuguuucucucaccauugccacaauaugcuuccuuaugcaaauugccauccugguaacuacuguaacauugcauuucaagcaauaugagugcaacucccccccaaacaaccaaguaaugccgugugaaccaacaauaauagaaagaaacauaacagagauaguguauuugacuaacaccaccauagagaaagagauaugccccaaacuaguagaauacagaaauuggucaaagccgcaauguaaaauuacaggauuugcaccuuuuucuaaggacaauucaauucggcuuuccgcugguggagacauuugggugacaagagaaccuuaugugucaugcgauccuggcaaguguuaucaauuugcacuuggacagggaaccacacuaaacaacaggcauucaaaugacacaguacaugauaggaccccuuaucgaacccucuugaugaaugaguuggguguuccauuucauuugggaaccaagcaagugugcauagcaugguccagcucaaguugucacgauggaaaagcauggcugcauguuugugucacugggcaugaugaaaaugcaacugcuagcuucauuuacgaugggaggcuuguagauaguauugguucaugguccaaaaauauccucaggacccaggagucggaaugcguuuguaucaauggaacuuguacaguaguaaugacugauggaagugcuucaggaagagcugauacuaaaauacuauucauugaagaggggaaaaucguucauauuagcccauugucaggaagugcucagcauguagaggagugcuccuguuauccucgauauccuggugucagaugugucugcagagacaacuggaaaggcuccaauaggcccaucguagauauaaaugugaaagauuauagcauuguuuccaguuaugugugcucagggcuuguuggagacacacccagaaaaaacgacagcuccagcaguagcuauugccggaauccuaacaaugagaaagggagucauggagugaaaggcugggccuuugacgauggaaaugacguguggaugggaagaacgauuggcgaggaguuacgcucagguuaugaaaccuucaaagucauuggaggcugguccacaccuaacuccaaauugcagauaaauaggcaagucauaguugacagagguaauagguccgguuauucugguauuuucucuguugaaggcaaaaacugcaucaaucggugcuuuuauguggaguugauaaggggaaggaaacaggaaacuaaagucugguggaccucaaacaguauuguuguguuuuguggcaccucagguacauauggaacaggcucauggccugauggggcggacaucaaucucaugucuauauaa

SEQ ID NO: 54038 - RNA, 1410 nt, Artificial Sequence
  derived and/or modified CDS sequence (wt) from neuraminidase__InfluenzaA__AFG99493
augaauccaaaucaaaagauaauaacaauuggcucuguuucucucaccauugccacaauaugcuuccuuaugcaaauugccauccugguaacuacuguaacauugcauuucaagcaauaugagugcaacucccccccaaacaaccaaguaaugccgugugaaccaacaauaauagaaagaaacauaacagagauaguguauuugacuaacaccaccauagagaaagagauaugccccaaacuaguagaauacagaaauuggucaaagccgcaauguaaaauuacaggauuugcaccuuuuucuaaggacaauucaauucggcuuuccgcugguggagacauuugggugacaagagaaccuuaugugucaugcgauccuggcaaguguuaucaauuugcacuuggacagggaaccacacuaaacaacaggcauucaaaugacacaguacaugauaggaccccuuaucgaacccucuugaugaaugaguuggguguuccauuucauuugggaaccaagcaagugugcauagcaugguccagcucaaguugucacgauggaaaagcauggcugcauguuugugucacugggcaugaugaaaaugcaacugcuagcuucauuuacgaugggaggcuuguagauaguauugguucaugguccaaaaauauccucaggacccaggagucggaaugcguuuguaucaauggaacuuguacaguaguaaugacugauggaagugcuucaggaagagcugauacuaaaauacuauucauugaagaggggaaaaucguucauauuagcccauugucaggaagugcucagcauguagaggagugcuccuguuauccucgauauccuggugucagaugugucugcagagacaacuggaaaggcuccaauaggcccaucguagauauaaaugugaaagauuauagcauuguuuccaguuaugugugcucagggcuuguuggagacacacccagaaaaaacgacagcuccagcaguagcuauugccggaauccuaacaaugagaaagggagucauggagugaaaggcugggccuuugacgauggaaaugacguguggaugggaagaacgauuggcgaggaguuacgcucagguuaugaaaccuucaaagucauuggaggcugguccacaccuaacuccaaauugcagauaaauaggcaagucauaguugacagagguaauagguccgguuauucugguauuuucucuguugaaggcaaaagcugcaucaaucggugcuuuuauguggaguugauaaggggaaggaaacaggaaacuaaagucugguggaccucaaacaguauuguuguguuuuguggcaccucagguacauauggaacaggcucauggccugauggggcggacaucaaucucaugccuauauaa

SEQ ID NO: 54039 - RNA, 1410 nt, Artificial Sequence
  derived and/or modified CDS sequence (wt) from neuraminidase__InfluenzaA__AFG99504
augaauccaaaucaaaagauaauaacaauuggcucuguuucucucaccauugccacaauaugcuuccuuaugcaaauugccauccugguaacuacuguaacauugcauuucaagcaauaugagugcagcucccccccaaacaaccaaguaaugccgugugaaccaacaauaauagaaagaaacauaacagagauaguguauuugacuaacaccaccauagagaaagagauaugccccaaacuaguagaauacagaaauuggucaaagccgcaauguaagauuacaggauuugcaccuuuuucuaaggacaauucaauucggcuuuccgcugguggagauauuugggugacaagagaaccuuaugugucaugcgauccuggcaaguguuaucaauuugcacuugggcagggaaccacccuaaacaacaggcauucaaaugacacaguacaugauaggaccccuuaucgaacccucuugaugaaugaguuggguguuccauuucauuugggaaccaagcaaguaugcauagcaugguccagcucaaguugucacgauggaaaagcauggcugcauguuugugucacugggcaugaugaaaaugcaacugcuagcuucauuuacgaugggaggcuuguagacaguauugguucaugguccaaaaacauccucaggacccaggagucugaaugcguuuguaucaaugggacuuguacaguaguaaugacugauggaagugcuucagaaagagcugauacuaaaauacuauucauugaagaggggaaaaucguucauauuagcccauugucaggaagugcucagcauguagaggagugcuccuguuauccucgauauccuggugucagaugugucugcagagacaacuggaaaggcuccaauaggcccaucguagauauaaaugugaaagauuauagcauuguuuccaguuaugugugcucagggcuugucggagacacacccagaaaaaacgacagauccagcaguagcuauugccggaauccuaacaaugagaaagggagucauggagugaaaggcugggccuuugacgauggaaaugacguguggaugggaagaacgaucggcgaggaguuacgcucagguuaugaaaccuucaaagucauuggagguugguccacaccuaacuccaaauugcagauaaauaggcaagucauaguugacagcgguaauagguccgguuauucugguauuuucucuguugagggcaaaagcugcaucaaucggugcuuuuauguggaguugauaaggggaaggaaacaggaaacuagagucugguggaccucaaacaguauuguuguguuuuguggcaccucagguacauauggaacaggcucauggccugauggggcggacaucaaucucaugccuauauaa

SEQ ID NO: 54040 - RNA, 1410 nt, Artificial Sequence
  derived and/or modified CDS sequence (wt) from neuraminidase__InfluenzaA__AFG99515
augaauccaaaucaaaagauaauaacaauuggcucuguuucucucacuauugccacaauaugcuuccuuaugcaaauugccauccugguaacuacuguaacauugcauuucaagcaauaugagugcaacucccccccaaacaaccaaguaaugcugugugaaccaacaauaauagaaagaaacauaacagagauaguguauuugacuaacaccaccauagagaaagaaauaugccccaaacuagcagaauacagaaauuggucaaagccgcaauguaaaauuacaggauuugcaccuuuuucuaaggacaauucaauucggcuuuccgcugguggagacauuugggugacaagagaaccuuaugugucaugcgauccuggcaaguguuaucaauuugcacuuggacagggaaccacacuaaacaacaggcauucaaaugacacaguacaugauaggaccccuuaucgaacccucuugaugaaugaguuggguguuccauuucauuugggaaccaagcaagugugcauagcaugguccagcucaaguugucacgauggaaaagcauggcugcauguuuguguaacugggcaugaugaaaaugcaacugcuagcuucauuuacgaugggaggcuuguagauaguauugguucaugguccaaaaauauccucaggacccaggagucggaaugcguuuguaucaauggaacuuguacaguaguaaugacugauggaagugcuucagaaagagcugauacuaaaauacuauucauugaagaggggaaaauuguucauauuagcccauugucaggaagugcucagcaugucgaggagugcuccuguuauccucgauauccuggugucagaugugucugcagagacaacuggaaaggcuccaauaggcccaucguagauauaaaugugaaagauuauagcauuguuuccaguuaugugugcucaggacuuguuggagacacacccagaaaaaacgacagcuccagcaguagcuauugccggaauccuaacaaugagaaagggagucauggagugaaaggcugggccuuugacgauggaaaugacguguggaugggaagaacgaucggcgaggaguuacgcucagguuaugaaaccuucaaagucauuggaggcugguccacaccuaacuccaaauugcagauaaauaggcaagucauaguugacagagguaauagguccgguuauucugguauuuucucuguugaaggcaaaagcugcaucaaucggugcuuuuauguggaguugauaaggggaaggaaacaggaaacugaagucugguggaccucaaacaguauuguuguguuuuguggcaccucagguacauauggaacaggcucauggccugauggggcggacaucaaucucaugccuauauaa

SEQ ID NO: 54041 - RNA, 1410 nt, Artificial Sequence
  derived and/or modified CDS sequence (wt) from neuraminidase__InfluenzaA__AFG99526
augaauccaaaucaaaagauaauaacaauuggcucuguuucucucacccuugccacaauaugcuuccuuaugcaaauugccauccugguaaccacuguaacauugcauuucaagcaauaugagugcagcucccccccaaacaaccaaguaaugccgugcgaaccaacaauaauagaaagaaacauaacagagauaguguauuugacuaacaccacuauagagaaagagguaugccccaaacuaguagaauacagaaauuggucaaagccgcaauguaaaauuacaggauuugcaccuuuuucuaaggacaauucaauucggcuuuccgcugguggagacauuuggguaacaagagaaccuuaugugucaugcgauccuggcaaguguuaucaauuugcacuugggcagggaaccacacuaaacaacaggcauucaaaugacacaguacaugauaggaccccuuaucgaacucucuugaugaaugaguuggguguuccauuucauuugggaaccaggcaagugugcauggcaugguccagcucaagcugccacgauggaaaagcauggcugcauguuugugucacugggcaugaugaaaaugcaacugcuagcuucauuuacgaugggaggcuaguagacaguauugguucaugguccaaaaauauccucaggacccaggagucggaaugcguuuguaucaaugggacuuguacaguaguaaugacugauggaagugcuucaggaagagcugauacuaaaauacuauucauugaagaggggaaaaucguucauauuagcccauugucaggaagugcucagcauguggaggagugcuccuguuauccucgauauccuggugucagaugugucugcagagacaacuggaaaggcuccaauaggcccaucguagauauaaaugugaaagauuauagcauuguuuccaguuaugugugcucagggcuuguuggagacacacccagaaaaaacgacagauccagcaguagcuauugccggaauccuaauaaugagaaagggagucauggagugaaaggcugggccuuugacgauggaaaugacguguggaugggaagaacgaucggcgaggaguuacgcucagguuaugaaaccuucaaagucauuggagguugguccacaccuaacuccaaauugcagauaaauaggcaagucauaguugacagcgguaauagguccgguuauucugguauuuucucuguugagggcaaaagcugcaucaaucggugcuuuuauguggaguugauaaggggaaggaaacaggaaacuagagucugguggaccucaaacaguauuguuguguuuugcggcaccucagguacauauggaacaggcucauggccugauggggcggacaucaaucucaugccuauauaa

SEQ ID NO: 54042 - RNA, 1410 nt, Artificial Sequence; identical to SEQ ID NO: 53943
  derived and/or modified CDS sequence (wt) from neuraminidase__InfluenzaA__AFG99537

SEQ ID NO: 54043 - RNA, 1410 nt, Artificial Sequence
  derived and/or modified CDS sequence (wt) from neuraminidase__InfluenzaA__AFG99548
augaauccaaaucaaaagauaauaacaauuggcucuguuucucucaccauugccacaauaugcuuccuuaugcaaauugccauccugguaacuacuguaacauugcauuucaagcaauaugagugcaacucccccccaaacaaccaaguaaugccgugugagccaacaauaauagaaagaaacauaacagagauaguguauuugacuaacaccaccauagagaaagagauaugccccaaacuaguagaauacagaaauuggucaaagccgcaauguaaaauuacaggauuugcaccuuuuucuaaggacaauucaauucggcuuuccgcugguggagacauuugggugacaagagaaccuuaugugucaugcgauccuggcaaguguuaucaauuugcacuaggacagggaaccacacuaaacaacaggcauucaaaugacacaguacaugauaggaccccuuaucgaacccucuugaugaaugaguuggguguuccauuucauuugggaaccaagcaagugugcauagcaugguccagcucaaguugucacgauggaaaagcauggcugcauguuugugucacugggcaugaugaaaaugcaacugcuagcuucauuuacgaugggagacuuguagauaguauuguuucaugguccaaaaauauccucaggacccaggagucggaaugcguuuguaucaauggaacuuguacaguaguaaugacugauggaagugcuucagaaagagcugauacuaaaauacuauucauugaagaggggaaaaucguucauauuagcccauugucaggaagugcucagcauguagaggagugcuccuguuauccucgauauccuggugucagaugugucugcagagacaacuggaaaggcuccaauaggcccaucguagauauaaaugugaaagauuauagcauuguuuccaguuaugugugcucagggcuuguuggagacacacccagaaaaaacgacagcuccagcaguagcuauugccggaauccuaacaaugagaaagggagucauggagugaaaggcugggccuuugacgauggaaaugacguguggaugggaagaacgaucggcgaggaguuacgcucagguuaugaaaccuucaaagucauuggaggcugguccacaccuaacuccaaauugcagacaaauaggcaagucauaguugacagagguaauagguccgguuauucugguauuuucucuguugaaggcaaaagcugcaucaaucggugcuuuuauguagaauugauaaggggaaggaaacaggaaacuaaagucugguggaccucaaacaguauuguuguguuuuguggcaccucagguacauauggaacaggcucauggccugauggggcggacaucaaucucaugccuauauaa

SEQ ID NO: 54044 - RNA, 1410 nt, Artificial Sequence; identical to SEQ ID NO: 53943
  derived and/or modified CDS sequence (wt) from neuraminidase__InfluenzaA__AFG99559

SEQ ID NO: 54045 - RNA, 1410 nt, Artificial Sequence
  derived and/or modified CDS sequence (wt) from neuraminidase__InfluenzaA__AFG99570
augaauccaaaucaaaagauaauaacaauuggcucuguuucucucaccauugccacaauaugcuuccuuaugcaaauugccauccugguaacuacuguaacauugcauuucaagcaauaugagugcaacucccccccaaacaaccaaguaaugccgugugagccaacaauaauagaaagaaacauaacagagauaguguauuugacuaacaccaccauagagaaagagauaugccccaaacuaguagaauacagaaauuggucaaagccgcaauguaaaauuacaggauuugcaccuuuuucuaaggacaauucaauucggcuuuccgcugguggagacauuugggugacaagagaaccuuaugugucaugcgauccuggcaaguguuaucaauuugcacuaggacagggaaccacacuaaacaacaggcauucaaaugacacaguacaugauaggaccccuuaucgaacccucuugaugaaugaguuggguguuccauuucauuugggaaccaagcaagugugcauagcaugguccagcucaaguugucacgauggaaaagcauggcugcauguuugugucacugggcaugaugaaaaugcaacugcuagcuucauuuacgaugggagacuuguagauaguauuguuucaugguccaaaaauauccucaggacccaggagucggaaugcguuuguaucaauggaacuuguacaguaguaaugacugauggaagugcuucagaaagagcugauacuaaaauacuauucauugaagaggggaaaauuguucauauuagcccauugucaggaagugcucagcauguagaggagugcuccuguuauccucgauauccuggggucagaugugucugcagagacaacuggaaaggcuccaauaggcccaucguagauauaaaugugaaagauuauagcauuguuuccaguuaugugugcucagggcuuguuggagacacacccagaaaaaacgacagcuccagcaguagcuauugccggaauccuaacaaugagaaagggagucauggagugaaaggcugggccuuugacgauggaaaugacguguggaugggaagaacgaucggcgaggaguuacgcucagguuaugaaaccuucaaagucauuggaggcugguccacaccuaacuccaaauugcagacaaauaggcaagucauaguugacagagguaauagguccgguuauucugguauuuucucuguugaaggcaaaagcugcaucaaucggugcuuuuauguagaauugauaaggggaaggaaacaggaaacuaaagucugguggaccucaaacaguauuguuguguuuuguggcaccucagguacauauggaacaggcucauggccugauggggcggacaucaaucucaugccuauauaa

SEQ ID NO: 54046 - RNA, 1410 nt, Artificial Sequence; identical to SEQ ID NO: 54043
  derived and/or modified CDS sequence (wt) from neuraminidase__InfluenzaA__AFG99581

SEQ ID NO: 54047 - RNA, 1410 nt, Artificial Sequence
  derived and/or modified CDS sequence (wt) from neuraminidase__InfluenzaA__AFG99592
augaauccaaaucaaaagauaauaacaauuggcucuguuucucucaccauugccacaacaugcuuccuuaugcaaauugccauccugguaacuacuguaacauugcauuucaagcaauaugagugcaacucccccccaaacaaccaaguaaugccgugugagccaacaauaauagaaagaaacauaacagagauaguguauuugacuaacaccaccauagagaaagagauaugccccaaacuaguagaauacagaaauuggucaaagccgcaauguaaaauuacaggauuugcaccuuuuucuaaggacaauucaauucggcuuuccgcugguggagacauuugggugacaagagaaccuuaugugucaugcgauccuggcaaguguuaucaauuugcacuaggacagggaaccacacuaaacaacaggcauucaaaugacacaguacaugauaggaccccuuaucgaacccucuugaugaaugaguuggguguuccauuucauuugggaaccaagcaagugugcauagcaugguccagcucaaguugucacgauggaaaagcauggcugcauguuugugucacugggcaugaugaaaaugcaacugcuagcuucauuuacgaugggagacuuguagauaguauuguuucaugguccaaaaauauccucaggacccaggagucggaaugcguuuguaucaauggaacuuguacaguaguaaugacugauggaagugcuucagaaagagcugauacuaaaauacuauucauugaagaggggaaaauuguucauauuagcccauugucaggaagugcucagcauguagaggagugcuccuguuauccucgauauccuggggucagaugugucugcagagacaacuggaaaggcuccaauaggcccaucguagauauaaaugugaaagauuauagcauuguuuccaguuaugugugcucagggcuuguuggagacacacccagaaaaaacgacagcuccagcaguagcuauugccggaauccuaacaaugagaaagggagucauggagugaaaggcugggccuuugacgauggaaaugacguguggaugggaagaacgaucggcgaggaguuacgcucagguuaugaaaccuucaaagucauuggaggcugguccacaccuaacuccaaauugcagacaaauaggcaagucauaguugacagagguaauagguccgguuauucugguauuuucucuguugaaggcaaaagcugcaucaaucggugcuuuuauguagaauugauaaggggaaggaaacaggaaacuaaagucugguggaccucaaacaguauuguuguguuuuguggcaccucagguacauauggaacaggcucauggccugauggggcggacaucaaucucaugccuauauaa

SEQ ID NO: 54048 - RNA, 1410 nt, Artificial Sequence
  derived and/or modified CDS sequence (wt) from neuraminidase__InfluenzaA__AFG99603
augaauccaaaucaaaagauaauaacaauuggcucuguuucucucaccauugccacaauaugcuuccuuaugcaaauugccauccugguaacuacuguaacauugcauuucaagcaauaugagugcaacucccccccaaacaaccaaguaaugccgugugagccaacaauaauagaaagaaacauaacagagauaguguauuugacuaacaccaccauagagaaagagauaugccccaaacuaguagaauacagaaauuggucaaagccgcaauguaaaauuacaggauuugcaccuuuuucuaaggacaauucaauucggcuuuccgcugguggagacauuugggugacaagagaaccuuaugugucaugcgauccuggcaaguguuaucaauuugcacuaggacagggaaccacacuaaacaacaggcauucaaaugacacaguacaugauaggaccccuuaucgaacccucuugaugaaugaguuggguguuccauuucauuugggaaccaagcaagugugcauagcaugguccagcucaaguugucacgauggaaaagcauggcugcauguuugugucacugggcaugaugaaaaugcaacugcuagcuucauuuacgaugggagacuuguagauaguauuguuucaugguccaaaaauauccucaggacccaggagucggaaugcguuuguaucaauggaacuuguacaguaguaaugacugauggaagugcuucagaaagagcugauacuaaaauacuauucauugaagaggggaaaaucguucauauuagcccauugucaggaagugcucagcauguagaggagugcuccuguuauccucgauauccuggugucagaugugucugcagagacaacuggaaaggcuccaauaggcccaucguagauauaaaugugaaagauuauagcauuguuuccaguuaugugugcucagggcuuguuggagacacacccagaaaaaacgacagcuccagcaguagcuauugccggaauccuaacaaugagaaagggagucauggagugaaaggcugggccuuugacgauggaaaugacguguggaugggaagaacgaucggcgaggaguuacgcucagguuaugaaaccuucaaagucauuggaggcugguccacaccuaacuccaaauugcagacaaauaggcaagucauaguugacagagguaauagguccgguuauucugguauuuucucuguugaaggcaaaagcugcaucaaucggugcuuuuauguagaauugauaaggggaaggaaacaggaaacuaaaguaugguggaccucaaacaguauuguuguguuuuguggcaccucagguacauauggaacaggcucauggccugauggggcggacaucaaucucaugccuauauaa

SEQ ID NO: 54049 - RNA, 1410 nt, Artificial Sequence; identical to SEQ ID NO: 54043
  derived and/or modified CDS sequence (wt) from neuraminidase__InfluenzaA__AFG99614

SEQ ID NO: 54050 - RNA, 1410 nt, Artificial Sequence; identical to SEQ ID NO: 54043
  derived and/or modified CDS sequence (wt) from neuraminidase__InfluenzaA__AFG99625

SEQ ID NO: 54051 - RNA, 1410 nt, Artificial Sequence
  derived and/or modified CDS sequence (wt) from neuraminidase__InfluenzaA__AFG99636
augaauccaaaucaaaagauaauaacaauuggcucuguuucucucacuauugccacaauaugcuuccuuaugcaaauugccauccugguaacuacuguaacauugcauuucaagcaauaugagugcaacucccccccaaacaaccaaguaaugcugugugaaccaacaauaauagaaagaaacauaacagagauaguguauuugacuaacaccaccauagagaaagaaauaugccccaaacuagcagaauacagaaauuggucaaagccgcaauguaaaauuacaggauuugcaccuuuuucuaaggacaauucaauucggcuuuccgcugguggagacauuugggugacaagagaaccuuaugugucaugcgauccuggcaaguguuaucaauuugcacuaggacagggaaccacacuaaacaacaggcauucaaaugacacaguacaugauaggaccccuuaucgaacccucuugaugaaugaguuggguguuccauuucauuugggaaccaagcaagugugcauagcaugguccagcucaaguugucacgauggaaaagcauggcugcauguuugugucacugggcaugaugaaaaugcaacugcuagcuucauuuacgaugggagacuuguagauaguauuguuucaugguccaaaaauauccucaggacccaggagucggaaugcguuuguaucaauggaacuuguacaguaguaaugacugauggaagugcuucagaaagagcugauacuaaaauacuauucauugaagaggggaaaaucguucauauuagcccauugucaggaagugcucagcauguagaggagugcuccuguuauccucgauauccuggugucagaugugucugcagagacaacuggaaaggcuccaauaggcccaucguagauauaaaugugaaagauuauagcauuguuuccaguuaugugugcucagggcuuguuggagacacacccagaaaaaacgacagcuccagcaguagcuauugccggaauccuaacaaugagaaagggagucauggagugaaaggcugggccuuugacgauggaaaugacguguggaugggaagaacgaucggcgaggauuuacgcucagguuaugaaaccuucaaagucauuggaggcugguccacaccuaacuccaaauugcagacaaauaggcaagucauaguugacagagguaauagguccgguuauucugguauuuucucuguugaaggcaaaagcugcaucaaucggugcuuuuauguagaauugauaaggggaaggaaacaggaaacuaaagucugguggaccucaaacaguauuguuguguuuuguggcaccucagguacauauggaacaggcucauggccugauggggcggacaucaaucucaugccuauauaa

SEQ ID NO: 54052 - RNA, 1410 nt, Artificial Sequence
  derived and/or modified CDS sequence (wt) from neuraminidase__InfluenzaA__AFG99658
augaauccaaaucaaaagauaauaacaauuggcucuguuucucucacuauugccacaauaugcuuccuuaugcaaauuaccauccugguaacuacuguaacauugcauuucaagcaauaugagugcaacucccccccaaacaaccaaguaaugcugugugaaccaacaauaauagaaagaaacauaacagagauaguguauuugacuaacaccaccauagagaaagagauaugccccaaacuaguagaauacagaaauuggucaaagccgcaauguaaaaucacaggauuugcaccuuuuucuaaggacaauucaauucggcuuuccgcugguggagacauuugggugacaagagaaccuuaugugucaugcgauccuggcaaguguuaucaauuugcacuuggacagggaaccacacuaaacaacaggcauucaaaugacacaguacaugauaggaccccuuaucgaacccucuugaugaaugaguuggguguuccauuucauuugggaaccaagcaagugugcauagcaugguccaguucaaguugucacgauggaaaagcauggcugcauguuugugucacugggcaugaugaaaaugcaacugcuagcuucauuuacgaugggaggcuuguagauaguauuaguucaugguccaaaaauauccucaggacccaggagucggaaugcguuuguaucaauggaacuuguacaguaguaaugacugauggaagugcuucagaaagagcugauacuaaaauacuauucauugaagaggggaaaaucguucauauuagcccauugucaggaagugcucagcauguagaggagugcuccuguuauccucgauacccuggugucagaugugucugcagagacaacuggaaaggcuccaauaggcccaucguagauauaaaugugaaagauuauagcauuguuuccaguuaugugugcucagggcuuguuggagacacacccagaaaaaacgacagcuccagcaguagcuauugccggaauccuaacaaugagaaaggaagucauggagugaaaggcugggccuuugacgauggaaaugacguguggaugggaagaacgaucagcgaggaguuacgcucagguuaugaaaccuucaaagucauuggaggcugguccacaccuaacuccaaauugcagauaaauaggcaagucauaguugacagagguaauagguccgguuauucugguauuuucucuguugaaggcaaaagcugcaucaaucggugcuuuuauguggaguugauaaggggaaggaaacaggaaaauaaagucugguggaccucaaacaguauuguuguguuuuguggcaccucagguacauauggaacaggcucauggccugauggggcggacaucaaucucaugccuauauaa

SEQ ID NO: 54053 - RNA, 1410 nt, Artificial Sequence
  derived and/or modified CDS sequence (wt) from neuraminidase__InfluenzaA__AFG99680
augaauccaaaucaaaagauaauaacaauuggcucuguuucucucacuauugccacaauaugcuuccuuaugcaaauugccauccugguaacuacuguaacauugcauuucaagcaauaugagugcagcucccccccaaacaaccaaguaauucuaugucaaccaacaauaauagaaagaaacauaacagagauaguguauuugacuaacaccaccauagagaaagagauaugccccaaacuaguagaauacagaaauuggucaaagccgcaauguaaaauuacaggauuugcaccuuuuucuaaggacaauucaauucggcuuuccgcugguggagacauuugggugacaagagaaccuuaugugucaugcgauccuagcaaauguuaucaauuugcacuuggacagggaaccacacuaaacaacaggcauucaaaugacacaguacaugauaggaccccuuaucgaacccucuugaugaaugaguuggguguuccauuucauuugggaaccaagcaagugugcauagcaugguccagcucaaguugucacgauggaaaagcauggcugcauguuugugucacugggcaugaugaaaaugcaacugcuagcuucauuuacgaugggaggcuuguagauaguauugguucaugguccaaaaauauccucaggacccaggagucggaaugcguuuguaucaaugggacuuguacaguaguaaugacugauggaagugcuucagaaagagcugauacuaaaauacuauucauugaagaggggaaagucguucauauuagcccauugucaggaagugcucagcauguagaggagugcuccuguuauccucgauauccuggugucagaugugucugcagagacaacuggaaaggcuccaauaggcccaucguagauauaaaugugaaagauuauagcauuguuuccaguuaugugugcucagggcuuguuggagacacacccagaaaaaacgacagcuccagcaguagcuauugccggaauccuaacaaugagaaagggagucauggagugaaaggcugggccuuugacgauggaaaugacguguggaugggaagaacgaucagcgaggaguuacgcucagguuaugaaaccuucaaagucauuggagguugguccacaccuaauuccaaauugcagauaaauaggcaagucauaguugacagcgguaauagguccgguuauucugguauuuucucuguugaaggcaaaagcugcaucaaucggugcuuuuauguggaguugauaaggggaaggaaacaggaaacuaaagucugguggaccucaaacaguauuguuguguuuuguggcaccucagguacauauggaacaggcucauggccugauggggcggacaucaaucucaugccuauauaa

SEQ ID NO: 54054 - RNA, 1410 nt, Artificial Sequence
  derived and/or modified CDS sequence (wt) from neuraminidase__InfluenzaA__AFG99691
augaauccaaaucaaaagauaauaacaauuggcucuguuucucucaccauugccacaauaugcuuccuuaugcaaauugccauccugguaacuacuguaacauugcauuucaagcaauaugagugcaacucccccccaaacaaccaaguaaugccgugugagccaacaauaauagaaagaaacacaacagagauaguguauuugacuaacaccaccauagagaaagagauaugccccaaacuaguagaauacagaaauuggucaaagccgcaauguaaaauuacaggauuugcaccuuuuucuaaggacaauucaauucggcuuuccgcugguggagacauuugggugacaagagaaccuuaugugucaugcgauccuggcaaguguuaucaauuugcacuaggacagggaaccacacuaaacaacaggcauucaaaugacacaguacaugauaggaccccuuaucgaacccucuugaugaaugaguuggguguuccauuucauuugggaaccaagcaagugugcauagcaugguccagcucaaguugucacgauggaaaagcauggcugcauguuugugucacugggcaugaugaaaaugcaacugcuagcuucauuuacgaugggagacuuguagauaguauuguuucaugguccaaaaauauccucaggacccaggagucggaaugcguuuguaucaauggaacuuguacaguaguaaugacugauggaagugcuucagaaagagcugauacuaaaauacuauucauugaagaggggaaaaucguucauauuagcccauugucaggaagugcucagcauguagaggagugcuccuguuauccucgauauccuggugucagaugugucugcagagacaacuggaaaggcuccaauaggcccaucguagauauaaaugugaaagauuauagcauuguuuccaguuaugugugcucagggcuuguuggagacacacccagaaaaaacgacagcuccagcaguagcuauugccggaauccuaacaaugagaaagggagucauggagugaaaggcugggccuuugacgauggaaaugacguguggaugggaagaacgaucggcgaggaguuacgcucagguuaugaaaccuucaaagucauuggaggcugguccacaccuaacuccaaauugcagacaaauaggcaagucauaguugacagagguaauagguccgguuauucugguauuuucucuguugaaggcaaaagcugcaucaaucggugcuuuuauguagaauugauaaggggaaggaaacaggaaacuaaagucugguggaccucaaacaguauuguuguguuuuguggcaccucagguacauauggaacaggcucauggccugauggggcggacaucaaucucaugccuauauaa

SEQ ID NO: 54055 - RNA, 1410 nt, Artificial Sequence; identical to SEQ ID NO: 53943
  derived and/or modified CDS sequence (wt) from neuraminidase__InfluenzaA__AFG99704

SEQ ID NO: 54056 - RNA, 1410 nt, Artificial Sequence; identical to SEQ ID NO: 53943
  derived and/or modified CDS sequence (wt) from neuraminidase__InfluenzaA__AFG99715

SEQ ID NO: 54057 - RNA, 1410 nt, Artificial Sequence; identical to SEQ ID NO: 53943
  derived and/or modified CDS sequence (wt) from neuraminidase__InfluenzaA__AFG99726

SEQ ID NO: 54058 - RNA, 1410 nt, Artificial Sequence
  derived and/or modified CDS sequence (wt) from neuraminidase__InfluenzaA__AFG99737
augaauccaaaucaaaagauaauaacaauuggcucuguuucucucacuauugccacaauaugcuuccuuaugcaaauuaccauccugguaacuacuguaacauugcauuucaagcaauaugagugcaacucccccccaaacaaccaaguaaugcugugugaaccaacaauaauagaaagaaacauaacagagauaguguauuugacuaacaccaccauagagaaagagauaugccccaaacuaguagaauacagaaauuggucaaagccgcaauguaaaaucacaggauuugcaccuuuuucuaaggacaauucaauucggcuuuccgcugguggagacauuugggugacaagagaaccuuaugugucaugcgauccuggcaaguguuaucaauuugcacuuggacagggaaccacacuaaacaacaggcauucaaaugacacaguacaugauaggaccccuuaucgaacccucuugaugaaugaguuggguguuccauuucauuugggaaccaagcaagugugcauagcaugguccaguucaaguugucacgauggaaaagcauggcugcauguuugugucacugggcaugaugaaaaugcaacugcuagcuucauuuacgaugggaggcuuguagauaguauugguucaugguccaaaaauauccucaggacccaggagucggaaugcguuuguaucaauggaacuuguacaguaguaaugacugauggaagugcuucagaaagagcugauacuaaaauacuauucauugaagaggggaaaaucguucauauuagcccauugucaggaagugcucagcauguagaggagugcuccuguuauccucgauacccuggugucagaugugucugcagagacaacuggaaaggcuccaauaggcccaucguagauauaaaugugaaagauuauagcauuguuuccaguuaugugugcucagggcuuguuggagacacacccagaaaaaacgacagcuccagcaguagcuauugccggaauccuaacaaugagaaaggaagucauggagugaaaggcugggccuuugacgauggaaaugacguguggaugggaagaacgaucagcgaggaguuacgcucagguuaugaaaccuucaaagucauuggaggcugguccacaccuaacuccaaauugcagauaaauaggcaagucauaguugacagagguaauagguccgguuauucugguauuuucucuguugaaggcaaaagcugcaucaaucggugcuuuuauguggaguugauaaggggaaggaaacaggaaaauaaagucugguggaccucaaacaguauuguuguguuuuguggcaccucagguacauauggaacaggcucauggccugauggggcggacaucaaucucaugccuauauaa

SEQ ID NO: 54059 - RNA, 1410 nt, Artificial Sequence
  derived and/or modified CDS sequence (wt) from neuraminidase__InfluenzaA__AFG99748
augaauccaaaucaaaagauaauaacaauuggcucuguuucucucacuauugccacaauaugcuuccuuaugcaaauugccauccugguaacuacuguaacauugcauuucaagcaauaugauugcaacucccccccaaacaaccaagcaaugcugugugaaccaacaauaauagaaagaaacauaacagagauaguguauuugacuaacaccaccauagagaaagaaauaugccccaaacuagcagaauacagaaauuggucaaagccgcaauguaaaauuacaggauuugcaccuuuuucuaaggacaauucaauucggcuuuccgcugguggagacauuugggugacaagagaaccuuaugugucaugcgauccuggcaaguguuaucaauuugcacuuggacagggaaccacacuaaacaacaggcauucaaaugacacaguacaugauaggaccccuuaucgaacccucuugaugaaugaguuggguguuccauuucauuugggaaccaagcaagugugcauagcaugguccagcucaaguugucacgauggaaaagcauggcugcauguuuguguaacugggcaugaugaaaaugcaacugcuagcuucauuuacgaugggaggcuuguagauaguauugguucaugguccaaaaauauccucaggacccaggagucggaaugcguuuguaucaauggaacuuguacaguaguaaugacugauggaagugcuucagaaagagcugauacuaaaauacuauucauugaagaggggaaaaucguucauauuagcccauugucaggaagugcucagcaugucgaggagugcuccuguuauccucgauauccuggugucagaugugucugcagagacaacuggaaaggcuccaauaggcccaucguagauauaaaugugaaagauuauagcauuguuuccaguuaugugugcucaggacuuguuggagacacacccagaaaaaacgacagcuccagcaguagcuauugccggaauccuaacaaugagaaagggagucauggagugaaaggcugggccuuugacgauggaaaugacguguggaugggaagaacgaucggcgaggaguuacgcucagguuaugaaaccuucaaagucauuggaggcugguccacaccuaacuccaaauugcagauaaauaggcaagucauaguugacagagguaauagguccgguuauucugguauuuucucuguugaaggcaaaagcugcaccaaucggugcuuuuauguggaguugauaaggggaaggaaacaggaaacugaagucugguggaccucaaacaguauuguuguguuuuguggcaccucagguacauauggaacaggcucauggccugauggggcggacaucaaucucaugccuauauaa

SEQ ID NO: 54060 - RNA, 1410 nt, Artificial Sequence; identical to SEQ ID NO: 53943
  derived and/or modified CDS sequence (wt) from neuraminidase__InfluenzaA__AFG99759

SEQ ID NO: 54061 - RNA, 1410 nt, Artificial Sequence
  derived and/or modified CDS sequence (wt) from neuraminidase__InfluenzaA__AFG99770
augaauccaaaucaaaagauaauaacaauuggcucuguuucucucacuauugccacaauaugcuuccuuaugcaaauugccauccugguaacuacuguaacauugcauuucaagcaauaugagugcaacucccccccaaacaaccaaauaaugcugugugaaccaacaauaauagaaagaaacauaacagagauaguguauuugacuaacaccaccauagagagagaaauaugccccaaacuaguagaauacagaaauuggucaaagccgcaauguaaaauuacaggauuugcaccuuuuucuaaagacaauucaauucggcuuuccgcugguggagacauuugggugacaagagaaccuuaugugucaugcgauccuggcaaguguuaucaauuugcacuuggacagggaaccacacuaaacaacaggcauucaaaugacacaguacaugauaggaccccuuaucgaacccucuugaugaaugaguuggguguuccauuucauuugggaaccaagcaagugugcauagcaugguccagcucaaguugucacgauggaaaagcauggcugcauguuugugucacugggcaugaugaaaaugcaacugcuagcuucauuuacgaugggaggcuuguagauaguauugguucaugguccaaaaauauccucaggacccaggagucggaaugcguuuguaucaauggaacuuguacaguaguaaugacugauggaagugcuucagaaagagcugauacuaaaauacuauucauugaagaggggaaaaucguucauauuagcccauugucaggaagugcucagcauguagaggagugcuccuguuauccucgauauccuggugucagaugugucugcagagacaacuggaaaggcuccaauaggcccaucguagauauaaaugugaaagauuauagcauuguuuccaguuaugugugcucagggcuuguuggagacacacccagaaaaaacgacagcuccagcaguagcuauugccggaauccuaacaaugagaaagggagucauggagugaaaggcugggccuuugacgauggaaaugacguguggaugggaagaacgaucggcgaggaguuacgcucagguuaugaaaccuucaaagucauuggaggcugguccacaccuaacuccaaauugcagauaaauaggcaagucauaguugacagagguaauagguccgguuauucugguauuuucucuguugaaggcaaaagcugcaucaaucggugcuuuuauguggaguugauaaggggaaggaaacaggaaacugaagucugguggaccucaaacaguauuguuguguuuuguggcaccucagguacauauggaacaggcucauggccugauggggcggacaucaaucucaugccuauauaa

SEQ ID NO: 54062 - RNA, 1410 nt, Artificial Sequence
  derived and/or modified CDS sequence (wt) from neuraminidase__InfluenzaA__AFG99781
augaauccaaaucaaaagauaauaacaauuggcucuguuucucucaccauugccacaauaugcuuccuuaugcaaauugccauccugguaacuacuguaacauugcauuucaagcaauaugagugcagcucccccccaaacaaccagguaaugcuaugucaaccaacaauaauagaaagaaacauaacagagauaguguauuugacuaacaccaccauagaaaaagagauaugccccaaacuaguagaauacagaaauuggucaaagccgcaaugcaaaauuacaggauuugcaccuuuuucuaaggacaauucaauccggcuuuccgcugguggagacauuugggugacaagagaaccuuaugugucaugcgauccuggcaaguguuaucaauuugcacuuggacagggaaccacacuaaacaacaggcauucaaaugacacaguacaugauaggaccccuuaucgaacccucuugaugaaugaauuggguguuccauuucauuugggaaccaagcaagugugcauagcaugguccagcucaaguugucacgauggaaaagcauggcugcauguuugugucacugggcaugaugaaaaugcaacugcuagcuucauuuacgaugggaggcuuguagauaguauuggaucaugguccaaaaauauccucaggacccaggagucggaaugcguuuguaucaaugggacuuguacaguaguaaugacugauggaagugcuucaaaaagagcugauacuaaaauacuauucauugaagaggggaaaaucguucauauuagcccauugucaggaagugcucagcauguagaggagugcuccuguuauccucgauauccuggugucagaugugucugcagagacaacuggaaaggcuccaauaggcccaucguagauauaaaugugaaagauuauagcauuguuuccaguuaugugugcucagggcuuguuggagacacacccagaaaaaacgauagcuccagcaguagcuauugccggaauccuaacaaugagaaagggagucauggagugaaaggcugggccuuugacgauggaaaugacguguggaugggaagaacgaucagcgaggaguuacgcucagguuaugaaaccuucaaagucauuggagguugguccacaccuaauuccaaauuacagacaaauaggcaagucauaguugacagcgguaauagguccgguuauucugguauuuucucuguugaaggcaaaagcugcaucaaucggugcuuuuauguggaguugauaaggggaaggaaacaggaaacuaaagucugguggaccucaaacaguauuguuguguuuuguggcaccucagguacauauggaacaggcucauggccugauggggcggacaucaaucucaugccuauauaa

SEQ ID NO: 54063 - RNA, 1410 nt, Artificial Sequence; identical to SEQ ID NO: 53943
  derived and/or modified CDS sequence (wt) from neuraminidase__InfluenzaA__AFG99792

SEQ ID NO: 54064 - RNA, 1410 nt, Artificial Sequence
  derived and/or modified CDS sequence (wt) from neuraminidase__InfluenzaA__AFG99803
augaauccaaaucaaaagauaauaacaauuggcucuguuucucucacuauugccacaauaugcuuccuuaugcaaauuaccauccugguaacuacuguaacauugcauuucaagcaauaugagugcaacucccccccaaacaaccaaguaaugcugugugaaccaacaauaauagaaagaaacauaacagagauaguguauuugacuaacaccaccauagagaaagagauaugccccaaacuaguagaauacagaaauuggucaaagccgcaauguaaaaucacaggauuugcaccuuuuucuaaggacaauucaauucggcuuuccgcugguggagacauuugggugacaagagaaccuuaugugucaugcgauccuggcaaguguuaucaauuugcacuuggacagggaaccacacuaaacaacaggcauucaaaugacacaguacaugauaggaccccuuaucgaacccucuugaugaaugaguuggguguuccauuucauuugggaaccaagcaagugugcauagcaugguccaguucaaguugucacgauggaaaagcauggcugcauguuugugucacugggcaugaugaaaaugcaacugcuagcuucauuuacgaugggaggcuuguagauaguauugguucaugguccaaaaauauccucaggacccaggagucggaaugcguuuguauuaauggaacuuguacaguaguaaugacugauggaagugcuucagaaagagcugauacuaaaauacuauucauugaagaggggaaaaucguucauauuagcccauugucaggaagugcucagcauguagaggagugcuccuguuauccucgauacccuggugucagaugugucugcagagacaacuggaaaggcuccaauaggcccaucguagauauaaaugugaaagauuauagcauuguuuccaguuaugugugcucagggcuuguuggagacacacccagaaaaaacgacagcuccagcaguagcuauugccggaauccuaacaaugagaaaggaagucauggagugaaaggcugggccuuugacgauggaaaugacguguggaugggaagaacgaucagcgaggaguuacgcucagguuaugaaaccuucaaagucauuggaggcugguccacaccuaacuccaaauugcagauaaauaggcaagucauaguugacagagguaauagguccgguuauucugguauuuucucuguugaaggcaaaagcugcaucaaucggugcuuuuauguggaguugauaaggggaaggaaacaggaaaauaaagucugguggaccucaaacaguauuguuguguuuuguggcaccucagguacauauggaacaggcucauggccugauggggcggacaucaaucucaugccuauauaa

SEQ ID NO: 54065 - RNA, 1410 nt, Artificial Sequence; identical to SEQ ID NO: 53943
  derived and/or modified CDS sequence (wt) from neuraminidase__InfluenzaA__AFG99825

SEQ ID NO: 54066 - RNA, 1410 nt, Artificial Sequence
  derived and/or modified CDS sequence (wt) from neuraminidase__InfluenzaA__AFG99836
augaauccaaaucaaaagauaauaacaauuggcucuguuucucucaccauugccacaauaugcuuccuuaugcaaauugccauccugguaacuacuguaacauugcauuucaagcaauaugagugcaacucccccccaaacaaccaaguaaugccgugugaaccaacaauaauagaaagaaacauaacagagauaguguauuugacuaacaccaccauagagaaagagauaugccccaaacuaguagaauacagaaauuggucaaagccgcaauguaaaauuacaggauuugcaccuuuuucuaaggacaauucaauucggcuuuccgcugguggagacauuugggugacaagagaaccuuaugugucaugcgauccuggcaaguguuaucaauuugcacuaggacagggaaccacacuaaacaacaggcauucaaaugacacaguacaugauaggaccccuuaucgaacccucuugaugaaugaguuggguguuccauuucauuugggaaccaagcaagugugcauagcaugguccagcucaaguugucacgauggaaaagcauggcugcauguuugugucacugggcaugaugaaaaugcaacugcuagcuucauuuacgaugggaggcuuguagauaguauuguuucaugguccaaaaauauccucaggacccaggagucggaaugcguuuguaucaauggaacuuguacaguaguaaugacugauggaagugcuucagaaagagcugauacuaaaauacuauucauugaagaggggaaaaucguucauauuagcccauugucaggaagugcucagcauguagaggagugcuccuguuauccucgauauccuggugucagaugugucugcagagacaacuggaaaggcuccaauagacccaucguagauauaaaugugaaagauuauagcauuguuuccaguuaugugugcucagggcuuguuggagacacacccagaaaaaacgacagcuccagcaguagcuauugccggaauccuaacaaugagaaagggagucauggagugaaaggcugggccuuugacgauggaaaugacguguggaugggaagaacgaucggcgaggaguuacgcucagguuaugaaaccuucaaagucauuggaggcugguccacaccuaacuccaaauugcagacaaauaggcaagucauaguugacagagguaauagguccgguuauucugguauuuucucuguugaaggcaaaagcugcaucaaucggugcuuuuauguagaauugauaaggggaaggaaacaggaaacuaaagucugguggaccucaaacaguauuguuguguuuuguggcacaucagguacauauggaacaggcucauggccugauggggcggacaucaaucucaugccuauauaa

SEQ ID NO: 54067 - RNA, 1410 nt, Artificial Sequence
  derived and/or modified CDS sequence (wt) from neuraminidase__InfluenzaA__AFG99847
augaauccaaaucaaaagauaauaacaauuggcucuguuucucucaccauugccacaauaugcuuccuuaugcaaauugccauccugguaacuacuguaacauugcauuucaagcaauaugagugcaacucccccccaaacaaccaaguaaugccgugugaaccaacaauaauagaaagaaacauaacagagauaguguauuugacuaacaccaccauagagaaagagauaugccccaaacuaguagaauacagaaauuggucaaagccgcaauguaaaauuacaggauuugcaccuuuuucuaaggacaauucaauucggcuuucagcugguggagacauuugggugacaagagaaccuuaugugucaugcgauccuggcaaguguuaucaauuugcacuaggacagggaaccacacuaaacaacaggcauucaaaugacacaguacaugauaggaccccuuaucgaacccucuugaugaaugaguuggguguuccauuucauuugggaaccaagcaagugugcauagcaugguccagcucaaguugucacgauggaaaagcauggcugcauguuugugucacugggcaugaugaaaaugcaacugcuagcuucauuuacgaugggaggcuuguagauaguauuguuucaugguccaaaaauauccucaggacccaggagucggaaugcguuuguaucaauggaacuuguacaguaguaaugacugauggaagugcuucagaaagagcugauacuaaaauacuauucauugaagaggggaaaaucguucauauuagcccauugucaggaagugcucagcauguagaggagugcuccuguuauccucgauauccuggugucagaugugucugcagagacaacuggaaaggcuccaauaggcccaucguagauauaaaugugaaagauuauagcauuguuuccaguuaugugugcucagggcuuguuggagacacacccagaaaaaacgacagcuccagcaguagcuauugccggaauccuaacaaugagaaagggagucauggagugaaaggcugggccuuugacgauggaaaugacguguggaugggaagaacgaucggcgaggaguuacgcucagguuaugaaaccuucaaagucauuggaggcugguccacaccuaacuccaaauugcagacaaauaggcaagucauaguugacagagguaauagguccgguuauucugguauuuucucuguugaaggcaaaagcugcaucaaucggugcuuuuauguagaauugauaaggggaaggaaacaggaaacuaaagucugguggaccucaaacaguauuguuguguuuuguggcacaucagguacauauggaacaggcucauggccugauggggcggacaucaaucucaugccuauauaa

SEQ ID NO: 54068 - RNA, 1410 nt, Artificial Sequence; identical to SEQ ID NO: 53943
  derived and/or modified CDS sequence (wt) from neuraminidase__InfluenzaA__AFG99858

SEQ ID NO: 54069 - RNA, 1410 nt, Artificial Sequence; identical to SEQ ID NO: 53943
  derived and/or modified CDS sequence (wt) from neuraminidase__InfluenzaA__AFG99869

SEQ ID NO: 54070 - RNA, 1410 nt, Artificial Sequence; identical to SEQ ID NO: 53943
  derived and/or modified CDS sequence (wt) from neuraminidase__InfluenzaA__AFG99880

SEQ ID NO: 54071 - RNA, 1410 nt, Artificial Sequence
  derived and/or modified CDS sequence (wt) from neuraminidase__InfluenzaA__AFG99891
augaauccaaaucaaaagauaauaacaauuggcucuguuucucucacuauugccacaauaugcuuccuuaugcaaauugccauccugguaacuacuguaacauugcauuucaagcaauaugagugcaacucccccccaaacaaccaaguaaugcugugugaaccaacaauaauagaaagaaacauaacagagauaguguauuuuacuaacaccaccauagagaaagaaauaugccccaaacuagcagaauacagaaauuggucaaagccgcaauguaaaauuacaggauuugcaccuuuuucuaaggacaauucaauucggcuuucagcugguggagacauuugggugacaagagaaccuuaugugucaugcgauccuggcaaguguuaucaauuugcacuuggacagggaaccacacuaaacaacaggcauucaaaugacacaguacaugauaggaccccuuaucgaacccucuugaugaaugaguuggguguuccauuucauuugggaaccaagcaagugugcauagcaugguccagcucaaguugucacgauggaaaagcauggcugcauguuugugucacugggcaugaugaaaaugcaacugcuagcuucauuuacgaugggaggcuuguagauaguauugguucaugguccaaaaauauccucaggacccaggagucggaaugcguuuguaucaauggaacuuguacaguaguaaugacugauggaagugcuucagaaagagcugauacuaaaauacuauucauugaagaggggaaaaucguucauauuagcucauugucaggaagugcucagcaugucgaggagugcuccuguuauccucgauauccuggugucagaugugucugcagagacaacuggaaaggcuccaauaggcccaucguagauauaaaugugaaagauuauagcauuguuuccaguuaugugugcucagggcuuguuggagacacacccagaaaaaacgacagcuccagcaguagcuauugccggaauccuaacaaugagaaagggagucauggagugaaaggcugggccuuugacgauggaaaugacguguggaugggaagaacgaucggcgaggaguuacgcucagguuaugaaaccuucagagucauuggaggcugguccacaccuaacuccaaauugcagauaaauaggcaagucauaguugacagagguaauagguccgguuauucugguauuuucucuguugaaggcaaaagcugcaucaaucggugcuuuuauguggaguugauaaggggaaggaaacaggaaacugaagucugguggaccucaaacaguauuguuguguuuuguggcaccucagguacauauggaacaggcucauggccugauggggcggacaucaaucucaugccuauauaa

SEQ ID NO: 54072 - RNA, 1410 nt, Artificial Sequence; identical to SEQ ID NO: 53943
  derived and/or modified CDS sequence (wt) from neuraminidase__InfluenzaA__AFG99902

SEQ ID NO: 54073 - RNA, 1410 nt, Artificial Sequence
  derived and/or modified CDS sequence (wt) from neuraminidase__InfluenzaA__AFG99913
augaauccaaaucaaaagauaauaacaauuggcucuguuucucucaccauugccacaauaugcuuccuuaugcaaauugccauccugguaacuacuguaacauugcauuucaagcaauaugagugcaacucccccccaaacaaccaaguaaugccgugugagccaacaauaauagaaagaaacauaacagagauaguguauuugacuaacaccaccauagagaaagagauaugccccaaacuaguagaauacagaaauuggucaaagccgcaauguaaaauuacaggauuugcaccuuuuucuaaggacaauucaauucggcuuuccgcugguggagacauuugggugacaagagaaccuuaugugucaugcgauccuggcaaguguuaucaauuugcacuaggacagggaaccacacuaaacaacaggcauucaaaugacacaguacaugauaggaccccuuaucgaacccucuugaugaaugaguuggguguuccauuucauuugggaaccaagcaagugugcauagcaugguccagcucaaguugucacgauggaaaagcauggcugcauguuugugucacugggcaugaugaaaaugcaacugcuagcuucauuuacgaugggagacuuguagauaguauuguuucaugguccaaaaauauccucaggacccaggagucggaaugcguuuguaucaauggaacuuguacaguaguaaugacugauggaagugcuucagaaagagcugauacuaaaauacuauucauugaagaggggaaaaucguucauauuagcccauugucaggaagugcucagcauguagaggagugcuccuguuauccucgauauccuggggucagaugugucugcagagacaacuggaaaggcuccaauaggcccaucguagauauaaaugugaaagauuauagcauuguuuccaguuaugugugcucagggcuuguuggagacacacccagaaaaaacgacagcuccagcaguagcuauugccggaauccuaacaaugagaaagggagucauggagugaaaggcugggccuuugacgauggaaaugacguguggaugggaagaacgaucggcgaggaguuacgcucagguuaugaaaccuucaaagucauuggaggcugguccacaccuaacuccaaauugcagacaaauaggcaagucauaguugacagagguaauagguccgguuauucugguauuuucucuguugaaggcaaaagcugcaucaaucggugcuuuuauguagaauugauaaggggaaggaaacaggaaacuaaagucugguggaccucaaacaguauuguuguguuuuguggcaccucagguacauauggaacaggcucauggccugauggggcggacaucaaucucaugccuauauaa

SEQ ID NO: 54074 - RNA, 1410 nt, Artificial Sequence; identical to SEQ ID NO: 53943
  derived and/or modified CDS sequence (wt) from neuraminidase__InfluenzaA__AFG99924

SEQ ID NO: 54075 - RNA, 1410 nt, Artificial Sequence
  derived and/or modified CDS sequence (wt) from neuraminidase__InfluenzaA__AFG99935
augaauccaaaucaaaagauaauaacaauuggcucuguuucucucacuauugccacaauaugcuuccuuaugcaaauugccauccugguaacuacuguaacauugcauuucaagcaauacgagugcaacucccccccaaacaaccaaguaaugcugugugaaccaacaauaguagaaagaaacauaacagagauaguguauuugacuaacaccaccauagagaaagaaauaugccccaaacuagcagaauacagaaauuggucaaagccgcaauguaaaauuacaggauuugcaccuuuuucuaaggacaauucaauucggcuuuccgcugguggagacauuugggugacaagagaaccuuaugugucaugcgauccuagcaaguguuaucaauuugcacuuggacagggaaccacacuaaacaacaggcauucaaaugacacaguacaugauaggaccccuuaucgaacccucuugaugaaugaguuggguguuccauuucauuugggaaccaagcaagugugcauagcaugguccagcucaaguugucacgauggaaaagcauggcugcauguuugugucacugggcaugaugaaaaugcaacugcuagcuucauuuacgaugggaggcuuguagauaguauugguucaugguccaaaaauauccucaggacccaggagucggaaugcguuuguaucaauggaacuuguacaguaguaaugacugauggaagugcuucagaaagagcugauacuaaaauacuauucauugaagaggggaaaaucguucauauuagcccauugucaggaagugcucagcaugucgaggagugcuccuguuauccucgauauccuggugucagaugugucugcagagacaacuggaaaggcuccaauaggcccaucguagauauaaauaugaaagauuauagcauuguuuccaguuaugugugcucagggcuuguuggagacacacccagaaacaacgacagcuccagcaguagcuauugccggaauccuaacaaugagaaagggagucauggagugaaaggcugggccuuugacgauggaaaugacguguggaugggaagaacgaucggcgaggaguuacgcucagguuaugaaaccuucaaagucauuggaggcugguccacaccuaacuccaaauugcagauaaauaggcaagucauaguugacagagguaauagguccgguuauucugguauuuucucuguugaaggcaaaagcugcaucaaucggugcuuuuauguggaguugauaaggggaaggaaacaggaaacugaagucugguggaccucaaacaguauuguuguguuuuguggcaccucagguacauauggaacaggcucauggccugauggggcggacaucaaucucaugccuauauaa

SEQ ID NO: 54076 - RNA, 1410 nt, Artificial Sequence
  derived and/or modified CDS sequence (wt) from neuraminidase__InfluenzaA__AFG99946
augaauccaaaucaaaagauaauaacaauuggcucuguuucucucaccauugccacaauaugcuuccuuaugcaaauugccauccugguaacuacuguaacauugcauuucaagcaauaugagugcaacucccccccaaacaaccaaguaaugccgugugaaccaacaauaauagaaagaaacauaacagagauaguguauuugacuaacaccaccauagagaaagagauaugccccaaacuaguagaauacagaaauuggucaaagccgcaauguaaaauuacaggauuugcaccuuuuucuaaggacaauucaauucggcuuuccgcugguggagacauuugggugacaagagaaccuuaugugucaugcgauccuggcaaguguuaucaauuugcacuaggacagggaaccacacuaaacaacaggcauucaaaugacacaguacaugauaggaccccuuaucgaacccucuugaugaaugaguuggguguuccauuucauuugggaaccaagcaagugugcauagcaugguccagcucaaguugucacgauggaaaagcauggcugcauguuugugucacugggcaugaugaaaaugcaacugcuagcuucauuuacgaugggaggcuuguagauaguauuguuucaugguccaaaaauauccucaggacccaggagucggaaugcguuuguaucaauggaaccuguacaguaguaaugacugauggaagugcuucagaaagagcugauacuaaaauacuauucauugaagaggggaaaaucguucauauuagcccauugucaggaagugcucagcauguagaggagugcuccuguuauccucgauauccuggugucagaugugucugcagagacaacuggaaaggcuccaauaggcccaucguagauauaaaugugaaagauuauagcauuguuuccaguuaugugugcucagggcuuguuggagacacacccagaaaaaacgacagcuccagcaguagcuauugccggaauccuaacaaugagaaagggagucauggagugaaaggcugggccuuugacgauggaaaugacguguggaugggaagaacgaucggcgaggaguuacgcucagguuaugaaaccuucaaagucauuggaggcugguccacaccuaacuccaaauugcagacaaauaggcaagucauaguugacagagguaauagguccgguuauucugguauuuucucuguugaaggcaaaagcugcaucaaucggugcuuuuauguagaauugauaaggggaaggaaacaggaaacuaaagucugguggaccucaaacaguauuguuguguuuuguggcacaucagguacauauggaacaggcucauggccugauggggcggacaucaaucucaugccuauauaa

SEQ ID NO: 54077 - RNA, 1410 nt, Artificial Sequence
  derived and/or modified CDS sequence (wt) from neuraminidase__InfluenzaA__AFG99957
augaauccaaaucaaaagauaauaacaauuggcucuguuucucucacuauugccacaauaugcuuccuuaugcaaauugccauccugguaacuacuguaacauugcauuucaagcaauaugagugcaacucccccccaaacaaccaagcaaugcugugugaaccaacaauaauagaaagaaacauaacagagauaguguauuugacuaacaccaccauagagaaagaaauaugccccaaacuagcagaauacagaaauuggucaaagccgcaauguaaaauuacaggauuugcaccuuuuucuaaggacaauucaauucggcuuuccgcugguggagacauuugggugacaagagaaccuuaugugucaugcgauccuggcaaguguuaucaauuugcacuuggacagggaaccacacuaaacaacaggcauucaaaugacacaguacaugauaggaccccuuaucgaacccucuugaugaaugaguuggguguuccauuucauuugggaaccaagcaagugugcauagcaugguccagcucaaguugucacgauggaaaagcauggcugcauguuuguguaacugggcaugaugaaaaugcaacugcuagcuucauuuacgaugggaggcuuguagauaguauugguucaugguccaaaaauauccucaggacccaggagucggaaugcguuuguaucaauggaacuuguacaguaguaaugacugauggaagugcuucagaaagagcugauacuaaaauacuauucauugaagaggggaaaaucguucauauuagcccauugucaggaagugcucagcaugucgaggagugcuccuguuauccucgauauccuggugucagaugugucugcagagacaacuggaaaggcuccaauaggcccaucguagauauaaaugugaaagauuauagcauuguuuccaguuaugugugcucaggacuuguuggagacacacccagaaaaaacgacagcuccagcaguagcuauugccggaauccuaacaaugagaaagggagucauggagugaaaggcugggcuuuugacgauggaaaugacguguggaugggaagaacgaucggcgaggaguuacgcucagguuaugaaaccuucaaagucauuggaggcugguccacaccuaacuccaaauugcagauaaauaggcaagucauaguugacagagguaauagguccgguuauucugguauuuucucuguugaaggcaaaagcugcaccaaucggugcuuuuauguggaguugauaaggggaaggaaacaggaaacugaagucugguggaccucaaacaguauuguuguguuuuguggcaccucagguacauauggaacaggcucauggccugauggggcggacaucaaucucaugccuauauaa

SEQ ID NO: 54078 - RNA, 1410 nt, Artificial Sequence
  derived and/or modified CDS sequence (wt) from neuraminidase__InfluenzaA__AFG99968
augaauccaaaucaaaagauaauaacaauuggcucuguuucucucaccauugccacaauaugcuuccuuaugcaaauugccauccugguaacuacuguaacauugcauuucaagcaauaugagugcaacucccccccaaacaaccaaguaaugccgugugaaccaacaauaauagaaagaaacauaacagagauaguguauuugacuaacaccaccauagagaaagagauaugccccaaacuaguagaauacagaaauuggucaaagccgcaauguaaaauuacaggauuugcaccuuuuucuaaggacaauucaauucggcuuuccgcugguggagacauuugggugacaagagaaccuuaugugucaugcgauccuggcaaguguuaucaauuugcacuaggacagggaaccacacuaaacaacaggcauucaaaugacacaguacaugauaggaccccuuaucgaacccucuugaugaaugaguuggguguuccauuucauuugggaaccaagcaagugugcauagcaugguccagcucaaguugucacgauggaaaagcauggcugcauguuugugucacugggcaugaugaaaaugcaacugcuagcuucauuuacgaugggaggcuuguagauaguauuguuucaugguccaaaaauauccucaggacccaggagucggaaugcguuuguaucaauggaacuuguacaguaguaaugacugauggaagugcuucagaaagagcugauacuaaaauacuauucauugaagaggggaaaaucguucauauuagcccauugucaggaagugcucagcauguagaggagugcuccuguuauccucgauauccuggugucagaugugucugcagagacaacuggaaaggcuccaauaggcccaucguagauauaaaugugaaagauuauagcauuguuuccaguuaugugugcucagggcuuguuggagacacacccagaaaaaacgacagcuccagcaguagcuauugccggaauccuaacaaugagaaagggagucauggagugaaaggcugggccuuugacgauggaaaugacguguggaugggaagaacgaucggcgaggaguuacgcucagguuaugaaaccuucaaagucauuggaggcugguccacaccuaacuccaaauugcagacaaauaggcaagucauaguugacagagguaauagguccgguuauucugguauuuucucuguugaaggcaaaagcugcaucaaucggugcuuuuauguagaauugauaaggggaaggaaacaggaaacuaaagucugguggaccucaaacaguauuguuguguuuuguggcaccucagguacauauggaacaggcucauggccugauggggcggacaucaaucucaugccuauauaa

SEQ ID NO: 54079 - RNA, 1410 nt, Artificial Sequence
  derived and/or modified CDS sequence (wt) from neuraminidase__InfluenzaA__AFG99979
augaauccaaaucaaaagauaauaacaauuggcucuguuucucucaccauugccacaauaugcuuccuuaugcaaauugccauccugguaacuacuguaacauugcauuucaagcaauaugagugcaacucccccccaaacaaccaaguaaugccgugugaaccaacaauaauagaaagaaacauaacagagauaguguauuugacuaacaccaccauagagaaagagauaugccccaaacuaguagaauacagaaauuggucaaagccgcaauguaaaauuacaggauuugcaccuuuuucuaaggacaauucaauucggcuuuccgcugguggagacauuugggugacaagagaaccuuaugugucaugcgauccuggcaaguguuaucaauuugcacuaggacagggaaccacacuaaacaacaggcauucaaaugacacaguacaugauaggaccccuuaucgaacccucuugaugaaugaguuggguguuccauuucauuugggaaccaagcaagugugcauagcaugguccagcucaaguugucacgauggaaaagcauggcugcauguuugugucacugggcaugaugaaaaugcaacugcuagcuucauuuacgaugggaggcuuguagauaguauuguuucaugguccaaaaauauccucaggacccaggagucggaaugcguuuguaucaauggaacuuguacaguaguaaugacugauggaagugcuucagaaagagcugauacuaaaauacuauucauugaagaggggaaaaucguucauauuagcccauugucaggaagugcucagcauguagaggagugcuccuguuauccucgauauccuggugucagaugugucugcagagacaacuggaaaggcuccaauaggcccaucguagauauaaaugugaaagauuauagcauuguuuccaguuaugugugcucagggcuuguuggagacacacccagaaaaaacgacagcuccagcaguagcuauugccugaauccuaacaaugagaaagggagucauggagugaaaggcugggccuuugacgauggaaaugacguguggaugggaagaacgaucggcgaggaguuacgcucagguuaugaaaccuucaaagucauuggaggcugguccacaccuaacuccaaauugcagacaaauaggcaagucauaguugacagagguaauagguccgguuauucugguauuuucucuguugaaagcaaaagcugcaucaaucggugcuuuuauguagaauugauaaggggaaggaaacaggaaacuaaagucugguggaccucaaacaguauuguuguguuuuguggcacaucagguacauauggaacaggcucauggccugauggggcggacaucaaucucaugccuauauaa

SEQ ID NO: 54080 - RNA, 1410 nt, Artificial Sequence
  derived and/or modified CDS sequence (wt) from neuraminidase__InfluenzaA__AFG99990
augaauccaaaucaaaagauaauaacaauuggcucuguuucucucacuauugccacaauaugcuuccuuaugcaaauugccauccugguaacuacuguaacauugcauuucaagcaauaugagugcaacucccccccaaacaaccaagcaaugcugugugaaccaaaaauaauagaaagaaacauaacagagauaguguaucugaccaacaccaccauagagaaagaaauaugccccaaacuagcagaauacagaaauuggucaaagccgcaauguaaaauuacaggauuugcaccuuuuucuaaggacaauucaauucggcuuuccgcugguggagacauuugggugacaagagaaccuuaugugucaugcgauccuggcaaguguuaucaauuugcacuuggacagggaacaacacuaaacaacaggcauucaaaugacacaguacaugauaggaccccuuaucgaacccuauugaugaaugaguuggguguuccauuucauuugggaaccaagcaagugugcauagcaugguccagcucaaguugucacgauggaaaagcauggcugcauguuuguguaacugggcaugaugaaaaugcaacugcuagcuucauuuacgaugggaggcuuguagauaguauugguucaugguccaaaaauauccucaggacccaggagucagaaugcguuuguaucaauggaacuuguacaguaguaaugacugauggaagugcuucagaaagagcugauacuaaaauacuauucauugaagaggggaaaaucguucauauuagcccauugucaggaagugcucagcaugucgaggagugcuccuguuauccucgauauccuggugucagaugugucugcagagacaacuggaaaggcuccaauaggcccaucguagauauaaaugugaaagauuauagcauuguuuccaguuaugugugcucaggacuuguuggagacacacccagaaaaaacgacagcuccagcaguagcuauugccggaauccuaacaaugagaaagggagucauggagugaaaggcugggccuuugaugauggaaaugacguguggaugggaagaacgaucagcgaggaguuacgcucagguuaugaaaccuucaaagucauuggaggcugguccaaaccuaacuccaaauugcagauaaauaggcaagucauaguugacagagguaauagguccgguuauucugguauuuucucuguugaaggcaaaagcugcaucaaucggugcuuuuauguggaguugauaaggggaaggaaacaggaaacugaagucugguggaccucaaacaguauuguuguguuuuguggcaccucagguacauauggaacaggcucauggccugauggggcggacaucaaucucaugccuauauaa

SEQ ID NO: 54081 - RNA, 1410 nt, Artificial Sequence
  derived and/or modified CDS sequence (wt) from neuraminidase__InfluenzaA__AFH00002
augaauccaaaucaaaagauaauaacaauuggcucuguuucucucacuauugccacaauaugcuuccuuaugcaaauugccauucugguaacuacuguaacauugcauuucaagcaauaugagugcagcucccccccaaacaaccaaguaauuccaugucaaccaacaauaauagaaagaaacauaacagagauaguguauuugacuaacaccaccauagagaaagagauaugccccaaacuaguagaauacagaaauuggucaaagccgcaauguaaaauuacaggauuugcaccuuuuucuaaggacaauucaauucggcuuuccgcugguggagacauuugggugacaagagaaccuuaugugucaugcgauccuggcaaauguuaucaauuugcacuuggacagggaaccacacuaaacaacaggcauucaaaugacacaguacaugauaggaccccuuaucgaacccucuugaugaaugaguuggguguuccauuucauuugggaaccaagcaagugugcauagcaugguccagcucaaguugucacgauggaaaagcauggcugcauguuugugucacugggcaugaugaaaaugcaacugcuagcuucauuuacgaugggaggcuuguagauaguauugguucaugguccaaaaauauccucaggacccaggagucggaaugcguuuguaucaaugggacuugugcaguaguaaugacugauggaagugcuucagaaagagcugauacuaaaauacuauucauugaagaggggaaagucguucauauuagcccauugucaggaagugcucagcauguagaggagugcuccuguuauccucgauauccuggugucagaugugucugcagagacaacuggaaaggcuccaauaggcccaucguagacauaaaugugaaaaauuauagcauuguuuccaguuaugugugcucagggcuuguuggagacacacccagaaaaaacgacagcuccagcaguagcuauugccggaauccuaacaaugagaaagggagucauggggugaaaggcugggccuuugacgauggaaaugacguguggaugggaagaacgaucagcgaggaguuacgcucagguuaugaaaccuucaaagucauuggagguugguccacaccuaauuccaaauugcagauaaauaggcaagucauaguugacagcgguaauagguccgguuauucugguauuuucucuguugaaggcaaaagcugcaucaaucggugcuuuuauguggaguugauaaggggaaggaaacaggaaacuaaagucugguggaccucaaacaguauuguuguguuuuguggcaccucagguacauauggaacaggcucauggccugauggggcggacaucaaucucaugccuauauaa

SEQ ID NO: 54082 - RNA, 1410 nt, Artificial Sequence
  derived and/or modified CDS sequence (wt) from neuraminidase__InfluenzaA__AFH00013
augaauccaaaucaaaagauaauaacaauuggcucuguuucucucacuauugccacaauaugcuuccuuaugcaaauugccauccugguaacuacuguaacauugcauuucaagcaauaugagugcaacucccccccaaacaaccaaguaaugcugugugaaccaacaauaauagaaagaaacauaacagagauaguguauuugacuaacaccaccauagagaaagaaauaugccccaaacuagcagaauacagaaauuggucaaagccccaauguaaaauuacaggauuugcaccuuuuucuaaggacaauucaauucggcuuuccgcugguggagacauuugggugacaagagaaccuuaugugucaugcgauccuggcaaguguuaucaauuugcacuuggacagggaacaacacuaaacaacaggcauucaaaugacacaguacaugauaggaccccuuaucgaacccuauugaugaaugaguuggguguuccguuucauuugggaaccaagcaagugugcauagcaugguccagcucaaguugucacgauggaaaagcauggcugcauguuuguguaacugggcaugaugaaaaugcaacugcuagcuucauuuacgaugggaggcuuguagauaguauugguucaugguccaaaaauauccucaggacccaggagucagaaugcguuuguaucaauggaacuuguacaguaguaaugacugauggaagugcuucagaaagagcugauacuaaaauacuauucauugaagaggggaaaaucguucauauuagcccauugucaggaagugcucagcaugucgaggagugcuccuguuacccucgauauccuggugucagaugugucugcagagacaacuggaaaggcuccaauaggcccaucguagauauaaaugugaaagauuauagcauuguuuccaguuaugugugcucaggacuuguuggagacacacccagaaaaaacgacagcuccagcaguagcuauugccggaaucccaacaaugagaaagggagucauggagugaaaggcugggccuuugaugauggaaaugacguguggaugggaagaacgaucagcgaggaguuacgcucagguuaugaaaccuucaaagucauuggaggcugguccaaaccuaacuccaaauugcagauaaauaggcaagucauaguugacagagguaauagguccgguuauucugguauuuucucuguugaaggcaaaagcugcaucaaucggugcuuuuauguggaguugauaaggggaaggaaacaggaaacugaagucugguggaccucaaacaguauuguuguguuuuguggcaccucagguacauauggaacaggcucauggccugauggggcggacaucaaucucaugccuauauaa

SEQ ID NO: 54083 - RNA, 1410 nt, Artificial Sequence
  derived and/or modified CDS sequence (wt) from neuraminidase__InfluenzaA__AFH00024
augaauccaaaucaaaagauaauaacaauuggcucuguuucucucacuauugccacaauaugcuuccuuaugcaaauuaccauccugguaacuacuguaacauugcauuucaagcaauaugagugcaacucccccccaaacaaccaaguaaugcugugugaaccaacaauaauagaaagaaacauaacagagauaguguauuugacuaacaccaccauagagaaagagauaugccccaaacuaguagaauacagaaauuggucaaagccgcaauguaaaaucacaggauuugcaccuuuuucuaaggacaauucaauucggcuuuccgcugguggagacauuugggugacaagagaaccuuaugugucaugcgauccuggcaaguguuaucaauuugcacuuggacagggaaccacacuaaacaacaggcauucaaaugacacaguacaugauaggaccccuuaucgaacccucuugaugaaugaguuggguguuccauuucauuugggaaccaagcaagugugcauagcaugguccaguucaaguugucacgauggaaaagcauggcugcauguuugugucacugggcaugaugaaaaugcaacugcuagcuucauuuacgaugggaggcuuguagauaguauugguucaugguccaaaaauauccucaggacccaggagucggaaugcguuuguaucaauggaacuuguacaguaguaaugacugauggaagugcuucagaaagagcugauacuaaaauacuauucauugaagaggggagaaucguucauauuagcccauugucaggaagugcucagcauguagaggagugcuccuguuauccucgauacccuggugucagaugugucugcagagacaacuggaaaggcuccaauaggcccaucguagauauaaaugugaaagauuauagcauuguuuccaguuaugugugcucagggcuuguuggagacacacccagaaaaaacgacagcuccagcaguagcuauugccggaauccuaacaaugagaaaggaagucauggagugaaaggcugggccuuugacgauggaaaugacguguggaugggaagaacgaucagcgaggaguuacgcucagguuaugaaaccuucaaagucauuggaggcugguccacaccuaacuccaaauugcagauaaauaggcaagucauaguugacagagguaauagguccgguuauucugguauuuucucuguugaaggcaaaagcugcaucaaucggugcuuuuauguggaguugauaaggggaaggaaacaggaaaauaaagucugguggaccucaaacaguauuguuguguuuuguggcaccucagguacauauggaacaggcucauggccugauggggcggacaucaaucucaugccuauauaa

SEQ ID NO: 54084 - RNA, 1410 nt, Artificial Sequence
  derived and/or modified CDS sequence (wt) from neuraminidase__InfluenzaA__AFH00035
augaauccaaaucaaaagauaauaacaauuggcucuguuucucucacuauugccacaauaugcuuccuuaugcaaauugccauccugguaacuacuguaacauugcauuucaagcaauaugagugcaacucccccccaaacaaccaaguaaugcugugugaaccaacaauaauagaaagaaacauaacagagauaguguauuugacuaacaccaccauagagaaagaaauaugccccaaacuagcagaauacagaaauuggucaaagccgcaauguaaaauuacaggauuugcaccuuuuucuaaggacaauucaauucggcuuuccgcugguggagacauuugggugacaagagaaccuuaugugucaugcgauccuggcaaguguuaucaauuugcacuuggacagggaacaacacuaaacaacaggcauucaaaugacacaguacaugauaggaccccuuaucgaacccuauugaugaaugaguuggguguuccguuucauuugggaaccaagcaagugugcauagcaugguccagcucaaguugucacgauggaaaagcauggcugcauguuuguguaacugggcaugaugaaaaugcaacugcuagcuucauuuacgaugggaggcuuguagauaguauugguucaugguccaaaaauauccucaggacccaggagucagaaugcguuuguaucaauggaacuuguacaguaguaaugacugauggaagugcuucagaaagagcugauacuaaaauacuauucauugaagaggggaaaaucguucauauuagcccauugucaggaagugcucagcaugucgaggagugcuccuguuauccucgauauccuggugucagaugugucugcagagacaacuggaaaggcuccaauaggcccaucguagauauaaaugugaaagauuauagcauuguuuccaguuaugugugcucaggacuuguuggagacacacccagaaaaaacgacagcuccagcaguagcuauugccggaauccuaacaaugagaaagggagucauggagugaaaggcugggccuuugaugauggaaaugacguguggaugggaagaacgaucagcgaggaguuacgcucagguuaugaaaccuucaaagucauuggaggcugguccaaaccuaacuccaaauugcagauaaauaggcaagucauaguugacagagguaauagguccgguuauucugguauuuucucuguugaaggcaaaagcugcaucaaucggugcuuuuauguggaguugauaaggggaaggaaacaggaaacugaagucugguggaccucaaacaguauuguuguguuuuguggcaccucagguacauauggaacaggcucauggccugauggggcggacaucaaucucaugccuauauaa

SEQ ID NO: 54085 - RNA, 1410 nt, Artificial Sequence; identical to SEQ ID NO: 54084
  derived and/or modified CDS sequence (wt) from neuraminidase__InfluenzaA__AFH00046

SEQ ID NO: 54086 - RNA, 1410 nt, Artificial Sequence
  derived and/or modified CDS sequence (wt) from neuraminidase__InfluenzaA__AFH00057
augaauccaaaucaaaagauaauaacaauuggcucuguuucucucacuauugccacaauaugcuuccuuaugcaaauugccauccugguaacuacuguaacauugcauuucaagcaauaugagugcaacucccccccaaacaaccaaguaaugcugugugaaccaacaauaauagaaagaaacauaacagagauaguguaucugaccaacaccaccauagagaaagaaauaugccccaaacuagcagaauacagaaauuggucaaagccgcaauguaaaauuacaggauuugcaccuuuuucuaaggacaauucaauucggcuuuccgcugguggagacauuugggugacaagagaaccuuaugugucaugcgauccuggcaaguguuaucaauuugcacuuggacagggaacaacacuaaacaacaggcauucaaaugacacaguacaugauaggaccccuuaucgaacccuauugaugaaugaguuggguguuccauuucauuugggaaccaagcaagugugcauagcaugguccagcucaaguugucacgauggaaaagcauggcugcauguuuguguaacugggcaugaugaaaaugcaacugcuagcuucauuuacgaugggaggcuuguagauaguauugguucaugguccaaaaauguccucaggacccaggagucggaaugcguuuguaucaauggaacuuguacaguaguaaugacugauggaagugcuucagaaagagcugauacuaaaauacuauucauugaagaggggaaaaucguucauauuagcccauugucaggaagugcucagcaugucgaggagugcuccuguuauccucgauauccuggugucagaugugucugcagagacaacuggaaaggcuccaauaggcccaucguagauauaaaugugaaagauuauagcauuguuuccaguuaugugugcucaggacuuguuggagacacacccagaaaaaacgacagcuccagcaguagcuauugccggaauccuaacaaugagaaagggagucauggagugaaaggcugggccuuugaugauggaaaugacguguggaugggaagaacgaucagcgaggaguuacgcucagguuaugaaaccuucaaagucauuggaggcugguccaacccuaacuccaaauugcagauaaauaggcaagucauaguugacagagguaauagauccgguuauucugguauuuucucuguugaaggcaaaagcugcaucaaucggugcuuuuauguggaguugauaaggggaaggaaacaggaaacugaagucugguggaccucaaacaguauuguuguguuuuguggcaccucagguacauauggaacaggcucauggccugauggggcggacaucaaucucaugccuauauaa

SEQ ID NO: 54087 - RNA, 1410 nt, Artificial Sequence
  derived and/or modified CDS sequence (wt) from neuraminidase__InfluenzaA__AFH00068
augaauccaaaucaaaagauaauaacaauuggcucuguuucucucacuauugccacaauaugcuuccuuaugcaaauugccauccugguaacuacuguaacauugcauuucaagcaauaugagugcaacucccccccaaacaaccaaguaaugcugugugaaccaacaauaauagaaagaaacauaacagagauaguguaucugaccaacaccaccauagagaaagaaauaugccccaaacuagcagaauacagaaauuggucaaaaccgcaauguaaaauuacaggauuugcaccuuuuucuaaggacaauucaauucggcuuuccgcugguggagacauuugggugacaagagaaccuuaugugucaugcgauccuggcaaguguuaucaauuugcccuuggacagggaacaacacuaaacaacaggcacucaaaugacacaguacaugauaggaccccuuaucgaacccuauugaugaaugaguuggguguuccauuucauuugggaaccaagcaagugugcauagcaugguccagcucaaguugucacgauggaaaagcauggcugcauguuuguguaacugggcaugaugaaaaugcaacugcuagcuucauuuacgaugggaggcuuguagauaguauugguucaugguccaaaaauauccucaggacccaggagucggaaugcguuuguaucaauggaacuuguacaguaguaaugacugauggaagugcuucagaaagagcugauacuaaaauacuauucauugaagagggaaaaaucguucauauuagcccauugucaggaagugcucagcaugucgaggagugcuccuguuauccucgauauccuggugucagaugugucugcagagacaacuggaaaggcuccaauaggcccaucguagauauaaaugugaaagauuauagcauuguuuccaguuaugugugcucaggacuuguuggagacacacccagaaaaaacgacagcuccagcaguagcuauugccggaauccuaacaaugagaaagggagucauggagugaaaggcugggccuuugaugauggaaaugacguguggaugggaagaacgaucagcgaggaguuacgcucagguuaugaaaccuucaaagucauuggaggcugguccaaaccuaacuccaaauugcagauaaauaggcaagucauaguugacagagguaauagguccgguuauucugguauuuucucuguugaaggcaaaagcugcaucaaucggugcuuuuauguggaguugauaaggggaaggaaacaggaaacugaagucugguggaccucaaacaguauuguuguguuuuguggcaccucagguacauauggaacaggcucauggccugauggggcggacaucaaucucaugccuauauaa

SEQ ID NO: 54088 - RNA, 1410 nt, Artificial Sequence
  derived and/or modified CDS sequence (wt) from neuraminidase__InfluenzaA__AFH00079
augaauccaaaucaaaagauaauaacaauuggcucuguuucucucacuauugccacaauaugcuuccuuaugcaaauugccauccugguaacuacuguaacauugcauuucaagcaauaugagugcaacucccccccaaacaaccaaguaaugcugugugaaccaacaauaauagaaagaaacauaacagagauaguguauuugacuaacaccaccauagagaaagaaauaugccccaaacuagcagaauacagaaauuggucaaagccgcaauguaaaauuacaggauuugcaccuuuuucuaaggacaauucaauucggcuuuccgcugguggagacauuugggugacaagagaaccuuaugugucaugcgauccuggcaaguguuaucaauuugcacuuggacagggaacaacacuaaacaacaggcauucaaaugacacaguacaugauaggaccccuuaucgaacccuauugaugaaugaguuggguguuccguuucauuugggaaccaagcaagugugcauagcaugguccagcucaaguugucacgauggaaaagcauggcugcauguuuguguaacugggcaugaugaaaaugcaacugcuagcuucauuuacgaugggaggcuuguagauaguauugguucaugguccaaaaauauccucaggacccaggagucggaaugcguuuguaucaauggaacuuguacaguaguaaugacugauggaagugcuucagaaagagcugauacuaaaauacuauucauugaagaggggaaaaucguucauauuagcccauugucaggaagugcucagcaugucgaggagugcuccuguuauccucgauauccuggugucagaugugucugcagagacaacuggaaaggcuccaauaggcccaucguagauauaaaugugaaagauuauagcauuguuuccaguuaugugugcucaggacuuguuggagacacacccagaaaaaacgacagcuccagcaguagcuauugccggaauccuaacaaugagaaagggagucauggagugaaaggcugggccuuugaugauggaaaugacguguggaugggaagaacgaucagcgaggaguuacgcucagguuaugaaaccuucaaagucauugaaggcugguccaaaccuaacuccaaauugcagauaaauaggcaagucauaguugacagagguaauagguccgguuauucugguauuuucucuguugaaggcaaaagcugcaucaaucggugcuuuuauguggaguugauaaggggaaggaaacaggaaacugaagucugguggaccucaaacaguauuguuguguuuuguggcaccucagguacauauggaacaggcucauggccugauggggcggacaucaaucucaugccuauauaa

SEQ ID NO: 54089 - RNA, 1410 nt, Artificial Sequence
  derived and/or modified CDS sequence (wt) from neuraminidase__InfluenzaA__AFH00090
augaauccaaaucaaaagauaauaacaauuggcucuguuucucucacuauugccacaauaugcuuccuuaugcaaauugccauccugguaacuacuguaacauugcauuucaagcaauaugagugcaacucccccccaaacaaccaaguaaugcugugugaaccaacaauaauagaaagaaacauaacagagauaguguaucugaccaacaccaccauagagaaagaaauaugccccaaacuagcagaauacagaaauuggucaaagccgcaauguaaaauuacaggauuugcaccuuuuucuaaggacaauucaauucggcuuuccgcugguggagacauuugggugacaagagaaccuuaugugucaugcgauccuggcaaguguuaucaauuugcccuuggacagggaacaacacuaaacaacaggcauucaaaugacacaguacaugauaggaccccuuaucgaacccuauugaugaaugaguuggguguuccauuucauuugggaaccaagcaagugugcauagcaugguccagcucaaguugucacgauggaaaagcauggcugcauguuuguguaacugggcaugaugaaaaugcaacugcuagcuucauuuacgaugggaggcuuguagauaguauugguucaugguccaaaaauauccucaggacccaggagucggaaugcguuuguaucaauggaacuuguacaguaguaaugacugauggaagugcuucagaaagagcugauacuaaaauacuauucauugaagaggggaaaaucguucauauuagcccauugucaggaagugcucagcaugucgaggagugcuccuguuauccucgauauccuggugucagaugugucugcagagacaacuggaaaggcuccaauaggcccaucguagauauaaaugugaaagauuauagcauuguuuccaguuaugugugcucaggacuuguuggagacacacccagaaaaaacgacagcuccagcaguagcuauugcuggaauccuaacaaugagaaagggagucauggagugaaaggcugggccuuugaugauggaaaugacguguggaugggaagaacgaucagcgaggaguuacgcucagguuaugaaaccuucaaagucauuggaggcugguccaaaccuaacuccaaauugcagauaaauaggcaagucauaguugacagagguaauaggucugguuauucugguauuuucucuguugaaggcaaaagcugcaucaaucggugcuuuuauguggaguugauaaggggaaggaaacaggaaacugaagucugguggaccucaaacaguauuguuguguuuuguggcaccucagguacauauggaacaggcucauggccugauggggcggacaucaaucucaugccuauauaa

SEQ ID NO: 54090 - RNA, 1410 nt, Artificial Sequence
  derived and/or modified CDS sequence (wt) from neuraminidase__InfluenzaA__AFH00101
augaauccaaaucaaaagauaauaacaauuggcucuguuucucucacuauugccacaauaugcuuccuuaugcaaauugccauccugguaacuacuguaacauugcauuucaagcaauaugagugcaacucccccccaaacaaccaaguaaugcugugugaaccaacaauaauagaaagaaacauaacagagauaguguaucugaccaacaccaccauagagaaagaaauaugccccaaacuagcagaauacagaaauuggucaaaaccgcaauguaaaauuacaggauuugcaccuuuuucuaaggacaauucaauuaggcuuuccgcugguggagacauuugggugacaagagaaccuuaugugucaugcgauccuggcaaguguuaucaauuugcccuuggacagggaacaacacuaaacaacaggcacucaaaugacacaguacaugauaggaccccuuaucgaacccuauugaugaaugaguuggguguuccauuucauuugggaaccaagcaagugugcauagcaugguccagcucaaguugucacgauggaaaagcauggcugcauguuuguguaacugggcaugaugaaaaugcaacugcuagcuucauuuacgaugggaggcuuguagauaguauugguucaugguccaaaaaaauccucaggacccaggagucggaaugcguuuguaucaauggaacuuguacaguaguaaugacugauggaagugcuucagaaagagcugauacuaaaauacuauucauugaagagggaaaaaucguucauauuagcccauugucaggaagugcucagcaugucgaggagugcuccuguuauccucgauauccuggugucagaugugucugcagagacaacuggaaaggcuccaauaggcccaucguagauauaaaugugaaagauuauagcauuguuuccaguuaugugugcucaggacuuguuggagacacacccagaaaaaacgacagcuccagcaguagcuauugccggaauccuaacaaugagaaagggagucauggagugaaaggcugggccuuugaugauggaaaugacguguggaugggaagaacgaucagcgaggaguuacgcucagguuaugaaaccuucaaagucauuggaggcugguccaaaccuaacuccaaauugcagauaaauaggcaagucauaguugacagagguaauagguccgguuauucugguauuuucucuguugaaggcaaaagcugcaucaaucggugcuuuuauguggaguugauaaggggaaggaaacaggaaacugaagucugguggaccucaaacaguauuguuguguuuuguggcaccucagguacauauggaacaggcucauggccugauggggcggacaucaaucucaugccuauauaa

SEQ ID NO: 54091 - RNA, 1410 nt, Artificial Sequence; identical to SEQ ID NO: 47284
  derived and/or modified CDS sequence (wt) from neuraminidase__InfluenzaA__AFH00112

SEQ ID NO: 54092 - RNA, 1410 nt, Artificial Sequence
  derived and/or modified CDS sequence (wt) from neuraminidase__InfluenzaA__AFH00123
augaauccaaaucaaaagauaauaacaauuggcucuguuucucucacuauugccacaauaugcuuucuuaugcaaauugccauccugguaacuacuguaacauugcauuucaagcaauaugagugcaacucccccccaagcaaccaaguaaugcugugugaaccaacaauaauagaaagaaacauaacagagauaguguauuugacuaacaccaccauagagaaagaaauaugccccaaacuggcagaauacagaaauuggucaaagccgcaauguaaaauuacaggauuugcaccuuuuucuaaggacaauucaauucggcuuuccgcugguggagacauuugggugacaagagaaccuuaugugucaugcgauccuggcaaguguuaucaauuugcacuuggacagggaacaacacuaaauaacaggcauucaaaugacacaguacaugauaggaccccuuaucgaacccuauugaugaaugaguuggguguuccauuucauuugggaaccaagcaagugugcauagcaugguccagcucaaguugucacgauggaaaagcauggcugcauguuuguguaacugggcaugaugaaaaugcaacugcuagcuucauuuacgaugggaggcuuguagauaguauugguucaugguccaaaaauauccucaggacccaggagucggaaugcguuuguaucaauggaacuuguacaguaguaaugacugauggaagugcuucagaaagagcugauacuaaaauacuauucauugaagaggggaaaaucguucauauuagcccauugucaggaagugcucagcaugucgaggagugcuccuguuauccucgauauccuggugucagaugugucugcagagacaacuggaaaggcuccaauaggcccaucguagauauaaaugugaaagauuauagcauuguuuccaguuaugugugcucaggacuuguuggagacacacccagaaaaaacgacagcuccagcaguagcuauugccggaauccuaacaaugagaaagggagucauggagugaaagguugggccuuugaugauggaaaugacguguggaugggaagaacgaucagcgaggaguuacgcucugguuaugaaaccuucaaaguuauuggaggcugguccaaaccuaacuccaaauugcagauaaauaggcaagucauaguugacagagguaauagguccgguuauucugguauuuucucuguugaaggcaaaagcugcaucaaucggugcuuuuauguggaguugauaaggggaaggaaacaggaaacugaagucugguggaccucaaacaguauuguuguguuuuguggcaccucagguacauauggaacaggcucauggccugauggggcggacaucaaucucaugccuauauaa

SEQ ID NO: 54093 - RNA, 1410 nt, Artificial Sequence
  derived and/or modified CDS sequence (wt) from neuraminidase__InfluenzaA__AFH00156
augaauccaaaucaaaagauaauaacaauuggcucuguuucucucacuauugccacaauaugcuuccuuaugcaaauugccauccugguaacuacuguaacauugcauuucaagcaauaugagugcaacucccccccaaacaaccaaguaaugcugugugaaccaacaauaauagaaagaaacauaacagagauaguguaucugaccaacaccaccauagagaaagaaauaugccccaaacuagcagaauacagaaauuggucaaagccgcaauguaaaauuacaggauuugcaccuuuuucuaaggacaauucaauucggcuuuccgcugguggagacauuugggugacaagagaaccuuaugugucaugcgauccuggcaaguguuaucaauuugcccuuggacagggaacaacacuaaacaacaggcauucaaaugacacaguacaugauaggaccccuuaucgaacccuauugaugaaugaguuggguguuccauuucauuugggaaccaaacaagugugcauagcaugguccagcucaaguugucacgauggaaaagcauggcugcauguuuguguaacugggcaugaugaaaaugcaacugcuagcuucauuuacgaugggaggcuuguagauaguauugguucaugguccaaaaauauccucaggacccaggagucggaaugcguuuguaucaauggaacuuguacaguaguaaugacugauggaagugcuucagaaagagcugauacuaaaauacuauucauugaagaggggaaaaucguucauauuagcccauugucaggaagugcucagcaugucgaggagugcuccuguuauccucgauauccuggugucagaugugucugcagagacaacuggaaaggcuccaauaggcccaucauagauauaaaugugaaagauuauagcauuguuuccaguuaugugugcucaggacuuguuggagacacacccagaaaaaacgacagcuccagcaguagcuauugccggaauccuaacaaugagaaagggagucauggagugaaaggcugggccuuugaugauggaaaugacguguggaugggaagaacgaucagcgaggaguuacgcucagguuaugaaaccuucaaagucauuggaggcugguccaaaccuaacuccaaauugcagauaaauaggcaagucauaguugacagagguaauagguccgguuauucugguauuuucucuguugaaggcaaaagcugcaucaaucggugcuuuuauguggaguugauaaggggaaggaaacaggaaacugaagucugguggaccucaaacaguauuguuguguuuuguggcaccucagguacauauggaacaggcucauggccugauggggcggacaucaaucucaugccuauauaa

SEQ ID NO: 54094 - RNA, 1410 nt, Artificial Sequence
  derived and/or modified CDS sequence (wt) from neuraminidase__InfluenzaA__AFH00167
augaauccaaaucaaaagauaauaacaauuggcucuguuucucucacuauugccacaaugugcuuccuuaugcaaauugccauccugguaacuacuguaacauugcauuucaagcaauaugagugcaacucccccccaaacaaccaaguaaugcugugugaaccaacaauaauagaaagaaacauaacagagauaguguaucugaccaacaccaccauagagaaagaaauaugccccaaacuagcagaauacagaaauuggucaaagccgcaauguaaaauuacaggauuugcaccuuuuucuaaggacaauucaauucggcuuuccgcugguggagacauuugggugacaagagaaccuuaugugucaugcgauccuggcaaguguuaucaauuugcacuuggacagggaacaacacuaaacaacaggcauucaaaugacacaguacaugauaggaccccuuaucgaacccuauugaugaaugaguuggguguuccauuucauuugggaaccaagcaagugugcauagcaugguccagcucaaguugucacgauggaaaagcauggcugcauguuuguguaacugggcaugaugaaaaugcaacugcuagcuucauuuacgaugggaggcuuguagauaguauugguucaugguccaaaaauauccucaggacccaggagucggaaugcguuuguauaaauggaacuuguacaguaguaaugacugauggaagugcuucagaaagagcugauacuaaaauacuauucauugaagaagggaaaaucguucauauuagcccauugucaggaagugcucagcaugucgaggagugcuccuguuauccucgauauccuggugucagaugugucugcagagacaacuggaaaggcuccaauaggccaaucguagauauaaaugugaaagauuauagcauuguuuccaguuaugugugcucaggacuuguuggagacacacccagaaaaaacgacagcuccagcaguagcuauugccggaauccuaacaaugagaaagggagucauggagugaaaggcugggccuuugaugauggaaaugacguguggaugggaagaacgaucagcgaggaguugcgcucagguuaugaaaccuucaaagucauuggaggcugguccaaaccuaacuccaaauugcagauaaauaggcaagucauaguugacagagguaauagauccgguuauucugguauuuucucuguugaaggcaaaagcugcaucaaucggugcuuuuauguggaguugauaaggggaaggaaacaggaaacugaagucugguggaccucaaacaguauuguuguguuuuguggcaccucagguacauauggaacaggcucauggccugauggggcggacaucaaucucaugccuauauaa

SEQ ID NO: 54095 - RNA, 1410 nt, Artificial Sequence; identical to SEQ ID NO: 54093
  derived and/or modified CDS sequence (wt) from neuraminidase__InfluenzaA__AFH00178

SEQ ID NO: 54096 - RNA, 1410 nt, Artificial Sequence
  derived and/or modified CDS sequence (wt) from neuraminidase__InfluenzaA__AFH00189
augaauccaaaucaaaagauaauaacaauuggcucuguuucucucacuauugccacaauaugcuuccuuaugcaaauugccauccugguaacuacuguaacauugcauuucaagcaauaugaguacaacucccccccaaacaaccaaguaaugcugugugaaccaaaaauaauagaaagaaacauaacagagauaguguaucugaccaacaccaccauagagaaagaaauaugccccaaacuagcagaauacagaaauuggucaaagccgcaauguaaaauuacaggauuugcaccuuuuucuaaggacaauucaauucggcuuuccgcugguggagacauuugggugacaagagaaccuuaugugucaugcgauccuggcaaguguuaucaauuugcccuuggacagggaacaacacuaaacaacaggcacucaaaugacacaguacaugauaggaccccuuaucgaacccuauugaugaaugaauuggguguuccauuucauuugggaaccaagcaagugugcauagcaugguccagcucaaguugucacgauggaaaagcauggcugcauguuuguguaacugggcaugaugaaaaugcaacugcuagcuucauuuacgaugggaggcuuguagauaguauugguucaugguccaaaaauauccucaggacccaggagucggaaugcguuuguaucaauggaacuuguacaguaguaaugacugauggaagugcuucagaaagagcugauacuaaaauacuauucauugaagaggggaaaaucguucauauuagcccauugucaggaagugcucagcaugucgaggagugcuccuguuauccucgauauccuggugucagaugugucugcagagacaacuggaaaggcuccaauaggcccaucguagauauaaaugugaaagauuauagcauuguuuccaguuaugugugcucaggacuuguuggagacacacccagaaaaaacgacagcuccagcaguagcuauugccggaauccuaacaaugagaaagggagucauggagugaaaggcugggccuuugaugauggaaaugacguguggaugggaagaacgaucagcgaggaguuacgcucagguuaugaaaccuucaaagucauuggaggcugguccaaaccuaacuccaaauugcagauaaauaggcaagucauaguugacagagguaauagguccgguuauucugguauuuucucuguugaaggcaaaagcugcaucaaucggugcuuuuauguggaguugauaaggggaaggaaacaggaaacugaagucugguggaccucaaacaguauuguuguguuuuguggcaccucagguacauauggaacaggcucauggccugauggggcggacaucaaucucaugccuauauaa

SEQ ID NO: 54097 - RNA, 1410 nt, Artificial Sequence
  derived and/or modified CDS sequence (wt) from neuraminidase__InfluenzaA__AFH00200
augaauccaaaucaaaagauaauaacaauuggcucuguuucucucacuauugccacaauaugcuuccuuaugcaaauugccauccugguaacuacuguaacauugcauuucaagcaauaugagugcaacucccccccaaacaaccaaguaaugcugugugaaccaacaauaauagaaagaaacauaacagagauaguguaucugaccaacaccaccauagagaaagaaauaugccccaaacuagcagaauacagaaauuggucaaagccgcaauguaaaauuacaggauuugcaccuuuuucuaaggacaauucaauucggcuuuccgcugguggagacauuugggugacaagagaaccuuaugugucaugcgauccuggcaaguguuaucaauuugcccuuggacagggaacaacacuaaacaacaggcacucaaaugacacaguacaugauaggaccccuuaucgaacccuacugaugaaugaguuggguguuccauuucauuugggaaccaagcaagugugcauagcaugguccagcucaaguugucacgauggaaaagcauggcugcauguuuguguaacugggcaugaugaaaaugcaacugcuagcuucauuuacgaugggaggcuuguagauaguauugguucaugguccaaaaauauccucaggacccaggagucggaaugcguuuguaucaauggaacuuguacaguaguaaugacugauggaagugcuucagaaagagcugauacuaaaauacuauucauugaagaggggaaaaucguucauauuagcccauugucaggaagugcucagcaugucgaggagugcuccuguuauccucgauauccuggugucagaugugucugcagagacaacuggaaaggcuccaauaggcccaucguagauauaaaugugaaagauuauagcauuguuuccaguuaugugugcucaggacuuguuggagacacacccagaaaaaacgacagcuccagcaguagcuauugccggaauccuaacaaugagaaagggagucauggagugaaaggcugggccuuugaugauggaaaugacguguggaugggaagaacgaucagcgaggaguuacgcucagguuaugaaaccuucaaagucauuggaggcugguccaaaccuaacuccaaauugcagauaaauaggcaagucauaguugacagagguaauagguccgguuauucugguauuuucucuguugaaggcaaaagcugcaucaaucggugcuuuuauguggaguugauaaggggaaggaaacaggaaacugaagucugguggaccucaaacaguauuguuguguuuuguggcaccucagguacauauggaacaggcucauggccugauggggcggacaucaaucucaugccuauauaa

SEQ ID NO: 54098 - RNA, 1410 nt, Artificial Sequence
  derived and/or modified CDS sequence (wt) from neuraminidase__InfluenzaA__AFH00211
augaauccaaaucaaaagauaauaacaauuggcucuguuucucucacuauugccacaaugugcuuccuuaugcaaauugccauccugguaacuacuguaacauugcauuucaagcaauaugagugcaacucccccccaaacaaccaaguaaugcuaugugaaccaacaauaauagaaagaaacauaacagagauaguguaucugaccaacaccaccauagagaaagaaauaugccccaaacuagcagaauacagaaauuggucaaagccgcaauguaaaauuacaggauuugcaccuuuuucuaaggacaauucaauucggcuuuccgcugguggagacauuugggugacaagagaaccuuaugugucaugcgauccuggcaaguguuaucaauuugcacuuggacagggaacaacacuaaacaacaggcauucaaaugacacaguacaugauaggaccccuuaucgaacccuauugaugaaugaguuggguguuccauuucauuugggaaccaagcaagugugcauagcaugguccagcucaaguugucacgauggaaaagcauggcugcauguuuguguaacugggcaugaugaaaaugcaacugcuagcuucauuuacgaugggaggcuuguagauaguauugguucaugguccaaaaauauccucaggacccaggagucggaaugcguuuguaucaauggaacuuguacaguaguaaugacugauggaagugcuucagaaagggcugauacuaaaauacuauucauugaagaggggaaaaucguucauauuagcccauugucaggaagugcucagcaugucgaggagugcucauguuauccucgauauccuggugucagaugugucugcagagacaacuggaaaggcuccaauaggcccaucguagauauaaaugugaaagauuauagcauuguuuccaguuaugugugcucaggacuuguuggagacacacccagaaaaaacgacagcuccagcaguagcuauugccggaauccuaacaaugagaaagggagucauggagugaaaggcugggccuuugaugauggaaaugacguguggaugggaagaacgaucagcgaggaguuacgcucagguuaugaaaccuucaaagucauuggaggcugguccaaaccuaacuccaaauugcagauaaauaggcaagucauaguugacagagguaauagauccgguuauucugguauuuucucuguugaaggcaaaagcugcaucaaucggugcuuuuauguggaguugauaaggggaaggaaacaggaaacugaagucugguggaccucaaacaguauuguuguguuuuguggcaccucagguacauauggaacaggcucauggccugauggggcggacaucaaucucaugccuauauaa

SEQ ID NO: 54099 - RNA, 1410 nt, Artificial Sequence
  derived and/or modified CDS sequence (wt) from neuraminidase__InfluenzaA__AFH00222
augaauccaaaucaaaagauaauaacaauuggcucuguuucucucacuauugccacaauaugcuuccuuaugcaaauugccauccugguaacuacuguaacauugcauuucaagcaauaugagugcaacucccccccaaacaaccaaguaaugcugugugaaccaacaauaauagaaagaaacauaacagagauaguguauuugacuaacaccaccauagagaaagaaauaugccccaaacuggcagaauacagaaauuggucaaagccgcaauguaaaauuacaggauuugcaccuuuuucuaaggacaauucaauucggcuuuccgcugguggagacauuugggugacaagagaaccuuauguaucaugcgauccuggcaaguguuaucaauuugcacuuggacagggaacaacacuaaacaacaggcauucaaauaacacaguacaugauaggaccccuuaucgaacccuauugaugaaugaguuggguguuccauuucauuuggggaccaagcaagugugcauagcaugguccagcucaaguugucacgauggaaaagcauggcugcauguuuguguaacugggcaugaugaaaaugcaacugcuagcuucauuuacgaugggaggcuuguagauaguauugguucaugguccaaaaauauccucaggacccaggagucggaaugcguuuguaucaauggaacuuguacaguaguaaugacugauggaagugcuucagaaagagcugauacuaaaauacuauucauugaagaggggaaaaucguucauauuagcccauugucaggaagugcucagcaugucgaggagugcuccuguuauccucgauauccuggugucagaugugucugcagagacaacuggaaaggcuccaauaggcccaucguagauauaaaugugaaagauuauagcauuguuuccaguuaugugugcucaggacuuguuggagacacacccagaaaaaacgacagcuccagcaguagcuauugccggaauccuaacaaugagaaagggagucauggagugaaaggcugggccuuugaugauggaaaugacguguggaugggaagaacgaucagcgaggaguuacgcucagguuaugaaaccuucaaaguuauuggaggcugguccaaaccuaacuccaaauugcagauaaauaggcaagucauaguugacagagguaauagguccgguuauucugguauuuucucuguugaaggcaaaagcugcaucaaucggugcuuuuauguggaguugauaaggggaaggaaacaggaaacugaagucugguggaccucaaacaguauuguuguguuuuguggcaccucagguacauauggaacaggcucauggccugauggggcggacaucaaucucaugccuauauaa

SEQ ID NO: 54100 - RNA, 1410 nt, Artificial Sequence; identical to SEQ ID NO: 47134
  derived and/or modified CDS sequence (wt) from neuraminidase__InfluenzaA__AFH00233

SEQ ID NO: 54101 - RNA, 1410 nt, Artificial Sequence
  derived and/or modified CDS sequence (wt) from neuraminidase__InfluenzaA__AFH00244
augaauccaaaucaaaagauaauaacaauuggcucuguuucucucacuauugccacaauaugcuuccuuaugcaaauugccauccugguaacuacuguaacauuguauuucaagcaauaugagugcaacucccccccaagcaaccaaguaaugcugugugaaccaacaauaguagaaagaaacauaacagagauaguguauuugacuaacaccaccauagagaaagaaauaugccccaaacuggcagaauacagaaauuggucaaagccgcaauguaaaauuacaggauuugcaccuuuuucuaaggacaauucaauucggcuuuccgcugguggagacauuugggugacaagagaaccuuaugugucaugcgauccuggcaaguguuaucaauuugcacuuggacagggaacaacacuaaacaacaggcauucaaaugacacaguacaugauaggaccccuuaucgaacccuauugaugaaugaguuggguguuccauuucauuugggaaccaagcaagugugcauagcaugguccagcucaaguugucacgauggaaaagcauggcugcauguuuguguaacugggcaugaugaaaaugcaacugcuagcuucauuuacgaugggaggcuuguagauaguauugguucaugguccaaaaauauccucaggacccaggagucggaaugcguuuguaucaauggaacuuguacaguaguaaugacugaugggagugcuucagaaagagcugauacuaaaauacuauucauugaagaggggaaaaucguucauauuagcccauugucaggaagugcuaagcaugucgaggagugcuccuguuauccucgauauccuggugucagaugugucugcagagacaacuggaaaggcuccaauaggcccaucguagauauaaaugugaaagauuauagcauuguuuccaguuaugugugcucaggacuuguuggagacacacccagaaaaaacgacagcuccagcaguagcuauugccggaauccuaacaaugagaaagggagucauggagugaaagguugggccuuugaugauggaaaugacguguggaugggaagaacgaucagcgaggaguuacgcucugguuaugaaaccuucaaaguuauuggaggcugguccaaaccuaacuccaaauugcagauaaauaggcaagucauaguugacagagguaauagguccgguuauucugguauuuucucuguugaaggcaaaagcugcaucaaucggugcuuuuauguggaguugauaaggggaaggaaacaggaaacugaagucugguggaccucaaacaguauuguuguguuuuguggcaccucagguacauauggaacaggcucauggccugauggggcggacaucaaucucaugccuauauaa

SEQ ID NO: 54102 - RNA, 1410 nt, Artificial Sequence
  derived and/or modified CDS sequence (wt) from neuraminidase__InfluenzaA__AFH00255
augaauccaaaucaaaagauaauaacaauuggcucuguuucucucacuauugccacaauaugcuuccuuaugcaaauugccauccugguaacuacuguaacauugcauuucaagcaauaugagugcaacucccccccaaacaaccaaguaaugcugugugaaccaacaauaauagaaagaaacauaacagagauaguguauuugacuaacaccaccauagagaaagaaauaugccccaaacuagcagaauacagaaauuggucaaagccgcaauguaaaauuacaggauuugcaccuuuuucuaaggacaauucaauucggcuuuccgcugguggagacauuugggugacaagagaaccuuaugugucaugcgauccuggcaaguguuaucaauuugcacuuggacagggaacaacacuaaacaacaggcauucaaaugacacaguacaugauaggaccccuuaucgaacccuauugaugaaugaguuggguguuccauuucauuugggaaccaagcaagugugcauagcaugguccagcucaaguugucacgauggaaaagcauggcugcauguuuguguaacugggcaugaugaaaaugcaacugcuagcuucauuuacgaugggaggcuuguagauaguauugguucaugguccaaaaauauccucaggacccaggagucggaaugcguuuguaucaauggaacuuguacaguaguaaugacugauggaagugcuucagaaagagcugauacuaaaauacuauucauugaagaggggaaaaucguucauauuagcccauugucaggaagugcucagcaugucgaggagugcuccuguuauccucgauauccuggugucaggugugucugcagagacaacuggaaaggcuccaauaggcccaucguagauauaaaugugaaagauuauagcauuguuuccaguuaugugugcucaggacuuguuggagacacacccagaaaaaacgacagcuccagcaguagcuauugccggaauccuaacaaugagaaagggagucauggagugaaaggcugggccuuugaugauggaaaugacguguggaugggaagaacgaucagcgaggaguuacgcucagguuaugaaaccuucaaagucauuggaggcugguccaaaccuaacuccaaauugcagauaaauaggcaagucauaguugacagagguaauagguccgguuauucugguauuuucucuguugaaggcaaaagcugcaucaaucggugcuuuuauguggaguugauaaggggaaggaaacaggaaacugaagucugguggaccucaaacaguauuguuguguuuuguggcaccucagguacauauggaacaggcucauggccugauggggcggacaucaaucucaugccuauauaa

SEQ ID NO: 54103 - RNA, 1410 nt, Artificial Sequence
  derived and/or modified CDS sequence (wt) from neuraminidase__InfluenzaA__AFH00266
augaauccaaaucaaaagauaauaacaauuggcucuguuucucucacuauugccacaauaugcuuccuuaugcaaauugccauccugguaacuacuguaacauugcauuucaagcaauaugaaugcaacucccccccaaacaaccaaguaaugcugugugaaccaacaauaauagaaagaaacauaacagagauaguguauuugacuaacaccaccauagagaaagaaauaugccccaaacuggcagaauacagaaauuggucaaagccgcaauguaaaauuacaggauuugcaccuuuuucuaaggacaauucaauucggcuuuccgcugguggagacauuugggugacaagagaaccuuaugugucaugcgauccuggcaaguguuaucaauuugcacuuggacagggaacaacacuaaacaacaggcauucaaaugacacaguacaugauaggaccccuuaucgaacccuauugaugaaugaguuggguguuccauuucauuugggaaccaagcaagugugcauagcaugguccagcucaaguugucacgauggaaaagcauggcugcauguuuguguaacugggcaugaugaaaaugcaacugcuagcuucauuuacgaugggaggcuuguagauaguauugguucaugguccaaaaauauccucaggacccaggagucggaaugcguuuguaucaauggaacuuguacaguaguaaugacugauggaagugcuucagaaagagcugauacuaaaauacuauucauugaagaggggaaaaucguucacauuagcccauugucaggaagugcucagcaugucgaggagugcucauguuauccucgauauccuggugucagaugugucugcagagacaacuggaaaggcuccaauaggcccaucguagauauaaaugugaaagauuauagcauuguuuccaguuaugugugcucaggacuuguuggagacacacccagaaaaaacgacagcuccagcaguagcuauugccggaauccuaacaaugagaaagggagucauggagugaaaggcugggccuuugaugauggaaaugacguguggaugggaagaacgaucagcgaggaguuacgcucagguuaugaaaccuucaaaguuauuggaggcugguccaaaccuaacuccaaauugcagauaaauaggcaagucauaguugacagagguaauagguccgguuauucugguauuuucucuguugaaggcaaaagcugcaucaaucggugcuuuuauguggaguugauaaggggaaggaaacaggaaacugaagucugguggaccucaaacaguauuguuguguuuuguggcaccucagguacauauggaacaggcucauggccugauggggcggacaucaaucucaugccuauauaa

SEQ ID NO: 54104 - RNA, 1410 nt, Artificial Sequence
  derived and/or modified CDS sequence (wt) from neuraminidase__InfluenzaA__AFH00277
augaauccaaaucaaaagauaauaacaauuggcucuguuucucucacuauugccacaauaugcuuucuuaugcaaauugccauccugguaacuacuguaacauugcauuucaagcaauaugagugcaacucccccccaagcaaccaaguaaugcugugugaaccaacaauaauagaaagaaacauaacagagauaguguauuugacuaacaccaccauagagaaagaaauaugccccaaacuggcagaauacagaaauuggucaaagccgcaauguaaaauuacaggauuugcaccuuuuucuaaggacaauucaauucggcuuuccgcugguggagacauuugggugacaagagaaccuuaugugucaugcgauccuggcaaguguuaucaauuugcacuuggacagggaacaacacuaaacaacaggcauucaaaugacacaguacaugauaggaccccuuaucgaacccuauugaugaaugaguuggguguuccauuucauuugggaaccaagcaagugugcauagcaugguccagcucaaguugucacgauggaaaagcauggcugcauguuuguguaacugggcaugaugaaaaugcaacugcuagcuucauuuacgaugggaggcuuguagauaguauugguucaugguccaaaaauauccucaggacccaggagucggaaugcguuuguaucaauggaacuuguacaguaguaaugacugauggaagugcuucagaaagagcugauacuaaaauacuauucauugaagaggggaaaaucguucauauuagcccauugucaggaagugcucagcaugucgaggagugcuccuguuauccucgauauccuggugucagaugugucugcagagacaacuggaaaggcuccaauaggcccaucguagauauaaaugugaaagauuauagcauuguuuccaguuaugugugcucaggacuuguuggagacacacccagaaaaaacgacagcuccagcaguagcuauugccggaaaccuaacaaugagaaagggagucauggauugaaagguugggccuuugaugauggaaaugacguguggaugggaagaacgaucagcgaggaguuacgcucugguuaugaaaccuucaaaguuauuggaggcugguccaaaccuaacuccaaauugcagauaaauaggcaagucauaguugacagagguaauagguccgguuauucugguauuuucucuguugaaggcaaaagcugcaucaaucggugcuuuuauguggaguugauaaggggaaggaaacaggaaacugaagucugguggaccucaaacaguauuguuguguuuuguggcaccucagguacauauggaacaggcucauggccugauggggcggacaucaaucucaugccuauauaa

SEQ ID NO: 54105 - RNA, 1410 nt, Artificial Sequence; identical to SEQ ID NO: 48604
  derived and/or modified CDS sequence (wt) from neuraminidase__InfluenzaA__AFH00288

SEQ ID NO: 54106 - RNA, 1410 nt, Artificial Sequence
  derived and/or modified CDS sequence (wt) from neuraminidase__InfluenzaA__AFH00299
augaauccaaaucaaaagauaauaacaauuggcucuguuucucucaccauugccacaauaugcuuccuuaugcaaauugccauccugguaacuacuguaacauugcauuucaagcaauaugagugcagcucccccccaaacaaccaaguaaugccgugugaaccaacaauaauagaaagaaacauaacagagauaguguauuugacuaacacuaccauagagaaagagauaugccccaaacuaguagaauacagaaauuggucaaagccgcaauguaaaauuacaggauuugcaccuuuuucuaaggacaauucaauucggcuuuccgcugguggagacauuugggugacaagagaaccuuaugugucaugcgauccuggcaaguguuaucaauuugcacuuggacagggaaccacacuaaacaacaggcauucaaaugacacaguacaugauaggaccccuuaucgaacccucuugaugaaugaguuggguguuccauuucauuugggaaccaagcaagugugcauagcaugguccagcucaaguugucacgauggaaaagcauggcugcauguuugugucacugggcaugaugaaaaugcaacugcuagcuucauuuacgaugggaggcuuguagauaguauugguucaugguccaaaaauauccucaggacccaggagucggaaugcguuuguaucaaugggacuuguacaguaguaaugacugauggaagugcuucagaaagagcugauacuaaaauacuauucauugaagaggggaaaaucguucauauuagcccauugucaggaagugcucagcauguagaggagugcuccuguuauccucgauauccuggugucagaugugucugcagagacaacuggaaaggcuccaauaggcccaucguagauauaaaugugaaagauuauagcauuguuuccaguuaugugugcucagggcuuguuggagacacacccagaaaaaacgacagcuccagcaguagcuauugccggaauccuaacaaugagaaagggagucauggagugaaaggcugggccuuugacgauggaaaugacguguggaugggaagaacgaucggcgaggaguuacgcucagguuaugaaaccuucaaagucauuggagguugguccacaccuaacuccaaauugcagauaaauaggcaagucauaguugacagcgguaauagguccgguuauucugguauuuucucuguugagggcaaaagcugcaucaaucggugcuuuuauguggaguugauaaggggaaggaaacaggaaacuaaagucugguggaccucaaacaguauuguuguguuuuguggcaccucagguacauauggaacaggcucauggccugauggggcggacaucaaucucaugccuauauaa

SEQ ID NO: 54107 - RNA, 1410 nt, Artificial Sequence
  derived and/or modified CDS sequence (wt) from neuraminidase__InfluenzaA__AFH00310
augaauccaaaucaaaagauaauaacaauuggcucuguuucucucacuauugccacaauaugcuuccuuaugcaaauugccauucugguaacuacuguaacauugcauuucaagcaauaugagugcagcuccuccccaaacaaccaaguaauuccaugucaaccaacaauaauagaaagaaacauaacagagauaguguauuugacuaacaccaccauagagaaagagauaugccccaaacuaguagaauacagaaauuggucaaagccgcaauguaaaauuacaggauuugcaccuuuuucuaaggacaauucaauucggcuuuccgcugguggagacauuugggugacaagagaaccuuaugugucaugcgauccuggcaaauguuaucaauuugcacuuggacagggaaccacacuaaacaacaggcauucaaaugacacaguacaugauaggaccccuuaucgaacccucuugaugaaugaguuggguguuccauuucauuugggaaccaagcaagugugcauagcaugguccagcucaaguugucacgauggaaaagcauggcugcauguuugugucacugggcaugaugaaaaugcaacugcuagcuucauuuacgaugggaggcuuguagauaguauugguucaugguccaaaaauauccucaggacccaggagucggaaugcguuuguaucaaugggacuuguacagugguaaugacugauggaagugcuucagaaaaagcugauacuaaaauacuauucauugaagaggggaaagucguucauauuagcccauugucaggaagugcucagcauguagaggagugcuccuguuauccucgauauccuggugucagaugugucugcagagacaacuggaaaggcuccaauaggcccaucguagacauaaaugugaaaaauuauagcauuguuuccaguuaugugugcucagggcuuguuggagacacacccagaaaaaacgacagcuccagcaguagcuauugccggaauccuaacaacgagaaagggagucauggggugaaaggcugggccuuugacgauggaaaugacguguggaugggaagaacgaucagcgaggaguuacgcucagguuaugaaaccuucaaagucauuggagguugguccacaccuaauuccaaauugcagauaaauaggcaagucauaguugacagcgguaauagguccgguuauucugguauuuucucuguugaaggcaaaagcugcaucaaucggugcuuuuauguggaguugauaaggggaaggaaacaggaaacuaaagucugguggaccucaaacagucuuguuguguuuuguggcaccucagguacauauggaacaggcucauggccugauggggcggacaucaaucucaugccuauauaa

SEQ ID NO: 54108 - RNA, 1410 nt, Artificial Sequence; identical to SEQ ID NO: 54107
  derived and/or modified CDS sequence (wt) from neuraminidase__InfluenzaA__AFH00321

SEQ ID NO: 54109 - RNA, 1410 nt, Artificial Sequence
  derived and/or modified CDS sequence (wt) from neuraminidase__InfluenzaA__AFH00332
augaauccaaaucaaaagauaauaacaauuggcucuguuucucucacuauugccacaauaugcuuccuuaugcaaauugccauccugguaacuacuguaacauugcauuucaagcaauaugaaugcaacucccccccaaacaaccaaguaaugcugugugaaccaacaauaauagaaagaaacauaacagagauaguguaucugaccaacaccaccauagagaaagaaauaugccccaaacuagcagaauacagaaauuggucaaagccgcaauguaaaauuacaggauuugcaccuuuuucuaaggacaauucaauucggcuuuccgcugguggagacauuugggugacaagagaaccuuaugugucaugcgauccuggcaaguguuaucaauuugcccuuggacagggaacaacacuaaacaacaggcauucaaaugacacaguacaugauaggaccccuuaucgaacccuauugaugaaugaguuggguguuccauuucauuugggaaccaagcaagugugcauagcaugguccagcucaaguugucacgauggaaaagcauggcugcauguuuguguaacugggcaugaugaaaaugcaacugcuagcuucauuuacgaugggaggcuuguagauaguauugguucaugguccaaaaauauccucaggacccaggagucggaaugcguuuguaucaauggaacuuguacaguaguaaugacugauggaagugcuucagaaagagcugauacuaaaauacuauucauugaagaggggaaaaucguucauauuagcccauugucaggaagugcucagcaugucgaggagugcuccuguuauccucgauauccuggugucagaugugucugcagagacaacuggaaaggcuccaauaggcccaucguagauauaaaugugaaagauuauagcauuguuuccaguuaugugugcucaggacuuguuggagacacacccagaaaaaacgacagcuccagcagcagccauugccugaauccuaacaaugaggaagggggucauggagugaaaggcugggccuuugaugauggaaaugacguguggaugggaagaacgaucagcgagaaguuacgcucagguuaugaaaccuucaaagucauuggaggcugguccaaaccuaacuccaaauugcagauaaauaggcaagucauaguugacagagguaauagguccgguuauucugguauuuucucuguugaaggcaaaggcugcaucaaucggugcuuuuauguggaguugauaaggggaaggaaacaggaaacugaagucugguggaccucaaacaguauuguuguguuuuguggcaccucagguacauauggaacaggcucauggccugauggggcggacaucaaucucaugccuauauaa

SEQ ID NO: 54110 - RNA, 1410 nt, Artificial Sequence
  derived and/or modified CDS sequence (wt) from neuraminidase__InfluenzaA__AFH00343
augaauccaaaucaaaagauaauaacaauuggcucuguuucucucacuauugccacaauaugcuuccuuaugcaaauugccauccugguaacuacuguaacauugcauuucaagcaauaugagugcaacucccccccaagcaaccaagcaaugcugugugaaccaacaauaauagaaagaaacauaacagagauaguguauuugacuaacaccaccauagagaaagaaauaugccccaaacuggcagaauacagaaauuggucaaagccgcaauguaaaauuacaggauuugcaccuuuuucuaaggacaauucaauucggcuuuccgcugguggagacauuugggugacaagagaaccuuaugugucaugcgauccuggcaaguguuaucaauuugcacuuggacagggaacaacacuaaacaacaggcauucaaaugacacaguacaugauaggaccccuuaucgaacccuauugaugaaugaguuggguguuccauuucauuugggaaccaagcaagugugcauagcaugguccagcucaaguugucacgauggaaaagcauggcugcauguuuguguaacugggcaugaugaaaaugcaacugcuagcuucauuuacgaugggaggcuuguagauaguauugguucaugguccaaaaauauccucaggacccaggagucggaaugcguuuguaucaauggaacuuguacaguaguaaugacugauggaagugcuucagaaagagcugauacuaaaauacuauucauugaagaggggaaaaucguucauauuagcccauugucaggaagugcucagcaugucgaggagugcuccuguuauccucgauauccuggugucagaugugucugcagagacaacuggaaaggcuccaauaggcccaucguagauauaaaugugaaagauuauagcauuguuuccaguuaugugugcucaggacuuguuggagacacacccagaaaaaacgacagcuccagcaguagcuauugccggaauccuaacaaugagaaagggagucauggagugaaagguugggccuuugaugauggaaaugacguguggaugggaagaacgaucagcgaggaguuacgcucugguuaugaaaccuucaaaguuauuggaggcugguccaaaccuaacuccaaauugcagauaaauaggcaagucauaguugacagagguaauagguccgguuauucugguauuuucucuguugaaggcaaaagcugcaucaaucggugcuuuuauguggaguugauaaggggaaggaaacaggaaacugaagucugguggaccucaaacaguauuguuguguuuuguggcaccucagguacauauggaacaggcucauggccugauggggcggacaucaaucucaugccuauauaa

SEQ ID NO: 54111 - RNA, 1410 nt, Artificial Sequence
  derived and/or modified CDS sequence (wt) from neuraminidase__InfluenzaA__AFH00354
augaauccaaaucaaaagauaauaacaauuggcucuguuucucucacuauugccacaauaugcuuccuuaugcagauugccauccugguaacuacuguaacauugcauuucaagcaauaugaaugcaacucccccccaaacaaccaaguaaugcugugugaaccaacaauaauagaaagaaacauaacaaagauaguguaucugaccaacaccaccauagagaaagaaauaugccccaaacuagcagaauacagaaauuggucaaagccgcaauguaaaauuacaggauuugcaccuuuuucuaaggacaauucaauucggcuuuccgcugguggagacauuugggugacaagagaaccuuaugugucaugcgauccuggcaaguguuaucaauuugcccuuggacagggaacaacacuaaacaacaggcauucaaaugacacaguacaugauaggaccccuuaucgaacccuauugaugaaugaguuggguguuccauuucauuugggaaccaagcaagugugcauagcaugguccagcucaaguugucacgauggaaaagcauggcugcauguuuguguaacugggcaugaugaaaaugcaacugcuagcuucauuuacgaugggaggcuuguagauaguauugguucaugguccaaaaauauccucaggacccaggagucggaaugcguuuguaucaauggaacuuguacaguaguaaugacugauggaagugcuucagaaagagcugauacuaaaauacuauucauugaagaggggaaaaucguucauauuagcccauugucaggaagugcucagcaugucgaggagugcuccuguuauccucgauauccuggugucagaugugucugcagagacaacuggaaaggcuccaauaggcccaucguagauauaaaugugaaagauuauagcauuguuuccaguuaugugugcucaggacuuguuggagacacacccagaaaaaacgacagcuccagcaguagcuauugccugaauccuaacaaugaggaagggggucauggagugaaaggcugggccuuugaugauggaaaugacguguggaugggaagaacgaucagcgagaaguuacgcucagguuaugaaaccuucaaggucauuggaggcugguccaaaccuaacuccaaauugcagauaaauaggcaagucauaguugacagagguaauagguccgguuauucugguauuuucucuguugaaggaaaaagcugcgucaaucggugcuuuuauguggaguugauaaggggaaggaaacaggaaacugaagucugguggaccucaaacaguauuguuguguuuuguggcaccucagguacauauggaacaggcucauggccugauggggcggacaucaaucucaugccuauauaa

SEQ ID NO: 54112 - RNA, 1410 nt, Artificial Sequence
  derived and/or modified CDS sequence (wt) from neuraminidase__InfluenzaA__AFH00365
augaauccaaaucaaaagauaauaacaauuggcucuguuucucucacuauugccacaauaugcuuccuuaugcaaauugccauccugguaacuacuguaacauuacauuucaagcaauaugaaugcaacucccccccaaacaaccaaguaaugcugugugaaccaacaauaauagaaagaaacauaacagagauaguguaucugaccaacaccaccauagagaaagaaauaugccccaaacuagcagaauacagaaauuggucaaagccgcaauguaaaauuacaggauuugcaccuuuuucuaaggacaauucaauucggcuuuccgcugguggagacauuugggugacaagagaaccuuaugugucaugcgauccuggcaaguguuaucaauuugcccuuggacagggaacaacacuaaacaacaggcauucaaaugacacaguacaugauaggaccccuuaucgaacccuauugaugaaugaguuggguguuccauuucauuugggaaccaagcaagugugcauagcaugguccagcucaaguugucacgauggaaaagcauggcugcauguuuguguaacugggcaugaugaaaaugcaacugcuagcuucauuuacgaugggaggcuuguagauaguauugguucaugguccaaaaauauccucaggacccaggagucggaaugcguuuguaucaauggaacuuguacaguaguaaugacugauggaagugcuucaggaagagcugauacuaaaauacuauucauugaagaggggaaaaucguucauauuagcccauugucaggaagugcucagcacgucgaggagugcuccuguuauccucgauauccuggugucagaugugucugcagagacaacuggaaaggcuccaauaggcccaucguagauauaaaugugaaagauuauagcauuguuuccaguuaugugugcucaggacuuguuggagacacacccagaaaaaacgacagcuccagcaguagcuauugccugaauccuaacaaugaggaagggggucauggagugaaaggcugggccuuugaugauggaaaugauguguggaugggaagaacgaucagcgagaaguuacgcucagguuaugaaaccuucaaagucauuggaggcugguccaaaccuaacuccaaauugcagauaaauaggcaagucauaguugacagagguaauagguccgguuauucugguauuuucucuguugaaggcaaaagcugcaucaaucggugcuuuuauguggaguugauaaggggaaggaaacaggaaacugaagucugguggaccucaaacaguauuguuguguuuuguggcaccucagguacauauggaacaggcucauggccugauggggcggacaucaaucucaugccuauauaa

SEQ ID NO: 54113 - RNA, 1410 nt, Artificial Sequence
  derived and/or modified CDS sequence (wt) from neuraminidase__InfluenzaA__AFH00376
augaauccaaaucaaaagauaauaacaauuggcucuguuucucucacuauugccacaauaugcuuccuuaugcaaauugccauccugguaacuacuguaacauuacauuucaagcaaugugaaugcaacucccccccaaacaaccaaguaaugcugugugaaccaacaauaauagagagaaacauaacagagauaguguaucugaccaacaccaccauagagaaagaaauaugccccaaacuagcagaauacagaaauuggucaaagccgcaauguaaaauuacaggauuugcaccuuuuucuaaggacaauucaauucggcuuuccgcugguggagacauuugggugacaagagaaccuuaugugucaugcgauccuggcaaguguuaucaauuugcccuuggacagggaacaacacuaaacaacaggcauucaaaugacacaguacaugauaggaccccuuaucgaacccuauugaugaaugaguuggguguuccauuucauuugggaaccaagcaagugugcauagcaugguccagcucaaguugucacgauggaaaagcauggcugcauguuuguguaacugggcaugaugaaaaugcaacugcuagcuucauuuacgaugggaggcuuguagauaguauugguucaugguccaaaaauauccucaggacccaggagucggaaugcguuuguaucaauggaacuuguacaguaguaaugacugauggaagugcuucaggaagagcugauacuaaaauauuauucauugaagaggggaaaaucguucauauuagcccauugucaggaagugcucagcaugucgaggagugcuccuguuauccucgauauccuggugucagaugugucugcagagacaacuggaaaggcuccaauaggcccaucguagauauaaaugugaaagauuauagcauuguuuccaguuaugugugcucaggacuuguuggagacacacccagaaaaaacgacagcuccagcaguagcuauugccugaauccuaacaaugaggaaggaggucauggagugaaaggcugggccuuugaugauggaaaugauguguggaugggaagaacgaucagcgagaaguuacgcucagguuaugaaaccuucaaagucauuggaggcugguccaaaccuaacuccaaauugcagauaaauaggcaagucauaguugacagagguaauagguccgguuauucugguauuuucucuguugaaggcaaaagcugcaucaaucggugcuuuuauguggaguugauaaggggaaggaaacaggaaacugaagucugguggaccucaaacaguauuguuguguuuuguggcaccucagguacauauggaacaggcucauggccugauggggcggacaucaaucucaugccuauauaa

SEQ ID NO: 54114 - RNA, 1410 nt, Artificial Sequence
  derived and/or modified CDS sequence (wt) from neuraminidase__InfluenzaA__AFH00387
augaauccaaaucaaaagauaauaacaauuggcucuguuucucucacuauugccacaauaugcuuccuuaugcaaauugccauccugguaacuacuguaacauugcauuucaagcaauaugaaugcaacucccccccaaacaaccaaguaaugcugugugaaccaacaauaauagaaagaaacauaacagagauaguguaucugaccaacaccaccauagagaaagaaauaugccccaaacuagcagaauacagaaauuggucaaagccgcaauguaaaauuacaggauuugcaccuuuuucuaaggacaauucaauucggcuuuccgcugguggagacauuugggugacaagagaaccuuaugugucaugcgauccugacaaguguuaucaauuugcccuuggacagggaacaacacuaaacaacaggcauucaaaugacacaguacaugauaggaccccuuaucgaacccuauugaugaaugaguuggguguuccauuucauuugggaaccaagcaagugugcauagcaugguccagcucaaguugucacgauggaaaagcauggcugcauguuuguguaacugggcaugaugaaaaugcaacugcuagcuucauuuacgaugggaggcuuguagauaguauuaguucaugguccaaaaauauccucaggacccaggagucggaaugcguuuguaucaauggaacuuguacaguaguaaugacugauggaagugcuucagaaagagcugauacuaaaauacuauucauugaagaggggaaaaucguucauauuagcccauugucaggaagugcucagcaugucgaggagugcuccuguuauccucgauauccuggugucagaugugucugcagagacaacuggaaaggcuccaauaggcccaucguagauauaaaugugaaagauuauagcauuguuuccaguuaugugugcucaggacuuguuggagacacacccagaaaaaacgacagcuccagcaguagcuauugccugaauccuaacaaugaggaagggggucauggagugaaaggcugggccuuugaugauggaaaugacguguggaugggaagaacgaucagcgaaaaguuacgcucagguuaugaaaccuucaaggucauuggaggcugguccaaaccuaacuccaaauugcagauaaauaggcaagucauaguugacagagguaauagguccgguuauucugguauuuucucuguugaaggcaaaagcugcgucaaucggugcuuuuauguggaguugauaaggggaaggaaacaggaaacugaagucugguggaccucaaacaguauuguuguguuuuguggcaccucagguacauauggaacaggcucauggccugauggggcggacaucaaucucaugccuauauaa

SEQ ID NO: 54115 - RNA, 1410 nt, Artificial Sequence
  derived and/or modified CDS sequence (wt) from neuraminidase__InfluenzaA__AFH00398
augaauccaaaucaaaagauaauaacaauuggcucuguuucucucacuauugccacaauaugcuuccuuaugcaaauugccauccugguaacuacuguaacauugcauuucaagcaauaugaaugcaacucccccccaaacaaccaaguaaugcugugugaaccaacaauaauagaaagaaacauaacagagauaguguaucugaccaacaccaccauagagaaagaaauaugccccaaacuagcagaauacagaaauuggucaaagccgcaauguaaaauuacaggauuugcaccuuuuucuaaggacaauucaauucggcuuuccgcugguggagacauuugggugacaagagaaccuuaugugucaugcgauccuggcaaguguuaucaauuugcccuuggacagggaacaacacuaaacaacaggcauucaaaugacacaguacaugauaggaccccuuaucgaacccuauugaugaaugaguuggguguuccauuucauuugggaaccaagcaagugugcauagcaugguccagcucaaguugucacgauggaaaagcauggcugcauguuuguguaacugggcaugaugaaaaugcaacugcuagcuucauuuacgaugggaggcuuguagauaguauugguucaugguccaaaaauauccucaggacccaggagucggaaugcguuuguaucaauggaacuuguacaguaguaaugacugauggaagugcuucagaaagagcugauacuaaaauacuauucauugaagaggggaaaaucguucauauuagcccauugucaggaagugcucagcaugucgaggagugcuccuguuauccucgauauccuggugucagaugugucugcagagacaacuggaaaggcuccaauaggcccaucguagauauaaaugugaaagauuauagcauuguuuccaguuaugugugcucaggacuuguuggagacacacccagaaaaaacgauagcuccagcaguagcuauugccugaauccuaacaaugaggaagggggucauggagugaaaggcugggccuuugaugauggaaaugacguguggaugggaagaacgaucagcgagaaguuacgcucagguuaugaaaccuucaaggucauuggaggcugguccaaaccuaacuccaaauugcagauaaauaggcaagucauaguugacagagguaauagguccgguuauucugguauuuucucaguugaaggcaaaagcugcgucaaucggugcuuuuauguggaguugauaaggggaagaaaacaggaaacugaagucugguggaccucaaacaguauuguuguguuuuguggcaccucagguacauauggagcaggcucauggccugauggggcggacaucaaucucaugccuauauaa

SEQ ID NO: 54116 - RNA, 1410 nt, Artificial Sequence
  derived and/or modified CDS sequence (wt) from neuraminidase__InfluenzaA__AFH00409
augaauccaaaucaaaagauaauaacaauuggcucuguuucucucacuauugccacaauaugcuuccuuaugcaaauugccauccugguaacuacuguaacauugcauuucaagcaauaugaaugcaacucccccccaaacaaccaaguaaugcugugugaaccaacaauaauagaaagaaacauaacagagauaguguaucugaccaacaccaccauagagaaagaaauaugccccaaacuagcagaauacagaaauuggucaaagccgcaauguaaaauuacaggauuugcaccuuuuucuaaggacaauucaauucggcuuuccgcugguggagacauuugggugacaagagaaccuuaugugucaugcgauccuggcaaguguuaucaauuugcccuuggacagggaacaacacuaaacaacaggcauucaaaugacacaguacaugauaggaccccuuaucgaacccuauugaugaaugaauuggguguuccauuucauuugggaaccaagcaagugugcauagcaugguccagcucaaguugucacgauggaaaagcauggcugcauguuuguguaacugggcauaaugaaaaugcaacugcuagcuucauuuacgaugggaggcuuguggauaguauugguucaugguccaaaaauauccucaggacccaggagucggaaugcguuuguaucaauggaacuuguacaguaguaaugacugauggaagugcuucaggaagagcugauacuaaaauacuauucauugaagaggggaagaucguucauauuagcccauugucaggaagugcucagcaugucgaggagugcuccuguuauccucgauauccuggugucagaugugucugcagagacaacuggaaaggcuccaauaggcccaucguagauauaaaugugaaagauuauagcauuguuuccaguuaugugugcucaggacucguuggagacacacccagaaaaaacgacagcuccagcaguagcuauugccugaauccuaacaaugaggaagggggucauggagugaaaggcugggccuuugaugauggaaaugauguguggaugggaagaacgaucagcgagaaguuacgcucagguuaugaaaccuucaaagucauuggaggcugguccaaaccuaacuccaaauugcagauaaauaggcaagucauaguugacagagguaauagguccgguuauucugguauuuucucuguugaaggcaaaagcugcaucaaucggugcuuuuauguggaguugauaaggggaaggaaacaggaaacugaagucugguggaccucaaacaguauuguuguguuuuguggcaccucagguacauauggaacaggcucauggccugauggggcggacaucaaucucaugccuauauaa

SEQ ID NO: 54117 - RNA, 1410 nt, Artificial Sequence
  derived and/or modified CDS sequence (wt) from neuraminidase__InfluenzaA__AFH00420
augaauccaaaucaaaagauaauaacaauuggcucuguuucucucacuauugccacaauaugcuuccuuaugcaaauugccauccugguaacuacuguaacauuacauuucaagcaauaugaaugcaacucccccccaaacaaccaaguaaugcugugugaaccaacaauaauagaaagaaacauaacagagauaguguaucugaccaacaccaccauagagaaagaaauaugccccaaacuagcagaauacagaaauuggucaaagccgcaauguaaaauuacaggauuugcacccuuuucuaaggacaauucaauucggcuuuccgcugguggagacauuugggugacaagagaaccuuaugugucaugcgauccuggcaaguguuaucaauuugcccuuggacagggaacaacacuaaacaacaggcauucaaaugacacaguacaugauaggaccccuuaucgaacccuauugaugaaugaguuggguguuccauuucauuugggaaccaagcaagugugcauagcaugguccagcucaaguugucacgauggaaaagcauggcugcauguuuguguaacugggcaugaugaaaaugcaacugcuagcuucauuuacgaugggaggcuuguagauaguauugguucaugguccaaaaauauccucaggacccaggagucggaaugcguuuguaucaauggaacuuguacaguaguaaugacugauggaagugcuucaggaagagcugauacuaaaauacuauucauugaagaggggaaaaucguucauauuagcccauugucaggaagugcucagcaugucgaggagugcuccuguuauccucgauauccuggugucagaugugucugcagagacaacuggaaaggcuccaauaggcccaucguagauauaaaugugaaagauuauagcauuguuuccaguuaugugugcucaggacuuguuggagacacacccagaaaaaacgacagcuccagcaguagcuauugccugaauccuaauaaugaggaagggggucauggagugaaaggcugggccuuugaugauggaaaugauguguggaugggaagaacgaucagcgagaaguuacgcucagguuaugaaaccuucaaagucauuggaggcugguccaaaccuaacuccaaauugcagauaaauaggcaagucauaguugacagagguaauagguccgguuauucugguauuuucucuguugaaggcaaaagcugcaucaaucggugcuuuuauguggaguugauaaggggaaggaaacaggaaacugaagucugguggaccucaaacaguauuguuguguuuuguggcaccucagguacauauggaacaggcucauggccugacggggcggacaucaaucucaugccuauauaa

SEQ ID NO: 54118 - RNA, 1410 nt, Artificial Sequence; identical to SEQ ID NO: 47125
  derived and/or modified CDS sequence (wt) from neuraminidase__InfluenzaA__AFH00431

SEQ ID NO: 54119 - RNA, 1410 nt, Artificial Sequence
  derived and/or modified CDS sequence (wt) from neuraminidase__InfluenzaA__AFH00442
augaauccaaaucaaaagauaauaacaauuggcucuguuucucucacuauugccacaauaugcuuccuuaugcaaauugccauccugguaauuacuguaacauugcauuucaagcaauaugaaugcaacucccccccaaacaaccaaguaaugcugugugaaccaacaauaauagaaagaaacauaacagagauaguguaucugaccaacaccaccauagagaaagaaauaugccccaaacuagcagaauacagaaauuggucaaagccgcaauguaaaauuacaggauuugcaccuuuuucuaaggacaauucaauucggcuuuccgcugguggagacauuugggugacaagagaaccuuaugugucaugcgauccuggcaaguguuaucaauuugcccuuggacagggaacaacacuaaacaacaggcauucaaaugacacaguacaugauaggaccccuuaucgaacccuauugaugaaugaguuggguguuccauuucauuugggaaccaagcaagugugcauagcaugguccagcucaaguugucacgauggaaaagcauggcugcauguuuguguaacugggcauaaugaaaaugcaacugcuagcuucauuuacgaugggaggcuuguagauaguauugguucaugguccaaaaauauccucaggacccaggagucggaaugcguuuguaucaauggaacuuguacaguaguaaugacugauggaagugcuucaggaagagcugauacuaaaauacuauucauugaagaggggaaaaucguucauauuagcccauugucaggaagugcucagcaugucgaggagugcuccuguuauccucgauauccuggugucagaugugucugcagagacaacuggaaaggcuccaauaggcccaucguagauauaaaugugaaagauuauagcauuguuuccaguuaugugugcucaggacuuguuggagacacacccagaaaaaacgacagcuccagcaguagccauugccugaauccuaacaaugaggaagggggucauggagugaaaggcugggccuuugaugauggaaaugauguguggaugggaagaacgaucagcgagaaguuacgcucagguuaugaaaccuucaaagucauuggaggcugguccaaaccuaacuccaaauugcagauaaauaggcaagucauaguugacagagguaauagguccgguuauucugguauuuucucuguugaaggcaaaagcugcaucaaucggugcuuuuauguggaguugauaaggggaaggaaacaggaaacugaagucugguggaccucaaacaguauuguuguguuuuguggcaccucagguacauauggaacaggcucauggccugauggagcggacaucaaucucaugccuauauaa

SEQ ID NO: 54120 - RNA, 1410 nt, Artificial Sequence
  derived and/or modified CDS sequence (wt) from neuraminidase__InfluenzaA__AFH00453
augaauccaaaucaaaagauaauaacgauuggcucuguuucucucacuauugccacaauaugcuuccuuaugcaaauugccauccugguaacuacuguaacauuacauuucaagcaauaugaaugcaacucccccccaaacaaccaaguaaugcugugugaaccaacaauaauagaaagaaacauaacagagguaguguaucugaccaacaccaccauagagaaggaaauaugccccaaacuagcagaauacagaaauuggucaaagccgcaauguaaaauuacaggauuugcaccuuuuucuaaggacaauucaauucggcuuuccgcugguggggacauuugggugacaagagaaccuuaugugucaugcgauccugacaaguguuaucaauuugcccuuggacagggaacaacacuaaacaacaggcauucaaaugacauaguacaugauaggaccccuuaucgaacccuauugaugaaugaguuggguguuccauuucauuugggaaccaagcaaguaugcauagcaugguccagcucaaguugucacgauggaaaagcauggcugcauguuuguguaacugggcaugaugaaaaugcaacugcuagcuucauuuacgaugggaggcuuguagauaguauugguucaugguccaaaaaaauccucaggacccaggagucggaaugcguuuguaucaauggaacuuguacaguaguaaugacugauggaagugcuucaggaagagcugauacuaaaauacuauucauugaggaggggaaaaucguucauauuagcccauugucaggaagugcucagcaugucgaggagugcuccuguuauccucgauauccuggugucagaugugucugcagagacaacuggaaaggcuccaauaggcccaucguagauauaaauguaaaagauuauagcauuguuuccaguuaugugugcucaggacuuguuggagacacacccagaaaaaacgacagcuccagcagcagccauugccugaauccuaacaaugaggaagggggucauggagugaaaggcugggccuuugaugauggaaaugacguguggaugggaagaacgaucagcgagaaguuacgcucagguuaugaaaccuucaaagucauuggaggcugguccaaaccuaacuccaaauugcagauaaauaggcaagucauaguugacagagguaauagguccgguuauucugguauuuucucuguugaaggcaaaagcugcaucaaucggugcuuuuauguggaguugauaaggggaaggaaacaggaaacugaagucugguggaccucaaacaguauuguuguguuuuguggcaccucagguacauauggaacaggcucauggccugauggggcggacaucaaucucaugccuauauaa

SEQ ID NO: 54121 - RNA, 1410 nt, Artificial Sequence
  derived and/or modified CDS sequence (wt) from neuraminidase__InfluenzaA__AFH00464
augaauccaaaucaaaagauaauaacaauuggcucuguuucucucacuauugccacaauaugcuuccuuaugcaaauugccauccugguaacuacuguaacauuacauuucaagcaauaugaaugcaacucccccccaaacaaccaaguaaugcugugugaaccaacaauaauagaaagaaacauaacagagauaguguaucugaccaacaccaccauagagaaagaaauaugccccaagcuagcagaauacagaaauuggucaaagccgcaauguaaaauuacaggauuugcaccuuuuucuaaggacaauucaauucggcuuuccgcugguggagacauuugggugacaagagaaccuuaugugucaugcgauccuggcaaguguuaucaauuugcccuuggacagggaacaacacuaaaaaacaggcauucaaaugacacaguacaugauaggaccccuuaucgaacccuauugaugaaugagcuggguguuccauuucauuugggaaccaagcaagugugcauagcaugguccagcucaaguugucacgauggaaaagcauggcugcauguuuguguaacugggcaugaugaaaaugcaacugcuagcuucauuuacggugggaggcuuguagauaguauugguucaugguccaaaaaaauccucaggacccaggagucggaaugcguuuguaucaauggaacuuguacaguaguaaugacugauggaagugcuucaggaagagcugauacuaaaauacuauucauugaagaggggaaaaucguucauauuagcccauugucaggaagugcucagcaugucgaggagugcuccuguuauccucgauauccuggugucagaugugucugcagagacaacuggaaaggcuccaauaggcccaucguagauauaaaugugaaagauuauagcauuguuuccaguuaugugugcucaggacuuguuggagacacacccagaaagaacgacagcuccagcaguagcuauugccugaauccuaacaaugaggaagggggucauggagugaaaggcugggccuuugaugauggaaaugauguguggaugggaagaacgaucagcgagaaguuacgcucagguuaugaaaccuucaaagucauuggaggcugguccaaaccuaacuccaaauugcagauaaauaggcaagucauaguugacagagguaauagguccgguuauucugguauuuucucuguugaaggcaaaagcugcaucaaucggugcuuuuauguggaguugauaaggggaaggaaacaggaaacugaagucugguggaccucaaacaguauuguuguguuuuguggcaccucagguacauauggaacaggcucauggccugauggggcggacaucaaucucaugccuauauaa

SEQ ID NO: 54122 - RNA, 1410 nt, Artificial Sequence
  derived and/or modified CDS sequence (wt) from neuraminidase__InfluenzaA__AFH00475
augaauccaaaucaaaagauaauaacgauuggcucuguuucucucacuauugccacaauaugcuuccuuaugcaaauugccauccugguaacuacuguaacauugcauuucaagcaauaugaaugcaacucccccccaaacaaccaaguaaugcugugugaaccaacaauaauagaaagaaacauaacagagauaguguaucugaccaacaccaccauagagaaggaaauaugccccaaacuagcagaauacagaaauuggucaaagccgcaauguaaaauuacaggauuugcaccuuuuucuaaggacaauucaauucggcuuuccgcugguggggacauuugggugacaagagaaccuuaugugucaugcaauccugacaaguguuaucaauuugcccuuggacagggaacaacacuaaacaacaggcauucaaaugacacaguacaugauaggaccccuuaucgaacccuauugaugaaugaguuggguguuccauuucauuugggaaccaagcaagugugcauagcaugguccagcucaaguugucacgauggaaaagcauggcugcauguuuguguaacugggcaugaugaaaaugcaacugcuagcuucauuuacgaugggaggcuuguagauaguauugguucaugguccaaaaaaauccucaggacccaggagucggaaugcguuuguaucaauggaacuuguacaguaguaaugacugaugggagugcuucaggaagagcugauacuaaaauacuauucauugaggaggggaaaaucguucauauuagcccauugucaggaagugcucagcaugucgaggagugcuccuguuauccucgauauccuggugucagaugugucugcagagacaacuggaaaggcuccaauaggcccaucguagauauaaauguaaaggauuauagcauuguuuccaguuaugugugcucaggacuuguuggagacacacccagaaaaaacgacagcuccagcaguagccauugccugaauccuaacaaugaggaagggggucauggagugaaaggcugggccuuugaugauggaaaugacguguggaugggaagaacgaucagcgagaaguuacgcucagguuaugaaaccuucaaagucauugaaggcugguccaaaccuaacuccaaauugcagauaaauaggcaagucauaguugacagagguaauagguccgguuauucugguauuuucucuguugaaggcaaaagcugcaucaaucggugcuuuuauguggaguugauaaggggaaggaaacaggaaacugaagucugguggaccucaaacaguauuguuguguuuuguggcaccucagguacauauggaacaggcucauggccugauggggcggacaucaaucucaugccuauauaa

SEQ ID NO: 54123 - RNA, 1410 nt, Artificial Sequence
  derived and/or modified CDS sequence (wt) from neuraminidase__InfluenzaA__AFH00486
augaauccaaaucaaaagauaauaacgauuggcucuguuucucucacuauugccacaauaugcuuccuuaugcaaauugccauccugguaacuacuguaacauugcauuucaagcaauaugaaugcaacucccccccaaacaaccaaguaaugcugugugaaccaacaauaauagaaagaaacauaacagagauaguguaucugaccaacaccaccauagagaaggaaauaugccccaaacuagcagaauacagaaauuggucaaagccgcaauguaaaauuacaggauuugcaccuuuuucuaaggacaauucaauucggcuuuccgcugguggggacauuugggugacaagagaaccuuaugugucaugcgauccugacaaguguuaucaauuugcccuuggacagggaacaacacuaaacaacaggcauucaaaugacacaguacaugauaggaccccuuaucgaacccuauugaugaaugaguuggguguuccauuucauuugggaaccaagcaagugugcauagcaugguccagcucaaguugucacgauggaaaagcauggcugcauguuuguguaacugggcaugaugaaaaugcaacugcuagcuucauuuacgaugggaggcuuguagauaguauugguucaugguccaaaaaaauccucaggacccaggagucggaaugcguuuguaucaauggaacuuguacaguaguaaugacugaugggagugcuucaggaagagcugauacuaaaauacuauucauugaggaggggaaaaucguucauauuagcccauuguuaggaagugcucagcaugucgaggagugcuccuguuauccucgauauccuggugucagaugugucugcagagacaacuggaaaggcuccaauaggcccaucguagauauaaauguaaaggauuauagcauuguuuccaguuaugugugcucaggacuuguuggagacacacccagaaaaaacgacagcuccagcaguagccauugccugaauccuaacaaugaggaagggggucauggagugaaaggcugggccuuugaugauggaaaugacguguggaugggaagaacgaucagcgagaaguuacgcucagguuaugaaaccuucaaagucauugaaggcugguccaaaccuaacuccaaauugcagauaaauaggcaagucauaguugacagagguaauagguccgguuauucugguauuuucucuguugaaggcaaaagcugcaucaaucggugcuuuuauguggaguugauaaggggaaggaaacaggaaacugaagucugguggaccucaaacaguauuguuguguuuuguggcaccucagguacauauggaacaggcucauggccugauggggcggacaucaaucucaugccuauauaa

SEQ ID NO: 54124 - RNA, 1410 nt, Artificial Sequence
  derived and/or modified CDS sequence (wt) from neuraminidase__InfluenzaA__AFH00497
augaauccaaaucaaaagauaauaacaauuggcucuguuucucucacuauugccacaauaugcuuccuuaugcaaauugccauccugguaacuacuguaacauugcauuucaagcaauaugagugcaacucccccccaaacaaccaaguaaugcugugugaaccaacaauaauagaaagaaacauaacagagauaguguaucugaccaacaccaccauaaagaaagaaauaugccccaaacuagcagaauacagaaauuggucaaagccgcaauguaaaauuacaggauuugcaccuuuuucuaaggacaauucaauucggcuuuccgcugguggagacauuugggugacaagagaaccuuaugugucaugcgauccuggcaaguguuaucaauuugcccuuggacagggaacaacacuaaacaacaggcauucaaaugacacaguacaugauaggaccccuuaucgaacccuauugaugaaugaguuggguguuccauuucauuugggaaccaagcaagugugcauagcaugguccagcucaaguugucacgauggaaaagcauggcugcauguuuguguaacugggcaugaugaaaaugcaacugcuagcuucauuuacgaugggaggcuuguagauaguauugguucaugguccaaaaauauccucaggacccaggagucggaaugcguuuguaucaauggaacuuguacaguaguaaugacugauggaagugcuucagaaagagcugauacuaaaauacuauucauugaagaggggaaaaucguucauauuagcccauugucaggaagugcucagcaugucgaggagugcuccuguuauccucgauauccuggugucagaugugucugcagagacaacuggaaaggcuccaauaggcccaucguagauauaaaugugaaagauuauagcauuguuuccaguuaugugugcucaggacuuguuggagacacacccagaaaaaacgacagcuccagcaguagcuauugcuggaauccuaacaaugagaaagggggucauggagugaaaggcugggccuuugaugauggaaaugacguguggaugggaagaacgaucagcgaggaguuacgcucagguuaugaaaccuucaaagucauuggaggcugguccaaaccuaacuccaaauugcagauaaauaggcaagucauaguugacagagguaauagguccgguuauucugguauuuucucuguugaaggcaaaagcugcaucaaucggugcuuuuauguggaguugauaaggggaaggaaacaggaaacugaagucugguggaccucaaacaguauuguuguguuuuguggcaccucagguacauauggaacaggcucauggccugauggggcggacaucaaucucaugccuauauaa

SEQ ID NO: 54125 - RNA, 1410 nt, Artificial Sequence
  derived and/or modified CDS sequence (wt) from neuraminidase__InfluenzaA__AFH00508
augaauccaaaucaaaagauaauaacaauuggcucuguuucucucacuauugccacaauaugcuuccuuaugcaaauugccauccugguaauuacuguaacauugcauuucaagcaauaugaaugcaacucccccccaaacaaccaaguaaugcugugugaaccaacaauaauagaaagaaacauaacagagauaguguaucugaccaacaccaccauagagaaagaaauaugccccaaacuagcagaauacagaaacuggucaaagccgcaauguaaaauuacaggauuugcaccuuuuucuaaggacaauucaauucggcuuuccgcugguggagacauuugggugacaagagaaccuuaugugucaugcgauccuggcaaguguuaucaauuugcccuuggacagggaacaacacuaaacaacaggcauucaaaugacacaguacaugauaggaccccuuaucgaacccuauugaugaaugaguuggguguuccauuucauuugggaaccaagcaagugugcauagcaugguccagcucaaguugucacgauggaaaagcauggcugcauguuuguguaacugggcauaaugaaaaugcaacugcuagcuucauuuacgaugggaggcucguagauaguauugguucaugguccaaaaauauccucaggacccaggagucggaaugcguuuguaucaauggaacuuguacaguaguaaugacugauggaagugcuucaggaagagcugauacuaaaauacuauucauugaagaggggaaaaucguucauauuagcccauugucaggaagugcucagcaugucgaggagugcuccuguuauccucgauauccuggugucagaugugucugcagagacaacuggaaaggcuccaauaggcccaucguagauauaaaugugaaagauuauagcauuguuuccaguuaugugugcucaggacuuguuggagacacacccagaaaaaacgacagcuccagcaguagccauugccugaauccuaacaaugaggaagggggucauggagugaaaggcugggccuuugaugauggaaaugauguguggaugggaagaacgaucagcgagaaauuacgcucagguuaugaaaccuucagagucauuggaggcugguccaaaccuaacuccaaauugcagauaaauaggcaagucauaguugacagagguaauagguccgguuauucugguauuuucucuguugaaggcaaaagcugcaucaaucggugcuuuuauguggaguugauaaggggaaggaaacaggaaacugaagucugguggaccucaaacaguauuguuguguuuuguggcaccucagguacauauggaacaggcucauggccugauggggcggacaucaaucucaugccuauauaa

SEQ ID NO: 54126 - RNA, 1410 nt, Artificial Sequence
  derived and/or modified CDS sequence (wt) from neuraminidase__InfluenzaA__AFH00519
augaauccaaaucaaaagauaauaacaauuggcucuguuucucucacuauugccacaaugugcuuccuuaugcaaauugccauccugguaacuacuguaacauugcauuucaagcaauaugaaugcaacucccccccaaacaaccaaguaaugcugugugaaccaacaauaauagagagaaacauaacagagauaguguaucugaccaacaccaccauagaaaaagaaauaugccccaaacuagcagaauacagaaauuggucaaagccgcaauguaaaauuacaggauuugcaccuuuuucuaaggacaauucaauucggcuuuccgccgguggagacauuugggugacaagagaaccuuaugugucaugcgauccuggcaaguguuaucaauuugcccuuggacagggaacaacacuaaacaacgggcauucaaaugacacaguacaugauaggaccccuuaucggacccuauugaugaaugaguuggguguuccauuucauuugggaaccaagcaagugugcauagcaugguccagcucaaguugucacgauggaaaagcauggcugcauguuuguguaacuggacaugaugaaaaugcaacugcuagcuucauuuacgaugggaggcuuguagauaguauugguucaugguccaaaaauauccucaggacccaggagucggaaugcguuuguaucaauggaacuuguacaguaguaaugacugauggaagugcuucaggaagagcugauacuaaaauacuauucauugaagaggggaaaaucguucauauuagcccacugucaggaagugcucagcaugucgaggagugcuccuguuauccucgauauccuggugucagaugugucugcagagacaacuggaaaggcuccaauaggcccaucguagauauaaaugugaaagauuauagcauuguuuccaguuaugugugcucaggacuuguuggagacacacccagaaaaaacgacagcuccagcaguagccauugccugaauccuaacaaugaggaagggggucauggagugaaaggcugggccuuugaugauggaaaugauguguggaugggaagaacgaucagcgagaaguuacgcucagguuaugaaaccuucaaagucauuggaggcugguccaaaccuaacuccaaauugcagauaaauaggcaagucauaguugacagagguaauagguccgguuauucugguauuuucucuguugaaggcaaaagcugcaucaaucggugcuuuuauguagaguugauaaggggaaggaaacaggaaacugaagucugguggaccucaaacaguauuguuguguuuuguggcaccucagguacauauggaacaggcucauggccugauggggcggacaucaaucucaugccuauauaa

SEQ ID NO: 54127 - RNA, 1410 nt, Artificial Sequence
  derived and/or modified CDS sequence (wt) from neuraminidase__InfluenzaA__AFH00530
augaauccaaaucaaaagauaauaacgauuggcucuguuucucucacuauugccacaauaugcuuccuuaugcaaauugccauccugguaacuacuguaacauugcauuucaagcaauaugaaugcagcucucccccaaacaaccaaguaaugcugugugaaccaacaauaauagaaagaaacauaacagagauaguguaucugaccaacaccaccauagagaaggaaauaugccccaaacuagcagaauacagaaauuggucaaagccgcaauguaaaauuacaggauuugcaccuuuuucuaaggacaauucaauucggcuuuccgcugguggggacauuugggugacaagggaaccuuaugugucgugcgauccugacaaguguuaucaauuugcccuuggacagggaacaacacuaaacaacaggcauucaaaugacacaguacaugauaggaccccuuaucgaacccuauugaugaaugaguuggguguuccauuucauuugggaaccaagcaagugugcauagcaugguccagcucaaguugucacgauggaaaagcauggcugcauguuuguguaacugggcaugaugaaaaugcaacugcuagcuucauuuacgaugggaggcuuguagauaguauugguucaugguccaaaaaaauccucaggacccaggagucggaaugcguuuguaucaauggaacuuguacaguaguaaugacugaugggagugcuucaggaagagcugauacuaaaauacuauucauugaggaggggaaaaucguucauaucagcccacugucaggaagugcucagcaugucgaggagugcuccuguuauccucgauauccuggugucagaugugucugcagagacaacuggaaaggcuccaauaggcccaucguagauauaaauguaaaggauuauagcauuguuuccaguuaugugugcucaggacuuguuggagacacacccagaaaaaacgacagcuccagcaguagucauugccugaauccuaacaaugaggaagggggucauggagugaaaggcugggccuuugaugauggaaaugacguguggaugggaagaacgaucagcgagaaguuccgcucagguuaugaaaccuucaaagucauugaaggcugguccaaaccuaacuccaaauugcagauaaauaggcaagucauaguugacagagguaauagguccgguuauucugguauuuucucuguugaaggcaaaagcugcaucaaucggugcuuuuauguggaguugauaaggggaaggaaacaggaaacugaagucugguggaccucaaacaguauuguuguguuuuguggcaccucagguacauauggaacaggcucauggccugauggggcggacaucaaucucaugccuauauaa

SEQ ID NO: 54128 - RNA, 1410 nt, Artificial Sequence
  derived and/or modified CDS sequence (wt) from neuraminidase__InfluenzaA__AFH00541
augaauccaaaucaaaagauaauaacgauuggcucuguuucucucacuauugccacaauaugcuuccuuaugcaaauugccauccugguaacuacuguaacacugcauuucaagcaauaugaaugcagcucucccccaaacaaccaaguaaugcugugugaaccaacaauaauagaaagaaacauaacagagauaguguaucugaccaacaccaccauagagaaggaaauaugccccaaacuagcagaauacagaaauuggucaaagccgcaauguaaaauuacaggauuugcaccuuuuucuaaggacaauucaauucggcuuuccgcugguggggacauuugggugacaagggaaccuuaugugucgugcgauccugacaaguguuaucaauuugcccuuggacagggaacaacacuaaacaacaggcauucaaaugacacaguacaugauaggaccccuuaucgaacccuauugaugaaugaguuggguguuccauuucauuugggaaccaagcaagugugcauagcaugguccagcucaaguugucacgauggaaaagcauggcugcauguuuguguaacugggcaugaugaaaaugcaacugcuagcuucauuuacgaugggaggcuuguagauaguauugguucaugguccaaaaaaauccucaggacccaggagucggaaugcguuuguaucaauggaacuuguacaguaguaaugacugaugggagugcuucaggaagagcugauacuaaaauacuauucauugaggaggggaaaaucguucauaucagcccacugucaggaagugcucagcaugucgaggagugcuccuguuauccucgauauccuggugucagaugugucugcagagacaacuggaaaggcuccaauaggcccaucguagauauaaauguaaaggauuauagcauuguuuccaguuaugugugcucaggacuuguuggagacacacccagaaaaaacgacagcuccagcaguagucauugccugaauccuaacaaugaggaagggggucauggagugaaaggcugggccuuugaugauggaaaugacguguggaugggaagaacgaucagcgagaaguuccgcucagguuaugaaaccuucaaagucauugaaggcugguccaaaccuaacuccaaauugcagauaaauaggcaagucauaguugacagagguaauagguccgguuauucugguauuuucucuguugaaggcaaaagcugcaucaaucggugcuuuuauguggaguugauaaggggaaggaaacaggaaacugaagucugguggaccucaaacaguauuguuguguuuuguggcaccucagguacauauggaacaggcucauggccugauggggcggacaucaaucucaugccuauauaa

SEQ ID NO: 54129 - RNA, 1410 nt, Artificial Sequence
  derived and/or modified CDS sequence (wt) from neuraminidase__InfluenzaA__AFH00552
augaauccaaaucaaaagauaauaacgauuggcucuguuucucucacuauugccacaauaugcuuccuuaugcaaauugccauccugguaacuacuguaacauugcauuucaagcaauaugaaugcaacucucucccaaacaaccaaguaaugcugugugaaccaacaauaauagaaagaaacauaacagagauaguguaucugaccaacaccaccauagagaaggagauaugccccaaacuagcagaauacagaaauuggucaaagccgcaauguaaaauuacaggauuugcaccuuucucuaaggacaauucaauucggcuuuccgcugguggggacauuugggugacaagagaaccuuaugugucaugcgauccugacaaguguuaucaauuugcccuuggacagggaacaacacuaaacaacaggcauucaaaugacacaguacaugauaggaccccuuaucgaacccuauugaugaaugaguuggguguuccuuuucauuugggaaccaagcaagugugcauagcaugguccagcucaaguugucacgauggaaaagcauggcugcauguuuguguaacugggcacgaugaaaaugcaacugcuagcuucauuuacgaugggaggcuuguagauaguauuggcucaugguccaaaaaaauccucaggacccaggagucggaaugcguuuguaucaauggaacuuguacaguaguaaugacugaugggagugcuucaggaagagcugauacuaaaauacuauucauugaggaggggaaaaucauucauauuagccaauugucaggaaguacucagcaugucgaggagugcucauguuauccucgauauccuggugucagaugugucugcagagacaacuggaaaggcuccaauaggcccauuguagauauaaauguaaaggauuauagcauuguuuccaguuaugugugcucaggacuuguuggagacacacccagaaaaaacgacagcuccagcaguagccauugccugaauccuaacaaugaggaagggggucauggagugaaaggcugggccuuugaugauggaaaugacguguggaugggaagaacgaucagcgagaaauuccgcucagguuaugaaaccuucaaagucauugaaggcugguccaaaccuaacuccaaauugcagauaaauaggcaagucauaguugacagagauaauagguccgguuauucugguauuuucucuguugaaggcaaaagcugcaucaaucggugcuuuuauguggaguugauaaggggaaggaaacaggaaacugaagucugguggaccucaaacaguauuguuguguuuuguggcaccucagguacauauggaacaggcucguggccugauggggcggauaucaaucucaugccuauauaa

SEQ ID NO: 54130 - RNA, 1410 nt, Artificial Sequence
  derived and/or modified CDS sequence (wt) from neuraminidase__InfluenzaA__AFH00563
augaauccaaaucaaaagauaauaacgauuggcucuguuucucucaccauugccacaauaugcuuccuuaugcaaauugccauccugguaacuacuguaacauugcauuucaagcaauaugaaugcaacucccccccaaacaaccaagugaugcugugugaaccaacaauaauagaaagaaacauaacagagauaguguaucugaccaacaccaccauagagaaggaaauaugccccaaacuagcagaauacagaaauuggucaaagccgcaauguaacauuacaggauuugcaccuuuuucuaaggacaauucgauucggcuuuccgcugguggggacaucugggugacaagagaaccuuaugugucaugcgauccugacaaauguuaucaauuugcccuuggacagggaacaacacuaaacaacgggcauucaaaugacacaguacaugagaggaccccuuaucggacccuauugaugaaugaguuggguguuccauuucauuugggaaccaagcaagugugcauagcaugguccagcucaaguugucacgauggaaaagcauggcugcauguuuguguaacgggggaugaugaaaaugcaacugcuagcuucauuuacaaugggaggcuuguagauaguauugguucaugguccaaaaaaauccucaggacccaggagucggaaugcguuuguaucaauggaacuuguacaguaguaaugacugaugggagugcuucaggaaaagcugauacuaaaauacuauucauugaggaggggaaaaucguucauacuagcccauugucaggaagugcucagcaugucgaggagugcuccuguuauccucgauauccuggugucagaugugucugcagagacaacuggaaaggcuccaauaggcccaucguagauauaaauguaaaggauuauagcauuguuuccaguuaugugugcucaggacuuguuggagacacacccagaaaaaacgacagcuccagcaguagccauugcuuggauccuaacaaugaggaagguggucauggagugaaaggcugggccuuugaugauggaaaugacguguggaugggaagaacgaucagcgagaaguuacgcucaggauaugaaaccuucaaagucauugaaggcugguccaaaccuaauuccaaauugcagauaaauaggcaagucauaguugacagagguaauagguccgguuauucugguauuuucucuguugaaggcaaaagcugcaucaaucggugcuuuuauguggaguugauaaggggaaggaaacaggaaacugaagucuuguggaccucaaacaguauuguuguguuuuguggcaccucagguacauauggaacaggcucauggccugauggggcggacaucaaucucaugccuauauaa

SEQ ID NO: 54131 - RNA, 1410 nt, Artificial Sequence
  derived and/or modified CDS sequence (wt) from neuraminidase__InfluenzaA__AFH00574
augaauccaaaucaaaagauaauaacgauuggcucuguuucucucaccauugcaacaauaugcuuccuuaugcaaauugccauccugguaacuacuguaacauugcauuucaagcaauaugaaugcaacucccccccaaacaaccaagugaugcugugugaaccaaaaauaauagaaagaaacauaacagagauaguguaucugaacaacaccaccauagagaaggaaauaugccccaaacuagcagaauacagaaauuggucaaagccgcaauguaacauuacuggauuugcaccuuuuucuaaggacaauucgauucggcuuuccgcugguggggacaucugggugacaagagaaccuuaugugucaugcgauccugacaaguguuaucaauuugcccuuggacagggaacaacacuaaacaacgggcauucaaaugacacaguacaugauaggaccccuuaucggacccuauugaugaaugaguuggguguuccauuucauuugggaaccaagcaagugugcauagcaugguccagcucaaguugucacgauggaaaagcauggcugcauguuuguguaacgggugaugaugaaaaugcaacugcuagcuucauuuacaaugggaggcuuguagauaguauagguucaugguccaaaaaaauccucaggacccaggaaucggaaugcguuuguaucaauggaacuuguacaguaguaaugacugauggaagugcuucaggaaaagcugauacuaaaauacuauucauugaggaggggaaaaucguucauacuagccuauugucagggagugcucagcaugucgaggagugcuccuguuauccucgauauccuggugucagaugugucugcagagacaacuggaaaggcuccaauaggcccaucguagauauaaauguaaaggauuauagcauuguuuccaguuaugugugcucaggacuuguuggagacacacccagaaaaaacgacagcuccagcaguagccauugcuuggauccuaacaaugaggaagguggucauggagugaaaggcugggccuuugaugauggaaaugacguguggaugggaagaacgaucagcgagaaguuacgcucaggauaugaaaccuucaaagucauugaaggcugguccaaaccuaacuccaaacugcagauaaauaggcaagucauaguugacagagguaauagguccgguuauucugguauuuucucuguugaaggcaaaagcugcaucaaucggugcuuuuauguggaguugauaaggggaaggaaacaggaaacugaagucuuguggaccucaaacaguauuguuguguuuuguggcaccucagguacauauggaacaggcucauggccugauggggcggacaucaaucucaugccuauauaa

SEQ ID NO: 54132 - RNA, 1410 nt, Artificial Sequence
  derived and/or modified CDS sequence (wt) from neuraminidase__InfluenzaA__AFH00585
augaauccaaaucaaaagauaauaacgauuggcucuguuucucucaccauugccacaauaugcuuccuuaugcaaauugccauccugguaacuacuguaacguugcauuucaagcaauaugaaugcaacucccccccaaacaaccaagugaugcugugugaaccaacaauaauagaaagaaacauaacagagauaguguaucugaccaacaccaccauaaagaaggaaauaugccccaaacuagcagaauacagaaauuggucaaagccgcaauguaacauuacaggauuugcaccuuuuucuaaggacaauucgauucggcuuuccgcugguggggacaucugggugacaagagaaccuuaugugucaugcgauccugacaaguguuaucaauuugcccuuggacagggaacaacacuaaacaacaggcauucaaaugacaaaguacaugauaggaccccuuaucgaacccuauugaugaaugaguuggguguuccauuucauuugggaaccaagcaagugugcauagcaugguccagcucaaguugucacgauggaaaagcauggcugcauguuuguguaacgggggaugaugaaaaugcaacugcuagcuucauuuacaaugggaggcuuguagauaguaucgguucaugguccaaaaaaauccucaggacccaggagucggaaugcguuuguaucaauggaacuuguacaguaguaaugacugaugggagugcuucaggaaaagcugauacuaaaauacuauucauuaaggaggggaaaaucguucauacuagcucauugucaggaagugcucagcaugucgaggagugcuccuguuauccucgauauccuggugucagaugugucugcagagacaacuggaaaggcuccaauaggcccaucguagauauaaauguaaaggauuauagcauuguuuccaguuaugugugcucaggacuuguuggagacacacccagaaaaaacgacagcuccagcaguagccauugcuuggauccuaacaaugaggaagguggucauggagugaaaggcugggccuuugaugauggaaaugacguguggaugggaagaacgaucagcgagaaguuacgcucaggauaugaaaccuucaaagucauugaaggcugguccaaagcuaacuccaaauugcagauaaauaggcaagucauaguugacagagguaauagguccgguuauucugguauuuucucuguugaaagcaaaagcugcaucaauaggugcuuuuauguggaguugauaaggggaaggaaacaggaaacugaagucuuguggaccucaaacaguauuguuguguuuuguggcaccucagguacauauggaacaggcucauggccugauggggcggacaucaaucucaugccuauauaa

SEQ ID NO: 54133 - RNA, 1410 nt, Artificial Sequence
  derived and/or modified CDS sequence (wt) from neuraminidase__InfluenzaA__AFH00596
augaauccaaaucaaaagauaauaacaauuggcucuguuucucucaccauugccacaauaugcuuccuuaugcaaauugccauccugguaacuacuguaacauugcauuucaagcaguaugaaugcaacccccccccaaacaaccaaguaaugcugugugaaccaacaauaauagaaagaaacauaacagagauaguguaucugaccaacaccaccauagagaaggaaauaugccccaaauuagcagaauacagaaauuggucaaagccgcaauguaacaucacaggauuugcaccuuuuucuaaggacaauucgauucggcuuuccgcugguggggacaucugggugacaagagaaccuuaugugucaugcgauccugacaaguguuaucaauuugcccuugggcagggaacaacacuaaacaacgggcauucaaaugacacaguacaugauaggaccccuuaccggacccuauugaugaaugaauuggguguuccauuucauuugggaaccaggcaagugugcauagcaugguccagcucaaguugucacgauggaaaagcauggcugcauguuuguguaacuggggaugaugaaaaugcaacugcuagcuucauuuacaaugggaggcuuguagauaguauugguucaugguccaaaaaaauacucagaacccaggagucggaaugcguuuguaucaauggaacuuguacaguaguaaugacugaugggagcgcuucaggaaaagcugauacuaaaauacuauucauugaggaggggaaaaucguucauauuagcacauugucaggaagugcucagcaugucgaggagugcuccuguuauccucgauauccuggugucagaugugucugcagagacaacuggaaaggcuccaauaggcccaucguagauauaaauguaaaggauuauagcauuguuuccaguuaugugugcucaggacuuguuggagacacacccagaaaaaacgacagcuucagcaguagccauugccuagauccuaacaaugaggaagguggucauggagugaaaggcugggccuuugaugauggaaaugacguguggaugggaagaacgaucagcgagaaguuacgcucagguuaugaaaccuucaaagucaucgaaggcugguccaaaccuaacuccaaauuacagacaaauaggcaagucauaguugaaagagguaacagguccgguuauucugguauuuucuccguugaaggcaaaagcugcaucaaucggugcuuuuauguggaguugauaaggggaaggaaagaggaaacugaagucugguggaccucaaacaguauuguuguguuuuguggcaccucagguacauauggaacaggcucauggccugauggggcggauaucaaucucaugccuauauaa

SEQ ID NO: 54134 - RNA, 1410 nt, Artificial Sequence
  derived and/or modified CDS sequence (wt) from neuraminidase__InfluenzaA__AFH00607
augaauccaaaucaaaagauaauaacaauuggcuuuguuuuuuucaccauugccacaauaugcuuccuuaugcaaauugccauccugguaacuacuguaacauugcauuucaagcaguaugaaugcaacccccccccaaacaaccaaguaaugcugugugaaccaacaauaauagaaagaaacauaacagagauaguguaucugaccaacaccaccauagagaaggaaauaugccccaaauuagcagaauacagaaauuggucaaagccgcaauguaacaucacaggauuugcaccuuuuucuaaggacaauucgauucggcuuuccgcugguggggacaucugggugacaagagaaccuuaugugucaugcgauccugacaaguguuaucaauuugcccuugggcagggaacaacacuaaacaacgggcauucaaaugacacaguacaugauaggaccccuuaccggacccuauugaugaaugaauuggguguuccauuucauuugggaaccaggcaagugugcauagcaugguccagcucaaguugucacgauggaaaagcauggcugcauguuuguguaacuggggaugaugaaaaugcaacugcuagcuucauuuacaaugggaggcuuguagauaguauugguucaugguccaaaaaaauacucagaacccaggagucggaaugcguuuguaucaauggaacuuguacaguaguaaugacugaugggagcgcuucaggaaaagcugauacuaaaauacuauucauugaggaggggaaaaucguucauauuagcacauugucaggaagugcucagcaugucgaggagugcuccuguuauccucgauauccuggugucagaugugucugcagagacaacuggaaaggcuccaauaggcccaucguagauauaaauguaaaggauuauagcauuguuuccaguuaugugugcucaggacuuguuggagacacacccagaaaaaacgacagcuucagcaguagccauugccuagauccuaacaaugaggaagguggucauggagugaaaggcugggccuuugaugauggaaaugacguguggaugggaagaacgaucagcgagaaguuacgcucagguuaugaaaccuucaaagucaucgaaggcugguccaaaccuaacuccaaauuacagacaaauaggcaagucauaguugaaagagguaacagguccgguuauucugguauuuucuccguugaaggcaaaagcugcaucaaucggugcuuuuauguggaguugauaaggggaaggaaagaggaaacugaagucugguggaccucaaacaguauuguuguguuuuguggcaccucagguacauauggaacaggcucauggccugauggggcggauaucaaucucaugccuauauaa

SEQ ID NO: 54135 - RNA, 1410 nt, Artificial Sequence
  derived and/or modified CDS sequence (wt) from neuraminidase__InfluenzaA__AFH00618
augaauccaaaucaaaagauaauaacgauuggcucuguuucccucaccauuuccacaauaugcuucuucaugcaaauugccauccugauaacuacuguaacauugcauuucaagcaauaugaauucaacucccccccaaacaaccaagugaugcugugugaaccaacaauaauagaaagaaacauaacagagauaguguaucugaccaacaccaccauagagaaggaaauaugccccaaacuagcagaauacagaaauuggucaaagccgcaauguaacauuacaggauuugcaccuuuuucuaaggacaauucgauucggcuuuccgcugguggggacaucugggugacaagagaaccuuaugugucaugcgauccugacaaguguuaucaauuugcccuuggacagggaacaacacuaaacaacgugcauucaaaugacacaguacaugauaggaccccuuaucggacccuauugaugaaugaguuggguguuccauuucaucuggggaccaagcaagugugcauagcaugguccagcucaaguugucacgauggaaaagcauggcugcauguuuguguaacgggggaugaugaaaaugcaacugcuagcuucauuuacaaugggaggcuuguagauaguauuguuucaugguccaaaaaaauccucaggacccaggagucagaaugcguuuguaucaauggaacuuguacaguaguaaugacugaugggagugcuucaggaaaagcugauacuaaaauacuauucauugaggaggggaaaauuguucauacuagcacauuaucaggaagugcucagcaugucgaggagugcuccuguuauccucgauauccuggugucagaugugucugcagagacaacuggaaaggcuccaauaggcccaucguagauauaaacauaaaggauuauagcauuguuuccaguuaugugugcucaggacuuguuggagacacacccagaaaaaacgacagcuccagcaguagccauugcuuggauccaaacaaugaggaagguggucauggagugaaaggcugggccuuugaugauggaaaugacguguggaugggaagaacgaucagcgagaaguuacgcucaggauaugaaaccuucaaaguaauugaaggcugguccaacccuaacuccaaauugcagauaaauaggcaagucauaguugacagagguaacagguccgguuauucugguauuuucucuguugaaggcaaaagcugcaucaaucggugcuuuuauguggaguugauaaggggaagaaaacaggaaacugaagucuuguggaccucaaacaguauuguuguguuuuguggcaccucagguacauauggaacaggcucauggccugauggggcggacaucaaucucaugccuauauaa

SEQ ID NO: 54136 - RNA, 1410 nt, Artificial Sequence
  derived and/or modified CDS sequence (wt) from neuraminidase__InfluenzaA__AFH00629
augaauccaaaucaaaagauaauaacaauuggcucuguuucucucaccauugccacaauaugcuuccuuaugcaaauuaccauccugguaacuacuguaacauugcauuucaagcaguaugaaugcaacucccccccaaacaaccaaguaaugcugugugaaccaacaauaauagaaagaaacauaacagagauaguguaucugaccaauaccacuauagagaagggaauaugccccaaauuagcagaauacagaaauuggucaaagccgcaauguaacauuacaggauuugcaccuuuuucuaaggacaauucgauucggcuuuccgcugguggggacaucugggugacaagagagccuuaugugucaugcgauccugacaaguguuaucaauuugcccuugggcagggaacaacacuaaacaacgggcauucaaaugacacaguacaugauaggaccccuuaccggacccuauugaugaaugaauuggguguuccauuucauuugggaaccaggcaagugugcauagcaugguccagcucaaguugucacgauggaaaagcauggcugcauguuuguguaacuggggaugauaaaaaugcaacugcuaguuucauuuacaaugggaggcuuguagauaguauugguucaugguccaaaaaaauacucagaacccaggagucggaaugcguuuguaucaauggaacuuguacaguaguaaugacugaugggagcgcuucaggaaaagcugauacuaaaauacuauucauugaggaggggaaaaucauucacauuagcacauuguuaggaagugcucagcaugucgaggagugcuccuguuauccucgauauccuggugucagauguguaugccgagacaacuggaaaggcuccaauaggcccaucguagauauaaauguaaaggauuauagcauuguuuccaguuaugugugcucaggacuuguuggagacacacccagaaaaaacgacagcuccagcaguagccauugccuagauccuaacaaugaggaagguggucauggagugaaaggcugggccuuugaugauggaaaugacguguggaugggaagaacgaucagcgagaaguuacgcucagguuaugaaaccuucaaagucaucgaaggcugguccaaaccuaacuccaaauuacagauaaauaggcaagucauaguugaaagagguaacagguccgguuauucugguauuuucuccguugaaggcaaaagcugcaucaaucggugcuuuuauguggaguugauaaggggaaggaaagaggaaacugaagucugguggaccucaaacaguauuguuguguuuuguggcaccucagguacauauggaacaggcucauggccugauggggcggauaucaaucucaugccuauauaa

SEQ ID NO: 54137 - RNA, 1410 nt, Artificial Sequence; identical to SEQ ID NO: 46378
  derived and/or modified CDS sequence (wt) from neuraminidase__InfluenzaA__AFH00640

SEQ ID NO: 54138 - RNA, 1410 nt, Artificial Sequence; identical to SEQ ID NO: 48468
  derived and/or modified CDS sequence (wt) from neuraminidase__InfluenzaA__AFH00651

SEQ ID NO: 54139 - RNA, 1410 nt, Artificial Sequence
  derived and/or modified CDS sequence (wt) from neuraminidase__InfluenzaA__AFH00662
augaauccaaaucaaaagauaauaacgauuggcucuguuucucucaccauuuccacaauaugcuucuucaugcaaauugccaucuugauaacuacuguaacauugcauuucaagcaauaugaauucaacucccccccaaacaaccaagugaugcugugugaaccaacaauaauagaaagaaacauaacagagauaguguaucugaccaacaccaccauagagaaggaaauaugccccaagcuagcagaauacagaaauuggucaaagccgcaaugugacauuacaggauuugcaccuuuuucuaaggacaauucgauuaggcuuuccgcugguggggacaucugggugacaagagaaccuuaugugucaugcgauccugacaaguguuaucaauuugcccuuggacagggaacaacacuaaacaacgugcauucaaaugacacaguacaugauaggaccccuuaucggacccuauugaugaaugaguuagguguuccauuucaucuggggaccaagcaagugugcauagcaugguccagcucaaguugucacgauggaaaagcauggcugcauguuuguguaacgggggaugauaaaaaugcaacugcuagcuucauuuacaaugggaggcuuguagauaguauuguuucaugguccaaagaaauccucaggacccaggagucagaaugcguuuguaucaauggaacuuguacaguaguaaugacugaugggagugcuucaggaaaagcugauacuaaaauacuauucauugaggaggggaaaaucguucauacuagcacauugucaggaagugcucagcaugucgaggagugcuccugcuauccucgauauccuggugucagaugugucugcagagacaacuggaaaggcuccaauaggcccaucguagauauaaacauaaaggauuauagcauuguuuccaguuaugugugcucaggacuuguuggagacacacccagaaaaaacgacagcucuagcaguagccauugcuuggauccuaacaaugaagaagguggucauggagugaaaggcugggccuuugaugauggaaaugacguguggaugggaagaacgaucagcgagaaguuacgcucaggauaugaaaccuucaaagucauugaaggcugguccaacccuaauuccaaauugcagauaaauaggcaagucauaguugacagagguaauagguccgguuauucugguauuuucucuguugaaggcaaaagcugcaucaaucggugcuuuuauguggagcugauaaggggaagaaaagaggaaacugaagucuuguggaccucaaacaguauuguuguguuuuguggcaccucagguacauauggaacaggcucauggccugauggggcggacaucaaucucaugccuauauaa

SEQ ID NO: 54140 - RNA, 1410 nt, Artificial Sequence
  derived and/or modified CDS sequence (wt) from neuraminidase__InfluenzaA__AFH00673
augaauccaaaucaaaagauaauaacgauuggcucuguuucucucaccauuuccacaauaugcuucuucaugcaaauugccaucuugauaacuacuguaacauugcauuucaagcaauaugaauucagcucccccccaaacaaccaagugaugcugugugaaccaacaauaauagaaagaaacauaacagagauaguguaucugaccaacaccaccauagagaaggaaacaugccccaaacuagcagaauacagaaauuggucaaagccgcaaugugacauuacaggauuugcaccuuuuucuaaggacaauucgauuaggcuuuccgcugguggggacaucugggugacaagagaaccuuaugugucaugcgauccugacaaguguuaucaauuugcccuuggacagggaacaacacuaaacaacgugcauucaaaugacacaguacaugauaggaccccuuaucggacccuauugaugaaugagcuagguguuccauuucaucuggggaccaagcaagugugcauagcaugguccagcucaaguugucacgauggaaaagcauggcugcauguuuguguaacgggggaugacaaaaaugcaacugcuagcuucauuuacaaugggaggcuuguagauaguauuguuucaugguccaaagaaauccucaggacccaggagucagaaugcguuuguaucaauggaacuuguacaguaguaaugacugaugggagugcuucaggaaaagcugauacuaaaauacuauucauugaggaggggaaaaucguucauacuagcacacugucaggaagugcucagcaugucgaggagugcuccugcuauccucgauauccuggugucagaugugucugcagagacaauuggaaaggcuccaauaggcccaucguagauauaaacauaaaggauuauagcauuguuuccagauaugugugcucaggacuuguuggagacacacccagaaaaaacgacagcuccagcaguagccauugcuuggauccuaacaaugaagaagguggucauggagugaaaggcugggccuuugaugauggaaaugacguguggaugggaagaacgaucagcgugaagucacgcucaggauaugaaaccuucaaagucauugaaggcugguccaacccuaauuccaaauugcagauaaauaggcaagucauaguugacagagguaauagguccgguuauucugguauuuucucuguugaaggcaaaagcugcaucaaucggugcuuuuauguggaguugauaaggggaagaaaagaggaaaccgaaguuuuguggaccucaaacaguauuguuguguuuuguggcaccucagguacauauggaacaggcucauggccugauggggcggacaucaaucucaugccuauauaa

SEQ ID NO: 54141 - RNA, 1410 nt, Artificial Sequence
  derived and/or modified CDS sequence (wt) from neuraminidase__InfluenzaA__AFH00684
augaauccaaaucaaaagauaauaacgauugggucuguuucucucaccauuuccacaauaugcuucuucaugcaaauugccaucuugauaacuacuguaacauugcauuucaagcaauaugaauucaacucccccccaaacaaccaagugaugcugugugaaccaacaauaauagaaagaaacauaacagagauaguguaucugaccaacaccaccauagagaaggaaauaugccccaaacuagcagaauacagaaauuggucaaagccgcaaugugacauuacaggauuugcaccuuuuucuaaggacaacucgauuaggcuuuccgcugguggggacaucugggugacaagagaaccuuaugugucaugcgauccugacaaguguuaucaauuugcccuuggacagggaacaacacuaaacaacgugcauucaaauaacacaguacgugagaggaccccuuaucggacccuauugaugaaugaguuagguguuccuuuucaucuggggaccaagcaagugugcauagcaugguccagcucaaguugucacgauggaaaagcauggcugcauguuuguauaacgggggaugauaaaaaugcaacugcuagcuucauuuacaaugggaggcuuguagauaguauuguuucaugguccaaagaaauccucaggacccaggagucagaaugcguuuguaucaauggaacuuguacaguaguaaugacugaugggagugcuucaggaaaagcugauacuaaaauacuauucauugaggaggggaaaaucguucauacuagcacauugucaggaagugcucagcauguugaggagugcuccugcuauccucgauauccuggugucagaugugucugcagagacaacuggaaaggcuccaauaggcccaucguagauauaaacauaaaggaucauagcauuguuuccaguuauguguguucaggacuuguuggagacacacccagaaaaaacgacagcuccagcaguagccauuguuuggauccuaacaaugaagaagguggucauggagugaaaggcugggccuuugaugauggaaaugacguguggaugggaagaacgaucagcgagaagucacgcuuaggguaugaaaccuucaaagucauugaaggcugguccaacccuaaguccaaauugcagauaaauaggcaagucauaguugacagagguaauagguccgguuauucugguauuuucucuguugaaggcaaaagcugcaucaaucggugcuuuuauguggaguugauaaggggaagaaaagaggaaacugaagucuuguggaccucaaacaguauuguuguguuuuguggcaccucaggcacauauggaacaggcucauggccugauggggcggacaucaaucucaugccuauauaa

SEQ ID NO: 54142 - RNA, 1410 nt, Artificial Sequence
  derived and/or modified CDS sequence (wt) from neuraminidase__InfluenzaA__AFH00695
augaauccaaaucaaaagauaauaacgauuggcucuguuucucucaccauuuccacaauauguuucuucaugcaaauugccaucuugauaacuacuguaacauugcauuucaagcaauaugaauucaacucccccccaaacaaccaagugaugcugugugaaccaacaauaauagaaagaaacauaacagaaauaguguaucugaccaacaccaccauagagaaggaaauaugccccaaacuagcagaauacagaaauuggucaaagccgcaaugugacauuacaggauuugcaccuuuuucuaaggacaauucgauuaggcuuuccgcugguggggacaucugggugacaagagaaccuuaugugucaugcgauccugacaaguguuaucaauuugcccuuggacagggaacaacacuaaacaacgugcauucaaaugacacaguacgugaaaggaccccuuaucggacccuauugaugaaugaguuagguguuccuuuucaucuggggaccaagcaagugugcauagcaugguccagcucaaguugucacgauggaaaagcauggcugcauguuuguauaacgggggaugauaaaaaugcaacugcuagcuucauuuacaacgggaggcuuguagauaguauuguuucaugguccaaagaaauccucaggacccaggagucagaaugcguuuguaucaauggaacuuguacaguaguaaugacugaugggagugcuucaggaaaagcugauacuaaaauacuauucauugaggaggggaaaaucguucauacuagcacauugucaggaagugcucagcaugucgaggagugcuccugcuauccucgauauccuggugucagaugugucugcagagacaacuggaaaggcuccaauaggcccauuguagauauaaacauaaaggaucauagcauuguuuccaguuauguguguucaggacuuguuggagacacacccagaaaaaacgacagcuccagcaguagccauuguuuggauccuaacaaugaagaagguggucauggagugaaaggcugggccuuugaugauggaaaugacguauggaugggaagaacgaucagcgagaagucacgcuuaggguaugaaaccuucaaagucauugaaggcugguccaacccuaaguccaaauugcagauaaauaggcaagucauaguugacagagguaauagguccgguuauucugguauuuucucuguugaaggcaaaagcugcaucaaucggugcuuuuauguggaguugauaaggggaagaaaagaggaaacugaagucuuguggaccucaaacaguauuguuguguuuuguggcaccucagguacauauggaacaggcucauggccugauggggcggacaucaaucucaugccuauauaa

SEQ ID NO: 54143 - RNA, 1410 nt, Artificial Sequence
  derived and/or modified CDS sequence (wt) from neuraminidase__InfluenzaA__AFH00706
augaauccaaaccaaaagauaauaacgauuggcucuguuucccucaccauuuccacaauaugcuucuucaugcaaauugccaucuugauaacuacuguaacauugcauuucaagcaauaugaauucaacucccccccaaacaaccaagugaugcugugugaaccaacaauaauagaaagaaacauaacagagauaguguaucugaccaacaccaccauagagaaggaaauaugccccaaacuagcagaauacagaaauuggucaaagccgcaaugugacauuacaggauuugcaccuuuuucuaaggacaauucgauuaggcuuuccgcugguggggacaucugggugacaagagaaccuuaugugucaugcgauccuaacaaguguuaucaauuugcccuuggacaaggaacaacacuaaacaacgugcauucaaauaacacaguacgugauaggaccccuuaucggacccuauugaugaaugaguuagguguuccuuuucaucuggggaccaagcaagugugcauagcaugguccagcucaaguugucacgaugggaaagcauggcugcauguuuguauaacgggggacgauaaaaaugcaacugcuagcuucauuuacaaugggaggcuuguagauaguguuguuucaugguccaaagaaauccucaggacccaggagucagaaugcguuuguaucaauggaacuuguacaguaguaaugacugaugggagugcuucaggaaaagcugauacuaaaauacuauucaucgaggaggggaaaaucguucauacuagcacauugucaggaagugcucaacaugucgaggagugcuccugcuauccucgauauccuggugucagaugugucugcagagacaacuggaaaggcuccaauaggcccaucguagauauaaacaugaaggaucauagcauuguuuccaguuauguguguucaggacuuguuggagacacacccagaaaaaacgacagcuccagcaguagccauuguuuugauccuaacaaugaagaagguggucauggagugaaaggcugggccuuugaugauggaaaugacguguggaugggaagaacgaucagcgagaagucacgcuuaggguaugaaaccuucaaagucauugaaggcugguccaacccuaaguccaaauugcagauaaauaggcaagucauaguugacagaggugauagguccgguuauucugguauuuucucuguugaaggcaaaagcugcaucaaucggugcuuuuauguggaguugauaaggggaaguaaagaggaaacugaaguauuguggaccucaaacaguauuguuguguuuuguggcaccucagggacauauggaacaggcucauggccugauggggcggacaucaaucucaugccuauauaa

SEQ ID NO: 54144 - RNA, 1410 nt, Artificial Sequence
  derived and/or modified CDS sequence (wt) from neuraminidase__InfluenzaA__AFH00728
augaauccaaaucaaaagauaauaacaauuggcucuguuucucucaccauugcaacaauaugcuuccuuaugcaaauugccauccugguaacuacuguaacauugcauuucaagcaauaugagugcagcucccccccaaacaaccaaguaaugccgugugaaccaauaauaauagaaagaaacauaacagagauaguguauuugacuaacaccaccauagagaaagagauaugccccaaacuaguggaauacagaaauuggucaaagccgcaauguaaaauuacaggauuugcaccuuuuucuaaggacaauucaauucggcuuuccgcugguggggacauuugggugacgagagaaccuuaugugucaugcgauccuggcaaguguuaucaauuugcacucgggcagggaaccacacuaaacaacaagcauucaaaugacacaauacaugauaggaccccuuaucgaacccuauugaugaaugaguuggguguuccauuucauuugggaaccaggcaagugugcauagcaugguccagcucaaguugucacgauggaaaagcauggcugcauguuugugucacugggcaugauaaaaaugcaacugcuagcuucauuuacaaugggaggcuuguagacaguauugguucaugguccaaaaauauccucaggacccaggagucggaaugcguuuguaucaaugggacuuguacaguaguaaugacugauggaagugcuucagaaagagcugacacuaaaauacuauucauugaagaggggaaaaucguucauauuagcccauugucaggaagugcucagcauguagaggaguguuccuguuauccucgauauccuggugucagaugugucugcagagacaacuggaaaggcuccaauaggcccaucguagauauaaaugugaaagauuauagcauuguuuccaguuaugugugcucagggcuuguuggcgacacacccagaaaaaacgacagaucuagcaguagcuauugccggaauccuaacaaugagaaagggaaucauggagugaaaggcugggccuuugacgauggaaaugacguguggaugggaagaacgauuggcgaggaguuacgcucagguuaugaaaccuucaaagucauuggugguugguccacaccuaauuccaaauugcagauaaauaggcaagucauaguugacagcgauaauagguccgguuauucugguauuuucucuguugagggcaaaagcugcaucaauaggugcuuuuauguggaguugauaaggggaagggaacaggaaacuagagucuuguggaccucaaacaguauuguuguguuuuguggcaccucagguaccuauggaacaggcucauggccugauggagcggacaucaaucucaugccuauauaa

SEQ ID NO: 54145 - RNA, 1410 nt, Artificial Sequence
  derived and/or modified CDS sequence (wt) from neuraminidase__InfluenzaA__AFH00739
augaauccaaaucaaaagauaauaacaauuggcucuguuucucucaccauugccacaauaugcuuccuuaugcaaauugccauucugguaacuacuguaacauugcauuucaagcaauaugagugcagcucccccccaaacaaccaaguaaugccgugugaaccaacaauaauagaaagaaacauaacagagauaguguauuugacuaacaccaccauagagaaagagauaugccccaaacuaguagaauacagaaauuggucaaagccgcaauguaaaauuacaggauuugcaccuuuuucuaaggacaauucaauucggcuuuccgcugguggagacauuugggugacaagagaaccuuaugugucaugcgauccuggcaaguguuaucaauuugcacuugggcagggaaccacacuaaacaacaggcauucaaaugacacaguacaugauaggaccccuuaucgaacccucuugaugaaugaguuggguguuccauuucauuugggaaccaagcaagugugcauagcaugguccagcucaaguugucacgauggaaaagcaugguugcauguuugugucacugggcaugauaaaaaugcaacugcuagcuucauuuacgaugggaggcuuguagacaguauugguucaugguccaaaaauauccucaggacccaggagucggaaugcguuuguaucaaugggacuuguacaguaguaaugacugauggaagugcuucagaaagagcugauacuaaaauacuauucauugaagaggggaaaaucguucauauuagcccauugucaggaagugcucagcauguagaggagugcuccuguuauccucgauauccuggugucagaugugucugcagagacaacuggaaaggcuccaauaggcccaucguagauauaaaugugaaagauuauagcauuguuuccaguuaugugugcucagggcuuguuggagacacacccagaaaaaacgacagauccagcaguagcuauugccggaauccuaacaaugagaaagggagucauggagugaaaggcugggccuuugacgauggaaaugacguguggaugggaagaacgaucggcgaggaguuacgcucagguuaugaaaccuucaaagucauuggagguugguccacaccuaacuccaaauugcagauaaauaggcaagucauaguugacagcgguaauagguccgguuauucugguauuuucucuguugagggcaaaagcugcaucaaucggugcuuuuauguggaguugauaaggggaaggggacaggaaacuagagucugguggaccucaaacaguauuguuguguuuuguggcaccucagguacauauggaacaggcucauggccugauggggcggacaucaaucucaugccuauauaa

SEQ ID NO: 54146 - RNA, 1410 nt, Artificial Sequence
  derived and/or modified CDS sequence (wt) from neuraminidase__InfluenzaA__AFH00750
augaauccaaaucaaaagauaauaacaauuggcucuguuucucucaccauugccacaauaugcuuccuuaugcaaauugccauccugguaacuacuguaacauugcauuucaagcaauaugagugcagcucccccccaaacaaccaaguaaugccgugcgaaccaacaauaauagaaagaaacauaacagagauaguguauuugacuaacaccaccauagagaaagagauaugccccaaacuaguagaauacagaaauuggucaaagccgcaauguaaaauuacaggauuugcaccuuuuucuaaggacaauucaauucggcuuuccgcugguggagacauuugggugacaagagaaccuuaugugucaugcgauccuggcaaguguuaucaauuugcacuugggcagggaaccacacuaaacaacaggcauucaaaugacacaguacaugauaggaccccuuaucgaacccucuugaugaaugaguuggguguuccauuucauuugggaaccaagcaagugugcauagcaugguccagcucaaguugucacgauggaaaagcauggcugcauguuugugucacugggcaugauaaaaaugcaacugcuagcuucauuuacgaugggaggcuuguagacaguauugguucaugguccaaaaauauccucaggacccaggagucggaaugcguuuguaucaaugggacuuguacaguaguaaugacugauggaagugcuucagaaagagcuuauacuaaaauacuauucauuaaagaggggaaaaucguucauauuagcccauugucaggaagugcucagcauguagaggagugcuccuguuauccucgauauccuggugucaggugugucugcagagacaacuggaaaggcuccaauaggcccaucguagauauaaaugugaaagauuauagcauuguuuccaguuaugugugcucagggcuuguuggagacacacccagaaaaaacgacagauccagcaguagcuauugccggaauccuaacaaugagaaagggagucauggagugaaaggcugggccuuugacgauggaaaugacguguggaugggaagaacgaucggcgaggaguuacgcucagguuaugaaaccuucaaagucauuggagguugguccacaccuaacuccaaauugcagauaaauaggcaagucauaguugaaagcgguaauagguccgguuauucugguauuuucucuguugagggcaaaagcugcaucaaucggugcuuuuauguggaguugauaaggggaagggaacaggaaacuagagucugguggaccucaaacaguauuguuguguuuuguggcaccucagguacauauggaacaggcucauggccugauggggcggacaucaaucucaugccuauauaa

SEQ ID NO: 54147 - RNA, 1410 nt, Artificial Sequence
  derived and/or modified CDS sequence (wt) from neuraminidase__InfluenzaA__AFH00761
augaauccaaaucaaaagauaauaacaauuggcucuguuucucucaccauugccacaauaugcuuccuuaugcaaauugccauccugguaacuacuguaacauugcauuucaagcaauaugagugcaacucccccccaaacaaccaaguaaugccgugugaaccaacaauaauagaaagaaacauaacagagauaguguauuugacuaacaccaccauagagaaagagauaugccccaaacuaguagaauacagaaauuggucaaagccgcaauguaaaauuacaggauuugcaccuuuuucuaaggacaauucaauucggcuuuccgcugguggagacauuugggugacaagagaaccuuaugugucaugcgauccuggcaaguguuaucaauuugcacuuggacagggaaccacacuaaacaacaggcauucaaaugacacaguacaugauaggaccccuuaucgaacccucuugaugaaugaguuggguguuccauuucauuugggaaccaagcaagugugcauagcaugguccagcucaaguugucacgauggaaaagcauggcugcauguuugugucacugggcaugaugaaaaugcaacugcuagcuucauuuacgaugggaggcuuguagauaguauugguucaugguccaaaaauauccucaggacccaggagucggaaugcguuuguaucaauggaacuuguacaguaguaaugacugauggaagugcuucagaaagagcugauacuaaaauacuauucauugaagaggggaaaaucguucauauuagcccauugucaggaagugcucagcauguagaggagugcuccuguuauccucgauauccuggugucagaugugucugcagagacaacuggaaaggcuccaauaggcccaucguagauauaaaugugaaagauuauagcauuguuuccaguuaugugugcucagggcuuguuggagacacacccagaaaaaacgacagcuccagcaguagcuauugccggaauccuaacaaugagaaagggagucauggagugaaaggcugggccuuugacgauggagaugacguguggaugggaagaacgaucggcgaggaguuacgcucagguuaugaaaccuucaaagucauuggaggcugguccacaccuaacuccaaauugcagauaaauaggcaagucauaguugacagagguaauagguccgguuauucugguauuuucucuguugaaggcaaaagcugcaucaaucggugcuuuuauguggaguugauaaggggaaggaaacaggaaacuaaagucugguggaccucaaacaguauuguuguguuuuguggcaccucagguacauauggaacaggcucauggccugauggggcggacaucaaucucaugccuauauaa

SEQ ID NO: 54148 - RNA, 1410 nt, Artificial Sequence
  derived and/or modified CDS sequence (wt) from neuraminidase__InfluenzaA__AFH00783
augaauccaaaucaaaagauaauaacuauuggcucuguuucucucacuauugccacaauaugcuuccuuaugcaaauugccauccugguaacuacuguaacauuacauuucaagcaauaugaaugcaacucccccccaaacaaccaaguaaugcugugugaaccaacaauaauagaaagaaacauaacagagauaguguaucugaccaacaccaccauagagaaggaaauaugccccaaacuagcagaauacagaaauuggucaaagccgcaauguaaaauuacaggauuugcaccuuuuucuaaggacaauucaauucggcuuuccgcugguggggacauuugggugacaagagaaccuuaugugucaugcgauccugacaaguguuaucaauuugcccuuggacggggaacaacacuaaacaacaggcauucaaaugacacaguacaugauaggaccccuuaucgaacccuauugaugaaugaguuggguguuccauuucauuugggaaccaagcaagugugcauagcaugguccagcucaaguugucacgauggaaaagcauggcugcauguuuguguaacugggcaugaugaaaaugcaacugcuagcuucauuuacgaugggaggcuuguagauaguauugguucaugguccaaaaaaauccucaggacccaggagucggaaugcguuuguaucaauggaacuuguacaguaguaaugacugauggaagugcuuccggaagagcugauacuaaaauacuauucauugaagaggggaaaaucguucauauuaguccauugucaggaagugcucagcaugucgaggagugcuccuguuauccucgauauucuggugucagaugugucugcagagacaacuggaaaggcuccaauaggcccaucguagauauaaaugugaaagauuauagcauuguuuccaguuaugugugcucaggacuuguuggagacacacccagaaaaaacgacagcuccagcaguagccauugccugaauccuaacaaugaggaagggggucauggagugaaaggcugggccuuugaugauggaaaugacguguggaugggaagaacgaucagcgagaaguuucgcucagguuaugaaaccuucaaagucauuggaggcugguccaaaccuaacuccaaauugcagauaaauaggcaagucauaguugacagagguaauagguccgguuauucugguauuuucucuguugaaggcaaaagcugcaucaaucggugcuuuuauguggaguugauaaggggaaggaaacaggaaacugaagucugguggaccucaaacaguauuguuguguuuuguggcaccucagguacauauggaacaggcucauggccugauggggcggacaucaaucucaugccuauauaa

SEQ ID NO: 54149 - RNA, 1410 nt, Artificial Sequence
  derived and/or modified CDS sequence (wt) from neuraminidase__InfluenzaA__AFH00794
augaauccaaaucaaaagauaauaacgauuggcucuguuucucucacuauugccacaauaugcuuccuuaugcaaauugccauccugguaacuacuguaacauugcauuucaagcaauaugaaugcaacucccccccaaacaaccaaguaaugcugugugaaccaacaauaauagaaagaaacauaacagagauaguguaucugaccaacaccaccauagagaaggaaauaugccccaaacuagcagaauacagaaauuggucaaagccgcaauguaaaauuacaggauuugcaccuuuuucuaaggacaauucaauucggcuugccgcugguggggacauuugggugacaagagaaccuuaugugucaugcgauccugacaaguguuaucaauuugcccuuggacagggaacaacacuaaacaacaggcauucaaaugacacaguacaugauaggaccccuuaucgaacccuauugaugaaugaguuggguguuccauuucauuugggaaccaagcaagugugcauagcaugguccagcucaaguugucacgauggaaaagcauggcugcauguuugugugacugggcaugaugaaaaugcaacugcuagcuucauuuacgaugggaggcuuguagauaguauugguucaugguccaaaaaaauccucaggacccaggagucggaaugcguuuguaucaauggaacuuguacaguaguaaugacugaugggagugcuucagaaagagcugauacuaaaauacuauucauugaggaggggaaaaucguucauauuagccaauugucaggaagugcucagcaugucgaggagugcuccuguuauccucgauauccuggugucagaugugucugcagagacaacuggaaaggcuccaauaggcccaucguagauauaaauguaaaggauuauagcauuguuuccaguuaugugugcucaggacuuguuggagacacacccagaaaaaacgacagcuccagcaguagccauugccugaauccuaacaaugaagaagggggucauggagugaaaggcugggccuuugaugauggagaugacguguggaugggaagaacgaucagcgagaaguuacgcucagguuaugaaaccuucaaagucauugaaggcugguccaaaccuaacuccaaauugcagacaaauaggcaagucauaguugacagagguaacagguccgguuauucugguauuuucucuguugaaggcaaaagcugcaucaaucggugcuuuuauguggaguugauaaggggaaggaaacaggaaacugaagucugguggaccucaaacaguauuguuguguuuuguggcaccucagguacauauggaacaggcucauggccugauggggcggacaucaaucucaugccuauauaa

SEQ ID NO: 54150 - RNA, 1410 nt, Artificial Sequence
  derived and/or modified CDS sequence (wt) from neuraminidase__InfluenzaA__AFH00805
augaauccaaaucaaaagauaauaacgauuggcucuguuucucucacuauugccacaauaugcuuccuuaugcaaauagccauccugguaacuacuguaacauugcauuucaagcaauaugaaugcaacucccccccaaacaaccaaguaaugcugugugaaccaacaauaauagaaagaaacauaacagagauaguguaucugaccaacaccaccauagagaaggaaauaugccccaaacuagcagaauauagaaauuggucaaagccgcaauguaaaauuacaggauuugcaccuuuuucuaaggacaauucaauucggcuuuccgcugguggggacauuugggugacaagagaaccuuaugugucaugcgauccugacaaguguuaucaauuugcccuuggacagggaacaacacuaaacaacaggcauucaaaugacacaguacaugauaggaccccuuaccgaacccuauugaugaaugaguuggguguuccauuucauuugggaaccaagcaaguaugcauagcaugguccagcucaaguugucacgauggaaaagcauggcugcauguuuguguaacugggcaugaugaaaaugcaacugcuagcuucauuuacgaugggagacuuguagauaguauugguucaugguccaaaaaaauccucaggacccaggagucggaaugcguuuguaucaauggaacuuguacaguaguaaugacugaugggagugcuucaggaagagcugauaccaaaauacuauucauugaggaggggaaaaucguucauacuagcaaauugucaggaagugcucagcaugucgaggagugcuccuguuauccucgauauccuggugucagaugugucugcagagacaacuggaaaggcuccaauaggcccaucguagauauaaauguaaaggauuauagcauuguuuccaguuaugugugcucaggacuuguuggagacacacccagaaaaaacgacagcuccagcaguagccauugccuggauccuaacaaugaagaagggggucauggagugaaaggcugggccuuugaugauggaaaugacguguggaugggaagaacgaucagcgagaagucacgcucagguuaugaaaccuucaaggucauugaaggcugguccaaaccuaacuccaaauugcagauaaauaggcaagucauaguugaaagagguaauagauccgguuauucugguauuuucucuguugaaggcaaaagcugcaucaaucggugcuuuuauguggaguugauaaggggaaggaaacaggaaacugaagucugguggaccucaaacaguauuguuguguucuguggcaccucagguacauauggaacaggcucauggccugauggggcggacaucaaucucaugccuauauaa

SEQ ID NO: 54151 - RNA, 1410 nt, Artificial Sequence
  derived and/or modified CDS sequence (wt) from neuraminidase__InfluenzaA__AFH00816
augaauccaaaucaaaagauaauaacgauuggcucuguuucucucaccauuuccacaauaugcuucuucaugcaaauugccaucuugauaacuacuguaacauugcauuucaagcaauaugaauucaacucccccccaaacaaccaagugaugcuaugugaaccaacaauaauagaaagaaacauaacagagauaguguaucugaccaacaccaccauagagaaggaaauaugccccaaacuagcagaauacagaaauuggucaaagccgcaaugugacauuacaggauuugcaccuuuuucuaaggacaauucgauuaggcuuuccgcugguggggacaucugggugacaagagaaccuuaugugucaugcgauccugacaaguguuaucaauuugcccuuggacagggaacaacacuaaacaacgugcauucaaauaacacaguacgugauaggaccccuuaucggacccuauugaugaaugaguuagguguuccuuuucaucuggggaccaagcaagugugcauagcaugguccagcucaaguugucacgauggaaaagcauggcugcauguuuguauaacgggggaugauaaaaaugcaacugcuagcuucauuuacaaugggaggcuuguagauaguguuguuucaugguccaaagaaauccucaggacccaggagucagaaugcguuuguaucaauggaacuuguacaguaguaaugacugaugggagugcuucaggaaaagcugauacuaaaauacuauucauugaggaggggaaaaucguucauacuagcacauugucaggaagugcucagcaugucgaggagugcucuugcuauccucgauauccuggugucagaugugucugcagagacaacuggaaaggcuccaauaggcccaucguagauauaaacauaaaggaucauagcauuguuuccaguuauguguguucaggacuuguuggagacacacccagaaaaaacgacagcuccagcaguagccauuguuuggauccuaacaaugaagaagguggucauggagugaaaggcugggccuuugaugauggaaaugauguguggaugggaagaacgaucaacgagacgucacguuuaggguaugaaaccuucaaagucauugaaggcugguccaacccuaaguccaaauugcagauaaauaggcaagucauaguugacagagguaauagguccgguuauucugguauuuucucuguugaaggcaaaagcugcaucaaucggugcuuuuauguggaguugauuaggggaagaaaagaggaaacugaagucuuguggaccucaaacaguauuguuguguuuuguggcaccucagguacauauggaacaggcucauggccugauggggcggaccucaaucucaugccuauauaa

SEQ ID NO: 54152 - RNA, 1410 nt, Artificial Sequence
  derived and/or modified CDS sequence (wt) from neuraminidase__InfluenzaA__AFH00827
augaauccaaaucaaaagauaauaacgauuggcucuguuucucucaccauuuccacaacaugcuucuucaugcaaauugccaucuugauaacuacuguaacauugcauuucaagcaauaugaauucaacucccccccaaacaaccaagugaugcugugugaaccaacaauaauagaaagaaacaugacagagauaguguaucugaccaacaccaccauagagaaggaaauaugccccaaaccagcagaauacagaaauuggucaaaaccgcaaugugacauuacaggauuugcaccuuuuucuaaggacaauucgauuaggcuuuccgcugguggggacaucugggugacaagagaaccuuaugugucaugcgauccugacaaguguuaucaauuugcccuuggacagggaacaacacuaaacaacgugcauucaaauaacacaguacgugauaggaccccuuaucggacucuauugaugaaugaguuagguguuccuuuucaucuggggaccaagcaagugugcauagcaugguccagcucaaguugucacgauggaaaagcauggcugcauguuuguauaacgggggaugauaaaaaugcaacugcuagcuucauuuacaaugggaggcuuguagauaguguuguuucaugguccaaagaaauucucaggacccaggagucagaaugcguuuguaucaauggaacuuguacaguaguaaugacugauggaagugcuucaggaaaagcugauacuaaaauacuauucauugaggaggggaaaaucguucauacuagcacauugucaggaagugcucagcaugucgaggagugcucuugcuauccucgauauccugguguaagaugugucugcagagacaacuggaaaggcuccaauaggcccaucguagauauaaacauaaaggaucauagcauuguuuccaguuauguguguucaggacuuguuggagacacacccagaaaaaacgacagcuccagcaguagccauuguuuggauccuaacaaugaagaagguggucauggagugaaaggcugggccuuugaugauggaaaugacguguggaugggaagaacaaucaacgagacgucacgcuuaggguaugaaaccuucaaagucauugaaggcugguccaacccuaaguccaaauugcagauaaauaggcaagucauaguugacagaggugauagguccgguuauucugguauuuucucuguugaaggaaaaagcugcaucaaucggugcuuuuauguggaguugauuaggggaagaaaagaggaaacugaagucuuguggaccucaaacaguauuguuguguuuuguggcaccucagguacauauggaacaggcucauggccugauggggcggaccucaaucucaugccuuuauaa

SEQ ID NO: 54153 - RNA, 1410 nt, Artificial Sequence; identical to SEQ ID NO: 47942
  derived and/or modified CDS sequence (wt) from neuraminidase__InfluenzaA__AFH01410

SEQ ID NO: 54154 - RNA, 1410 nt, Artificial Sequence
  derived and/or modified CDS sequence (wt) from neuraminidase__InfluenzaA__AFH34942
augaauccaaaucaaaagauaauaacgauuggcucuguuucucucaccauuuccacaauaugcuucuucaugcaaauugccaucuugauaacuacuguaacauugcauuucaagcaauaugaauucaacucccccccaaacaaccaagugaugcugugugaaccaaaaauaauagaaagaaacauaacagagauaguguaucugaccaacaccaccauagagaaggaaauaugccccaaaccagcagaauacagaaauuggucaaaaccgcaaugugacauuacaggauuugcaccuuuuucuaaggacaauucgauuaggcuuuccgcugguggggacaucugggugacaagagaaccuuaugugucaugcgauccugacaaguguuaucaauuugcccuuggacagggaacaacacuaaacaaugugcauucaaauaacacaguacguaauaggaccccuuaucggacuuuauugaugaaugaguuagguguuccuuuucaucuggggaccaagcaaguaugcauagcaugguccagcucaaguugucacgauggaaaagcauggcugcauguuuguauaacgggggaugauaaaaaugcaacugcuagcuucauuuacaaugggaagcuuguagauaguguuguuucaugguccaaagaaauucucaggacccaggagucagaaugcguuuguaucaauggaacuuguacaguaguaaugacugauggaagugcuucaggaaaagcugauacuaaaauacuauucauugaggaggggaaaaucguucauacuagcacauugucaggaagugcucagcaugucgaggagugcucuugcuauccucgauauccuggugucagaugugucugcagagacaacuggaaaggcuccaauaggcccaucguagauauaaacauaaaggaucauagcauugucuccaguuauguguguucaggacuuguuggagacacacccagaaaaaacgacagcuccagcaguagccauuguuuggauccuaacaaugaagaagguggucauggagugaaaggcugggccuuugaugauggaaaugacguguggaugggaagaacaaucaacgagacgucacgcuuaggguaugaaaccuucaaagucauugaaggcugguccaacccuaaguccaaauugcagauaaauaggcaagucauaguugacagaggugauagguccgguuauucugguauuuucucuguugaaggcaaaagcugcaucaaucggugcuuuuauguggaguugauuaggggaagaaaagaggaaacugaagucuuguggaccucaaacaguauuguuguguuuuguggcaccucagguacauauggaacaggcucauggccugauggggcggaccucaaucucaugccuauauaa

SEQ ID NO: 54155 - RNA, 1410 nt, Artificial Sequence
  derived and/or modified CDS sequence (wt) from neuraminidase__InfluenzaA__AFH34956
augaauccaaaucaaaagauaauaacgauuggcucuguuucucucaccauuuccacaauaugcuucuucaugcaaauugccaucuugauaaccacuguaacauugcauuucaagcaauaugaauucaacucccccccaaacaaccaagugaugcugugugaaccaacaauaauagaaagaaacauaacagagauaguguaucugaccaacaccaccauagagaaggaaauaugccccaaaccagcagaauacagaaauuggucaaaaccgcaaugugacauuacaggauuugcaccuuuuucuaaggacaauucgauuaggcuuuccgcugguggggacaucugggugacaagagaaccuuaugugucaugcgauccugacaaguguuaucaauuugcccuuggacagggaacaacacuaaacaaugugcauucaaauaacacaguacgugguaggaccccuuaucggacuuuauugaugaaugaguuagguguuccuuuucaucuggggaccaagcaagugugcauagcaugguccagcucaaguugucacgauggaaaagcauggcugcauguuuguauaacgggggaugauaaaaaugcaacugcuagcuucauuuacaaugggaggcuuguagauaguguuguuucaugguccaaagaaauucucaggacccaggagucagaaugcguuuguaucaauggaacuuguacaguaguaaugacugauggaagugcuucaggaaaagcugauacuaaaauacuauucauugaggaggggaaaaucguucauacuagcacauugucaggaagugcucagcaugucgaggagugcucuugcuauccucgauauccuggugucagaugugucugcagagacaacuggaaaggcuccaauaggcccaucguagauauaaacauaaaggaucauagcauugucuccaguuauguguguucaggacuuguuggagacacacccagaaaaaacgacagcuccagcaguagccauuguuuggauccuaacaaugaagaagguggucauggagugaaaggcugggccuuugaugauggaaaugacguguggaugggaagaacaaucaacgagacgucacgcuuaggguaugaaaccuucaaagucauugaaggcugguccaacccuaaguccaaauugcagauaaauaggcaagucauaguugacagaggugauagguccgguuauucugguauuuucucuguugaaggcaaaagcugcaucaaucggugcuuuuauguggaguugauuaggggaagaaaagaggaaaaugaagucuuguggaccucaaacaguauuguuguguuuuguggcaccucagguacauauggaacaggcucauggccugauggggcggaccucaaucucaugccuauauaa

SEQ ID NO: 54156 - RNA, 1410 nt, Artificial Sequence
  derived and/or modified CDS sequence (wt) from neuraminidase__InfluenzaA__AFH34963
augaauccaaaucaaaagauaauaacgauuggcucuguuucucucaccauuuccacaauaugcuucuucaugcaaauugccaucuugauaaccacuguaacauugcauuucaagcaauaugaauucaacucccccccaaacaaccaagugaugcugugugaaccaacaauaauagaaagaaacauaacagagauaguguaucugaccaacaccaccauagagaaggaaauaugccccaaaccagcagaauacagaaauuggucaaaaccgcaaugugacauuacaggauuugcaccuuuuucuaaggacaauucgauuaggcuuuccgcugguggggacaucugggugacaagagaaccuuaugugucaugcgauccugacaaguguuaucaauuugcccuuggacagggaacaacacuaaacaaugugcauucaaauaacauaguacgugauaggaccccuuaucggacuuuauugaugaaugaguuagguguuccuuuucaucuggggaccaagcaagugugcauagcaugguccagcucaaguugucacgauggaaaagcauggcugcauguuuguauaacgggggaugauaaaaaugcaacugcuagcuucauuuacaaugggaggcuuguagauaguguuguuucaugguccaaagaaauucucaggacccaggagucagaaugcguuuguaucaauggaacuuguacaguaguaaugacugauggaagugcuucaggaaaagcugauacuaaaauacuauucauugaggaggggaaaaucguucauacuagcacauugucaggaagugcucagcaugucgaggagugcucuugcuauccucgauauccuggugucagaugugucugcagagacaacuggaaaggcuccaauaggcccaucguagauauaaacauaaaggaucauagcauugucuccaguuauguguguucaggacuuguuggagacacacccagaaaaaacgacagcuccagcaguagccauuguuuggauccuaacaaugaagaagguggucauggagugaaaggcugggccuuugaugauggaaaugacguguggaugggaagaacaaucaacgagacgucacgcuuaggguaugaaaccuucaaagucauugaaggcugguccaacccuaaguccaaauugcagauaaauaggcaagucauaguugacagaggugauagguccgguuauucugguauuuucucuguugaaggcaaaagcugcaucaaucggugcuuuuauguggaguugauuaggggaagaaaagaggaaaaugaagucuuguggaccucaaacaguauuguuguguuuuguggcaccucagguacauauggaacaggcucauggccugauggggcggaccucaaucucaugccuauauaa

SEQ ID NO: 54157 - RNA, 1410 nt, Artificial Sequence
  derived and/or modified CDS sequence (wt) from neuraminidase__InfluenzaA__AFH34970
augaauccaaaucaaaagauaauaacgauuggcucuguuucucucaccauuuccacaauaugcuucuucaugcaaauugccaucuugauaacuacuguaacauugcauuucaagcaauaugaauucaacucccccccaaacaaccaagugaugcuguaugaaccaacaauaauagaaagaaacauaacagagauaguguaucugaccaacaccaccauagagaaggaaauaugccccaaaccagcagaauacagaaauuggucaaaaccgcaaugugacauuacaggauuugcaccuuuuucuaaggacaauucgauuaggcuuuccgcugguggggacaucugggugacaagagaaccuuaugugucaugcgauccugacaaguguuaucaauuugcccuuggacagggaacaacacuaaacaaugugcauucaaauaacacaguacgugauaggaccccuuaucggacuuuauugaugaaugaguuagguguuccuuuucaucuggggaccaagcaagugugcauagcaugguccagcucaaguugucacgauggaaaagcauggcugcauguuuguauaacgggggaugauaaaaaugcaacugcuagcuucauuuacaaugggaggcuuguagauaguguuguuucaugguccaaagaaauucucaggacccaggagucagaaugcguuuguaucaauggaacuuguacaguaguaaugacugauggaagugcuucaggaaaagcugauacuaaaauacuauucauugaggaggggaaaaucguucauacuagcacauugucaggaagugcucagcaugucgaggagugcucuugcuauccucgauauccuggugucagaugugucugcagagacaacuggaaaggcuccaauaggcccaucguagauauaaacauaaaggaucauagcauugucuccaguuauguguguucaggacuuguuggagacacacccagaaaaaacgacagcuccagcaguagccauuguuuggauccuaacaaugaagaagguggucauggagugaaaggcugggccuuugaugauggaaaugacguguggaugggaagaacaaucaacgagacgucacgcuuaggguaugaaaccuucaaagucauugaaggcugguccaacccuaaguccaaauugcagauaaauaggcaagucauaguugacagaggugauagguccgguuauucugguauuuucucuguugaaggcaaaagcugcaucaaucggugcuuuuauguggaguugauuaggggaagaaaagaggaaaaugaagucuuguggaccucaaacaguauuguuguguuuuguggcaccucagguacauauggaacaggcucauggccugauggggcggaccucaaucucaugccuauauaa

SEQ ID NO: 54158 - RNA, 1410 nt, Artificial Sequence
  derived and/or modified CDS sequence (wt) from neuraminidase__InfluenzaA__AFH34977
augaauccaaaucaaaagauaauaacgauuggcucuguuucucucaccauuuccacaauaugcuucuucaugcaaauugccaucuugauaacuacuguaacauugcauuucaagcaauaugaauucaacucccccccaaacaaccaagugaugcugugugaaccaacaauaauagaaagaaacauaacagagauaguguaucugaccaacaccaccauagagaaggaaauaugccccaaaccagcagaauacagaaauuggucaaaaccgcaauguggcauuacaggauuugcaccuuucucuaaggacaauucgauuaggcuuuccgcugguggggacaucugggugacaagagaaccuuaugugucaugcgauccugacaaguguuaucaauuugcccuuggacagggaacaacacuaaacaacgugcauucaaauaacacaguacgugauaggaccccuuaucggacucuauugaugaaugaguuggguguuccuuuucaucuggggaccaagcaagugugcauagcaugguccagcucaaguugucacgauggaaaagcauggcugcauguuuguauaacgggggaugauaaaaaugcaacugcuagcuucauuuacaaugggaggcuuguagauaguguuguuucaugguccaaagaaauucucaggacccaggagucagaaugcguuuguaucaauggaacuuguacaguaguaaugacugauggaagugcuucaggaaaagcugauacuaaaauacuauucauugaggaggggaaaaucguucauacuagcacauugucaggaagugcucagcaugucgaagagugcucuugcuauccucgauauccuggugucagaugugucugcagagacaacuggaaaggcuccaauaggcccaucguagauauaaacauaaaggaucauagcauuguuuccaguuauguguguucaggacuuguuggagacacacccagaaaaaacgacagcuccagcaguagccauuguuuggauccuaacaaugaagaagguggucauggagugaaaggcugggccuuugaugauggaaaugacguguggaugggaagaacaaucaacgagacgucacgcuuaggguaugaaaccuucaaagucauugaaggcugguccaacccuaaguccaaauugcagauaaauaggcaagucauaguugacagaggugauagguccgguuauucugguauuuucucuguugaaggcaaaagcugcaucaaucggugcuuuuauguggaguugauuaggggaaggaaagaggaaacugaagucuuguggaccucaaacaguauuguuguguuuuguggcaccucagguacauauggaacaggcucauggccugauggggcggaccucaaucucaugccuauauaa

SEQ ID NO: 54159 - RNA, 1410 nt, Artificial Sequence
  derived and/or modified CDS sequence (wt) from neuraminidase__InfluenzaA__AFH74468
augaauccaaaucaaaagauaauaacgauuggcucuguuucucucaccauuuccacaauaugcuucuucaugcaaaccgccauccugauaacuacuguaacauugcauuucaagcaaugugaauucaacucccccccaaacaaccaagugaugcugugugaaccaacaauaauagaaagaaacauaacagagauaguguaucugaccaacaccaccauagagaaggaaauaugccccaaacuagcagaauacagaaauuggucaaagccgcaaugugacauuacaggauuugcaccuuuuucuaaggacaauucgauuaggcuuuccgcugguggggacaucugggugacaagagaaccuuaugugucaugcgauccugacaaguguuaucaauuugcccuuggacagggaacaacacuaaacaacgugcauucaaauaacacaguacgugauaggaccccuuaucggacucuauugaugaaugaguuagguguuccuuuucaucuggggaccaagcaagugugcauagcaugguccagcucaaguugucacgauggaaaagcauggcugcauguuuguauaacgggggaugauaaaaaugcaacugcuagcuucauuuacaaugggaggcuuguagauaguguuguuucaugguccaaagaaauccucaggacccaggagucagaaugcguuuguaucaauggaacuuguacaguaguaaugacugaugggagugcuucaggaaaagcugauacuaaaauacuauucauugaggaggggagaaucguucauacuagcacauugucaggaagugcucagcaugucgaggagugcuccugcuauccucgauauccuggugucagaugugucugcagagacaacuggaaaggcuccaauaggcccaucguagauauaaacauaaaggaucauagcauuguuuccaguuauguguguucaggacuuguuggagacacacccagaaaaaacgacagcuccagcaguagccauuguuuggauccuaacaaugaagaaggugauaauggagugaaaggcugggccuuugaugauggaaaugacguguggaugggaagaacgaucagcgagaaaucacgcuuaggguaugaaaccuucaaagucauugaaggcugguccaacccuaaguccaaauugcagauaaauaggcaagucauaguugacagagguaauagguccgguuauucugguauuuucucuguugaaggcaaaagcugcaucaaucggugcuuuuauguggaauugauaaggggaaggaaagaggaaacugaagucuuguggaccucaaacaguauuguuguguuuuguggcaccucagguacauauggaacaggcucauggccugauggggcggacaucaaucucaugccuauauaa

SEQ ID NO: 54160 - RNA, 1410 nt, Artificial Sequence; identical to SEQ ID NO: 53863
  derived and/or modified CDS sequence (wt) from neuraminidase__InfluenzaA__AFH74469

SEQ ID NO: 54161 - RNA, 1410 nt, Artificial Sequence; identical to SEQ ID NO: 53643
  derived and/or modified CDS sequence (wt) from neuraminidase__InfluenzaA__AFH74480

SEQ ID NO: 54162 - RNA, 1410 nt, Artificial Sequence; identical to SEQ ID NO: 53644
  derived and/or modified CDS sequence (wt) from neuraminidase__InfluenzaA__AFH74491

SEQ ID NO: 54163 - RNA, 1410 nt, Artificial Sequence
  derived and/or modified CDS sequence (wt) from neuraminidase__InfluenzaA__AFH74502
augaauccaaaucaaaagauaauaacgauuggcucuguuucucucaccauuuccacaauaugcuucuucaugcaaaccgccauccugauaacuacuguaacauugcauuucaagcaaugugaauucaacucccccccaaacaaccaagugaugcugugugaaccaacaauaauagaaagaaacauaacagagauaguguaucugaccaacaccaccauagagaaggaaauaugccccaaacuagcagaauacagaaauuggucaaagccgcaaugugacauuacaggauuugcaccuuuuucuaaggacaauucgauuaggcuuuccgcugguggggacaucugggugacaagagaaccuuaugugucaugcgauccugacaaguguuaucaauuugcccuuggacagggaacaacacuaaacaacgugcauucaaauaacacaguacgugauaggaccccuuaucggacucuauugaugaaugaguuagguguuccuuuucaucuggggaccaagcaagugugcauagcaugguccagcucaaguugucaugauggaaaagcauggcugcauguuuguauaacgggggaugauaaaaaugcaacugcuagcuucauuuacaaugggaggcuuguagauaguguuguuucaugguccaaagaaauccucaggacccaggagucagaaugcguuuguaucaauggaacuuguacaguaguaaugacugaugggagugcuucagggaaagcugauacuaaaauacuauucauugaggaggggaaaaucguucauacuagcacauugucaggaagugcucagcaugucgaggagugcuccugcuauccucgauauccuggugucagaugugucugcagagacaacuggaaaggcuccaauaggcccaucguagauauaaacauaaaggaucauagcauuguuuccaguuauguguguucaggacuuguuggagacacacccagaaaaaacgacagcuccagcaguagccauuguuuggauccuaacaaugaagaaggugguaauggagugaaaggcugggccuuugaugauggaaaugacguguggaugggaagaacgaucagcgagaaaucacgcuuaggguaugaaaccuucaaagucauugaaggcugguccaacccuaaguccaaauugcagauaaauaggcaagucauaguugacagagguaauagguccgguuauucugguauuuucucuguugaaggcaaaagcugcaucaaucggugcuuuuauguggaauugauaaggggaaggaaagaggaaacugaagucuuguggaccucaaacaguauuguuguguuuuguggcaccucagguacauauggaacaggcucauggccugauggggcggacaucaaucucaugccuauauaa

SEQ ID NO: 54164 - RNA, 1410 nt, Artificial Sequence
  derived and/or modified CDS sequence (wt) from neuraminidase__InfluenzaA__AFH74513
augaauccaaaucaaaagauaauaacgauuggcucuguuucucucaccauuuccacaauaugcuucuucaugcaaauugccaucuugauaacuacuguaacauugcauuucaagcaauaugaauucaacucccccccaaacaaccaagugaugcugugugaaccaacaauaauagaaagaaacauaacagagauaguguaucugaccaacaccaccauagagaaggaaacaugccccaaacuagcagaauacagaaauuggucaaagccgcaaugugacauuacaggguuugcaccuuuuucuaaggacaauucgauuaggcuuuccgcugguggggacaucugggugacaagagaaccuuaugugucaugcgauccugacaaguguuaucaauuugcccuuggacagggaacaacacuaaacaacguacauucaaauaacacaguacgugauaggaccccuuaucggacccuauugaugaaugaguuagguguuccuuuucaucuggggaccaagcaagugugcauagcaugguccagcucaaguugucacgauggaaaagcauggcugcauguuuguauaacgggggaugauaaaaaugcaacugcuagcuucauuuacaaugggaggcuuguagauaguguuguuucaugguccaaagaaauccucaggacccaggagucagaaugcguuuguaucaauggaacuuguacaguaguaaugacugaugggagugcuucaggaaaagcugauacuaaaauauuauucauugaggagggaaaaaucguucauacuagcacauugucaggaagugcucagcaugucgaggagugcuccugcuauccucgauauccuggugucagaugugucugcagagacaacuggaaaggauccaauaggcccaucguagauauaaacauaaaggaucauagcauugucuccaguuauguguguucaggacuuguuggagacacacccagaaaaaacgacagcuccagcaguagccauuguuuggauccuaacaaugaggaagguggucauggggugaaaggcugggccuuugaugauggaaaugacguguggaugggaagaacgaucagcgagaagucacgcuuaggguaugaaaccuucaaagucauugaaggcugguccaacccuaaguccaaauugcagauaaauaggcaagucauaguugacagagguaauagguccgguuauucugguauuuucucuguugaaggcaaaagcugcaucaaucggugcuuuuauguggaguugauaaggggaagaaaagaggaaacugaagucuuguggaccucaaacaguauuguuguguuuuguggcaccucagguacauauggaacaggcucauggccugauggggcggacaucaaucucaugccuguauaa

SEQ ID NO: 54165 - RNA, 1410 nt, Artificial Sequence
  derived and/or modified CDS sequence (wt) from neuraminidase__InfluenzaA__AFH74524
augaauccaaaccaaaagauaauaacgauuggcucuguuucucucaccauuuccacaauaugcuucuucaugcaaauugccaucuugauaacuacuguaacauugcauuucaagcaauaugaauucaacucccccccaaacaaccaagugaugcugugugaaccaacaauaauagaaagaaacauaacagagauaguguaucugaccaacaccaccauagagaaggaaauaugccccaaacuagcagaauacagaaauuggucaaagccgcaaugugacauuacaggauuugcaccuuuuucuaaggacaauucgauuaggcuuuccgcugguggggacaucugggugacaagagaaccuuaugugucaugcgauccugacaaguguuaucaauuugcucuuggacaaggaacaacaauaaacaacgugcauucaaauaacacaguacgugauaggaccccuuaucggacccuauugaugaaugaguuagguguuccuuuucaucuggggaccaagcaagugugcauagcaugguccagcucaaguugucacgauggaaaagcauggcugcauguuuguauaacgggggaugauaaaaaugcaacugcuagcuucauuuacaaugggaggcuuguagauaguguuguuucaugguccaaagaaauccucaggacccaggagucagaaugcguuuguaucaauggaacuuguacaguaguaaugacugaugggagugcuucaggaaaagcugauacuaaaauacuauucauugaggaggggaaaaucguucauacuagcacuuugucaggaagugcucagcaugucgaggagugcuccugcuauccucgauauccuggugucagaugcgucugcagagacaacuggaaaggcuccaauaggcccaucguagauauaaacaugaaggaucauagcauuguuuccaguuauguguguucaggacuuguuggagacacacccagaaaaaacgacagcuccagcaguagccauuguuuggauccuaacaaugaagaagguggucauggagugaaaggcugggccuuugaugauggaaaugacguguggaugggaagaacgaucagcgagaagucacgcuuaggguaugaaaccuucaaagucauugaaggcugguccaacccuaaguccaaauugcagauaaauaggcaagucauaguugacagagguaauagguccgguuauucuggcauuuucucuguugaaggcaaaagcugcaucaaucggugcuuuuauguggaguugauaaggggaagaaaagaggaaacugaaguuuuguggaccucaaacaguguuguuguguuuuguggcaccucagguacauauggaacaggcucauggccugauggggcggacaucaaucucaugccuauauaa

SEQ ID NO: 54166 - RNA, 1410 nt, Artificial Sequence; identical to SEQ ID NO: 52921
  derived and/or modified CDS sequence (wt) from neuraminidase__InfluenzaA__AFH74535

SEQ ID NO: 54167 - RNA, 1410 nt, Artificial Sequence; identical to SEQ ID NO: 53647
  derived and/or modified CDS sequence (wt) from neuraminidase__InfluenzaA__AFH74546

SEQ ID NO: 54168 - RNA, 1410 nt, Artificial Sequence; identical to SEQ ID NO: 53647
  derived and/or modified CDS sequence (wt) from neuraminidase__InfluenzaA__AFH74557

SEQ ID NO: 54169 - RNA, 1410 nt, Artificial Sequence; identical to SEQ ID NO: 53647
  derived and/or modified CDS sequence (wt) from neuraminidase__InfluenzaA__AFH74568

SEQ ID NO: 54170 - RNA, 1410 nt, Artificial Sequence; identical to SEQ ID NO: 53650
  derived and/or modified CDS sequence (wt) from neuraminidase__InfluenzaA__AFH74579

SEQ ID NO: 54171 - RNA, 1410 nt, Artificial Sequence
  derived and/or modified CDS sequence (wt) from neuraminidase__InfluenzaA__AFH74590
augaauccaaaucaaaagauaauaacgauuggcucuguuucucucaccauuuccacaauaugcuucuucaugcaaauugccaucuugauaacuacuguaacauugcauuucaagcaauaugaauucaacucccccccaaacaaccaagugaugcugugugaaccaacaauaauagaaagaaacauaacagagauaguguaucugaccaacaccaccauagagaaggaaauaugccccaaacuagcagaauacagaaauuggucaaagccgcaaugugacauuacaggguuugcaccuuuuucuaaggacaauucgauuaggcuuuccgcugguggggacaucugggugacaagagaaccuuaugugucaugcgauccugacaaguguuaucaauuugcccuuggacagggaacaacacuaaacaacguacauucaaauaacacaguacgugauaggaccccuuaucggacccuauugaugaaugaguuagguguuccuuuucaucuggggaccaagcaagugugcauagcaugguccagcucaaguugucacgauggaaaagcauggcugcauguuuguauaacgggggaugauaaaaaugcaacugcuagcuucauuuacaaugggaggcuuguagauaguguuguuucaugguccaaagaaauccucaggacccaggagucagaaugcguuuguaucaauggaacuuguacaguaguaaugacugaugggagugcuucaggaaaagcugauacuaaaauauuauucauugaggagggaaaaaucguucauacuagcacauugucaggaagugcucagcaugucgaggagugcuccugcuauccucgauauccuggugucagaugugucugcagagacaacuggaaaggauccaauaggcccaucguagauauaaacauaaaggaucauagcauugucuccaguuauguguguucaggacuuguuggagacacacccagaaaaaacgacagcuccagcaguagccauuguuuggauccuaacaaugaggaagguggucauggggugaaaggcugggccuuugaugauggaaaugacguguggaugggaagaacgaucagcgagaagucacgcuuaggguaugaaaccuucaaagucauugaaggcugguccaacccuaaguccaaacugcagauaaauaggcaagucauaguugacagagguaauagguccgguuauucugguauuuucucuguugaaggcaaaagcugcaucaaucggugcuuuuauguggaguugauaaggggaagaaaagaggaaacugaagucuuguggaccucaaacaguauuguuguguuuuguggcaccucagguacauauggaacaggcucauggccugauggggcggacaucaaucucaugucuguauaa

SEQ ID NO: 54172 - RNA, 1410 nt, Artificial Sequence; identical to SEQ ID NO: 53651
  derived and/or modified CDS sequence (wt) from neuraminidase__InfluenzaA__AFH74601

SEQ ID NO: 54173 - RNA, 1410 nt, Artificial Sequence
  derived and/or modified CDS sequence (wt) from neuraminidase__InfluenzaA__AFH74612
augaauccaaaucaaaagauaauaacgauuggcucuguuucucucaccauuuccacaauaugcuucuucaugcaaaccgccauccugauaacuacuguaacauugcauuucaagcaaugugaauucaacucccccccaaacaaccaagugaugcugugugaaccaacaauaauagaaagaaacauaacagagauaguguaucugaccaacaccaccauagagaaggaaauaugccccaaacuagcagaauacagaaauuggucaaagccgcaaugugacauuacaggauuugcaccuuuuucuaaggacaauucgauuaggcuuuccgcugguggggacaucugggugacaagagaaccuuaugugucaugcgauccugacaaguguuaucaauuugcccuuggacagggaacaacacuaagcaacgugcauucaaauaacacaguacgugauaggaccccuuaucggacucuauugaugaaugaguuagguguuccuuuucaucuggggaccaagcaagugugcauagcaugguccagcucaaguugucacgauggaaaagcauggcugcauguuuguauaacgggggaugauaaaaaugcaacugcuagcuucauuuacaaugggaggcuuguagauaguguuguuucaugguccaaagaaauccucagaacccaggagucagaaugcguuuguaucaauggaacuuguacaguaguaaugacugaugggagugcuucaggaaaagcugauacuaaaauacuauucauugaggaggggaaaaucguucauacuagcacauugucaggaagugcucagcaugucgaggagugcuccugcuauccucgauauccuggugucagaugugucugcagagacaacuggaaaggcuccaauaggcccaucguagauauaaacauaaaggaucauagcauuguuuccaguuauguguguucaggacuuguuggagacacacccagaaaaaacgacagcuccagcaguagccauuguuuggauccuaacaaugaagaagguggucauggagugaaaggcugggccuuugaugauggaaaugacguguggaugggaagaacgaucagcgagaaaucacgcuuaggguaugaaaccuucaaagucauugaaggcugguccaacccuaaguccaaauugcagauaaauaggcaagucauaguugacagagguaauagguccgguuauucugguauuuucucuguugaaggcaaaagcugcaucaaucggugcuuuuauguggaguugauaaggggaaggaaagaggaaacugaagucuuguggaccucaaacaguauuguuguguuuuguggcaccucagguacauauggaacaggcucauggccugauggggcggacaucaaucucaugccuauauaa

SEQ ID NO: 54174 - RNA, 1410 nt, Artificial Sequence
  derived and/or modified CDS sequence (wt) from neuraminidase__InfluenzaA__AFH74623
augaauccaaaucaaaagauaauaacgauuggcucuguuucucucaccauuuccacaauaugcuucuucaugcaaauugccaucuugauaacuacuguaacauugcauuucaagcaauaugaauucaacucccccccaaacaaccaagugaugcugugugaaccaacaauaauagaaagaaacauaacagagauaguguaucugaccaacaccaccauagagaaggaaauaugccccaaacuagcagaauacagaaauuggucaaagccgcaaugugacauuacaggguuugcaccuuuuucuaaggacaauucgauuaggcuuuccgcugguggggacaucugggugacaagagaaccuuaugugucaugcgauccugacaaguguuaucaauuugcccuuggacagggaacaacacuaaacaacguacauucaaauaacacaguacgugauaggaccccuuaucggacccuauugaugaaugaguuagguguuccuuuucaucuggggaccaagcaagugugcauagcaugguccagcucaaguugucacgauggaaaagcauggcugcauguuuguauaacgggggaugauaaaaaugcaacugcuagcuucauuuacaaugggaggcuuguagauaguguuguuucaugguccaaagaaauccucaggacccaggagucagaaugcguuuguaucaauggaacuuguacaguaguaaugacugaugggagugcuucaggaaaagcugauacuaaaauauuauucauugaggagggaaaaaucguucauacuagcacauugucaggaagugcucagcaugucgaggagugcuccugcuauccucgauauccuggugucagaugugucugcagagacaacuggaaaggauccaauaggcccaucguagauauaaacauaaaggaucauagcauugucuccaguuauguguguucaggacuuguuggagacacacccagaaaaaacgacagcuccagcaguagccauuguuuggauccuaacaaugaggaagguggucauggggugaaaggcugggccuuugaugauggaaaugacguguggauggguagaacgaucagcgagaagucacgcuuaggguaugaaaccuucaaagucauugaaggcugguccaacccuaaguccaaacugcagauaaauaggcaagucauaguugacagagguaauagguccgguuauucugguauuuucucuguugaaggcaaaagcugcaucaaucggugcuuuuauguggaguugauaaggggaagaaaagaggaaacugaagucuuguggaccucaaacaguauuguuguguuuuguggcaccucagguacauauggaacaggcucauggccugauggggcggacaucaaucucaugccuguauaa

SEQ ID NO: 54175 - RNA, 1410 nt, Artificial Sequence; identical to SEQ ID NO: 53647
  derived and/or modified CDS sequence (wt) from neuraminidase__InfluenzaA__AFH74634

SEQ ID NO: 54176 - RNA, 1410 nt, Artificial Sequence; identical to SEQ ID NO: 53654
  derived and/or modified CDS sequence (wt) from neuraminidase__InfluenzaA__AFH74645

SEQ ID NO: 54177 - RNA, 1410 nt, Artificial Sequence; identical to SEQ ID NO: 53654
  derived and/or modified CDS sequence (wt) from neuraminidase__InfluenzaA__AFH74656

SEQ ID NO: 54178 - RNA, 1410 nt, Artificial Sequence; identical to SEQ ID NO: 53654
  derived and/or modified CDS sequence (wt) from neuraminidase__InfluenzaA__AFH74667

SEQ ID NO: 54179 - RNA, 1410 nt, Artificial Sequence; identical to SEQ ID NO: 53654
  derived and/or modified CDS sequence (wt) from neuraminidase__InfluenzaA__AFH74678

SEQ ID NO: 54180 - RNA, 1410 nt, Artificial Sequence; identical to SEQ ID NO: 52921
  derived and/or modified CDS sequence (wt) from neuraminidase__InfluenzaA__AFH74689

SEQ ID NO: 54181 - RNA, 1410 nt, Artificial Sequence; identical to SEQ ID NO: 52921
  derived and/or modified CDS sequence (wt) from neuraminidase__InfluenzaA__AFH74700

SEQ ID NO: 54182 - RNA, 1410 nt, Artificial Sequence
  derived and/or modified CDS sequence (wt) from neuraminidase__InfluenzaA__AFH74711
augaauccaaaucaaaagauaauaacgauuggcucuguuucucucaccauuuccacaauaugcuucuucaugcaaauugccaucuugauaacuacuguaacauugcauuucaagcaauaugaauucaacucccccccaaacaaccaagugaugcugugugaaccaacaauaauagaaagaaacauaacagagauaguguaucugaccaacaccaccauagagaaggaaauaugccccaaacuagcagaauacagaaauuggucaaagccgcaaugugacauuacaggguuugcaccuuuuucuaaggacaauucgauuaggcuuuccgcugguggggacaucugggugacaagagaaccuuaugugucaugcgauccugacaaguguuaucaauuugcccuuggacagggaacaacacuaaacaacguacauucaaauaacacaguacgugauaggaccccuuaucggacccuauugaugaaugaguuagguguuccuuuucaucuggggaccaagcaagugugcauagcaugguccagcucaaguugucacgauggaaaagcauggcugcauguuuguauaacgggggaugauaaaaaugcaacugcuagcuucauuuacaaugggaggcuuguagauaguguuguuucaugguccaaagaaauccucaggacccaggagucagaaugcguuuguaucaauggaacuuguacaguaguaaugacugaugggagugcuucaggaaaagcugauacuaaaauauuauucauugaggagggaaaaaucguucauacuagcacauugucaggaagugcucagcaugucgaggagugcuccugcuauccucgauauccuugugucagaugugucugcagagacaacuggaaaggauccaauaggcccaucguagauauaaacauaaaggaucauagcauugucuccaguuauguguguucaggacuuguuggagacacacccagaaaaaacgacagcuccagcaguagccauuguuuggauccuaacaaugaggaagguggucauggggugaaaggcugggccuuugaugauggaaaugacguguggaugggaagaacgaucagcgagaagucacgcuuaggguaugaaaccuucaaagucauugaaggcugguccaacccuaaguccaaauugcagauaaauaggcaagucauaguugacagagguaauagguccgguuauucugguauuuucucuguugaaggcaaaagcugcaucaaucggugcuuuuauguggaguugauaaggggaagaaaagaggaaacagaagucuuguggaccucaaacaguauuguuguguuuuguggcaccucagguacauauggaacaggcucauggccugauggggcggacaucaaucucaugccuguauaa

SEQ ID NO: 54183 - RNA, 1410 nt, Artificial Sequence; identical to SEQ ID NO: 53647
  derived and/or modified CDS sequence (wt) from neuraminidase__InfluenzaA__AFH74722

SEQ ID NO: 54184 - RNA, 1410 nt, Artificial Sequence; identical to SEQ ID NO: 53662
  derived and/or modified CDS sequence (wt) from neuraminidase__InfluenzaA__AFH74733

SEQ ID NO: 54185 - RNA, 1410 nt, Artificial Sequence
  derived and/or modified CDS sequence (wt) from neuraminidase__InfluenzaA__AFH74744
augaauccaaaucaaaagauaauaacgauuggcucuguuucucucaccauuuccacaauaugcuucuucaugcaaauugccaucuugauaacuacuguaacauugcauuucaagcaauaugaauucaacucccccccaaacaaccaagugaugcugugugaaccaacaauaauagaaagaaacauaacagagauaguguaucugaccaacaccaccauagagaaggaaauaugccccaaacuagcagaauacagaaauuggucaaagccgcaaugugacauuacaggguuugcaccuuuuucuaaggacaauucgauuaggcuuuccgcugguggggacaucugggugacaagagaaccuuaugugucaugcgauccugacaaguguuaucaauuugcccuuggacagggaacaacacuaaacaacguacauucaaauaacacaguacgugauaggaccccuuaucggacccuauugaugaaugaguuagguguuccuuuucaucuggggaccaagcaagugugcauagcaugguccagcucaaguugucacgauggaaaagcauggcugcauguuuguauaacgggggaugauaaaaaugcaacugcuagcuucauuuacaaugggaggcuuguagauaguguuguuucaugguccaaagaaauccucaggacccaggagucagaaugcguuuguaucaauggaacuuguacaguaguaaugacugaugggagugcuucaggaaaagcugauacuaaaauauuauucauugaggagggaaaaaucguucauacuagcacauugucaggaagugcucagcaugucgaggagugcuccugcuauccucgauauccuggugucagaugugucugcagagacaacuggaaaggauccaauaggcccaucguagauauaaacauaaaggaucauagcauugucuccaauuauguguguucaggacuuguuggagacacacccagaaaaaacgacagcuccagcaguagccauuguuuggauccuaacaaugaggaagguggucauggggugaaaggcugggccuuugaugauggaaaugacguguggaugggaagaacgaucagcgagaagucacgcuuaggguaugaaaccuucaaagucauugaaggcugguccaacccuaaguccaaauugcagauaaauaggcaagucauaguugacagagguaauagguccgguuauucugguauuuucucuguugaaggcaaaagcugcaucaaucggugcuuuuauguggaguugauaaggggaagaaaagaggaaacugaagucuuguggaccucaaacaguauuguuguguuuuguggcaccucagguacauauggaacaggcucauggccugauggggcggacaucaaucucaugccuguauaa

SEQ ID NO: 54186 - RNA, 1410 nt, Artificial Sequence; identical to SEQ ID NO: 53663
  derived and/or modified CDS sequence (wt) from neuraminidase__InfluenzaA__AFH74755

SEQ ID NO: 54187 - RNA, 1410 nt, Artificial Sequence; identical to SEQ ID NO: 53663
  derived and/or modified CDS sequence (wt) from neuraminidase__InfluenzaA__AFH74766

SEQ ID NO: 54188 - RNA, 1410 nt, Artificial Sequence; identical to SEQ ID NO: 53665
  derived and/or modified CDS sequence (wt) from neuraminidase__InfluenzaA__AFH74777

SEQ ID NO: 54189 - RNA, 1410 nt, Artificial Sequence; identical to SEQ ID NO: 52921
  derived and/or modified CDS sequence (wt) from neuraminidase__InfluenzaA__AFH74788

SEQ ID NO: 54190 - RNA, 1410 nt, Artificial Sequence
  derived and/or modified CDS sequence (wt) from neuraminidase__InfluenzaA__AFH74799
augaauccaaaucaaaagauaauaacgauuggcucuguuucucucaccauuuccacaauaugcuucuucaugcaaauugccaucuugauaacuacuguaacauugcauuucaagcaauaugaauucaacucccccccaaacaaccaagugaugcugugugaaccaacaauaauagaaagaaacauaacagagauaguguaucugaccaacaccaccauagagaaggaaauaugccccaaacuagcagaauacagaaauuggucaaagccgcaaugugacauuacaggguuugcaccuuuuucuaaggacaauucgauuaggcuuuccgcugguggggacaucugggugacaagagaaccuuaugugucaugcgguccugacaaguguuaucaauuugcccuuggacagggaacaacacuaaacaacguacauucaaauaacacaguacgugauaggaccccuuaucggacccuauugaugaaugaguuagguguuccuuuucaucuggggaccaagcaagugugcauagcaugguccagcucaaguugucacgauggaaaagcauggcugcauguuuguauaacgggggaugauaaaaaugcaacugcuagcuucauuuacaaugggaggcuuguagauaguguuguuucaugguccaaagaaauccucaggacccaggagucagaaugcguuuguaucaauggaacuuguacaguaguaaugacugaugggagugcuucaggaaaagcugauacuaaaauauuauucauugaggagggaaaaaucguucauacuagcacauugucaggaagugcucagcaugucgaggagugcuccugcuauccucgauauccuggugucagaugugucugcagagacaacuggaaaggauccaauaggcccaucguagauauaaacauaaaggaucauagcauugucuccaguuauguguguucaggacuuguuggagacacacccagaaaaaacgacagcuccagcaguagccauuguuuggauccuaacaaugaggaagguggucauggggugaaaggcugggccuuugaugauggaaaugacguguggaugggaagaacgaucagcgagaagucacgcuuaggguaugaaaccuucaaagucauugaaggcugguccaacccuaaguccaaauugcagauaaauaggcaagucauaguugacagagguaauagguccgguuauucugguauuuucucuguugaaggcaaaagcugcaucaaucggugcuuuuauguggaguugauaaggggaagaaaagaggaaacugaagucuuguggaccucaaacaguauuguuguguuuuguggcaccucagguacauauggaacaggcucauggccugauggggcggacaucaaucucaugccuguauaa

SEQ ID NO: 54191 - RNA, 1410 nt, Artificial Sequence; identical to SEQ ID NO: 53667
  derived and/or modified CDS sequence (wt) from neuraminidase__InfluenzaA__AFH74810

SEQ ID NO: 54192 - RNA, 1410 nt, Artificial Sequence; identical to SEQ ID NO: 53667
  derived and/or modified CDS sequence (wt) from neuraminidase__InfluenzaA__AFH74821

SEQ ID NO: 54193 - RNA, 1410 nt, Artificial Sequence; identical to SEQ ID NO: 53667
  derived and/or modified CDS sequence (wt) from neuraminidase__InfluenzaA__AFH74832

SEQ ID NO: 54194 - RNA, 1410 nt, Artificial Sequence; identical to SEQ ID NO: 53667
  derived and/or modified CDS sequence (wt) from neuraminidase__InfluenzaA__AFH74843

SEQ ID NO: 54195 - RNA, 1410 nt, Artificial Sequence; identical to SEQ ID NO: 53647
  derived and/or modified CDS sequence (wt) from neuraminidase__InfluenzaA__AFH74854

SEQ ID NO: 54196 - RNA, 1410 nt, Artificial Sequence; identical to SEQ ID NO: 53647
  derived and/or modified CDS sequence (wt) from neuraminidase__InfluenzaA__AFH74865

SEQ ID NO: 54197 - RNA, 1410 nt, Artificial Sequence; identical to SEQ ID NO: 53647
  derived and/or modified CDS sequence (wt) from neuraminidase__InfluenzaA__AFH74876

SEQ ID NO: 54198 - RNA, 1410 nt, Artificial Sequence; identical to SEQ ID NO: 53647
  derived and/or modified CDS sequence (wt) from neuraminidase__InfluenzaA__AFH74887

SEQ ID NO: 54199 - RNA, 1410 nt, Artificial Sequence; identical to SEQ ID NO: 53647
  derived and/or modified CDS sequence (wt) from neuraminidase__InfluenzaA__AFH74898

SEQ ID NO: 54200 - RNA, 1410 nt, Artificial Sequence; identical to SEQ ID NO: 53647
  derived and/or modified CDS sequence (wt) from neuraminidase__InfluenzaA__AFH74909

SEQ ID NO: 54201 - RNA, 1410 nt, Artificial Sequence
  derived and/or modified CDS sequence (wt) from neuraminidase__InfluenzaA__AFH74920
augaauccaaaucaaaagauaauaacgauuggcucuguuucucucaccauuuccacaauaugcuucuucaugcaaaccgccauccugauaacuacuguaacauugcauuucaagcaaugugaauucaacucccccccaaacaaccaagugaugcugugugaaccaacaauaauagaaagaaacauaacagagauaguguaucugaccaacaccaccauagagaaggaaauaugccccaaacuagcagaauacagaaauuggucaaagccgcaaugugacauuacaggauuugcaccuuuuucuaaggacaauucgauuaggcuuuccgcugguggggacaucugggugacaagagaaccuuaugugucaugcgauccugacaaguguuaucaauuugcccuuggacagggaacaacgcuaaacaacgugcauucaaauaacacaguacgugauaggaccccuuaucggacucuauugaugaaugaguuagguguuccuuuucaucuggggaccaagcaagugugcauagcaugguccagcucaaguugucacgauggaaaagcauggcugcauguuuguauaacgggggaugauaaaaaugcaacugcuagcuucauuuacaaugggaggcuuguagauaguguuguuucaugguccaaagaaauccucaggacccaggagucagaaugcguuuguaucaauggaacuuguacaguaguaaugacugaugggagugcuucaggaaaagcugauacuaaaauacuauucauugaggaggggaaaaucguucauacuagcacauugucaggaagugcucagcaugucgaggagugcuccugcuauccucgauauccuggugucagaugugucugcagagacaacuggaaaggcuccaauaggcccaucguagauauaaacauaaaggaucauagcauuguuuccaguuauguguguucaggacuuguuggagacacacccagaaaaaacgacagcuccagcaguagccauuguuuggauccuaacaaugaagaaggugaucauggagugaaaggcugggccuuugaugauggaaaugacguguggaugggaagaacgaucagcgagaaaucacgcuuaggguaugaaaccuucaaagucauugaaggcugguccaacccuaaguccaaauugcagauaaauaggcaagucauaguugacagagguaauagguccgguuauucugguauuuucucuguugaaggcaaaagcugcaucaaucggugcuuuuauguggaguugauaaggggaaggaaagaggaaacugaagucuuguggaccucaaacaguauuguuguguuuuguggcaccucagguacauauggaacaggcucauggccugauggggcggacaucaaucucaugccuauauaa

SEQ ID NO: 54202 - RNA, 1410 nt, Artificial Sequence; identical to SEQ ID NO: 51263
  derived and/or modified CDS sequence (wt) from neuraminidase__InfluenzaA__AFH74931

SEQ ID NO: 54203 - RNA, 1410 nt, Artificial Sequence; identical to SEQ ID NO: 51263
  derived and/or modified CDS sequence (wt) from neuraminidase__InfluenzaA__AFH74942

SEQ ID NO: 54204 - RNA, 1410 nt, Artificial Sequence; identical to SEQ ID NO: 53647
  derived and/or modified CDS sequence (wt) from neuraminidase__InfluenzaA__AFH74953

SEQ ID NO: 54205 - RNA, 1410 nt, Artificial Sequence
  derived and/or modified CDS sequence (wt) from neuraminidase__InfluenzaA__AFH74964
augaauccaaaucaaaagauaauaacgauuggcucuguuucucucaccauuuccacaauaugcuucuucaugcaaauugccaucuugauaacuacuguaacauugcauuucaagcaauaugaauucaacucccccccaaacaaccaagugaugcugugugaaccaacaauaauagaaagaaacauaacagagauaguguaucugaccaacaccaccauagagaaggaaauaugccccaaacuagcagaauacagaaauuggucaaagccgcaaugugacauuacaggguuugcaccuuuuucuaaggacaauucgauuaggcuuuccgcugguggggacaucugggugacaagagaaccuuaugugucaugcgauccugacaaguguuaucaauuugcccuuggacagggaacaacacuaaacaacguacauucaaauaacacaguacgugauaggaccccuuaucggacccuauugaugaaugaguuagguguuccuuuucaucuggggaccaagcaagugugcauagcaugguccagcucaaguugucacgauggaaaagcauggcugcauguuuguauaacgggggaugauaaaaaugcaacugcuagcuucauuuacaaugggaggcuuguagauaguguuguuucaugguccaaagaaauccucaggacccaggagucagaaugcguuuguaucaauggaacuuguacaguaguaaugacugaugggagugcuucaggaaaagcugauacuaaaauauuauucauugaggagggaaaaaucguucauacuagcauauugucaggaagugcucagcaugucgaggagugcuccugcuauccucgauauccuggugucagaugugucugcagagacaacuggaaaggauccaauaggcccaucguagauauaaacauaaaggaucauagcauugucuccaguuauguguguucaggacuuguuggagacacacccagaaaaaacgacagcuccagcaguagccauuguuuggauccuaacaaugaggaagguggucauggggugaaaggcugggccuuugaugauggaaaugacguguggaugggaagaacgaucagcgagaagucacgcuuaggguaugaaaccuucaaagucauugaaggcugguccaacccuaaguccaaauugcagauaaauaggcaagucauaguugacagagguaauagguccgguuauucugguauuuucucuguugaaggcaaaagcugcaucaaucggugcuuuuauguggaguugauaaggggaagaaaagaggaaacugaagucuuguggaccucaaacaguauuguuguguuuuguggcaccucagguacauauggaacaggcucauggccugauggggcggacaucaaucucaugccuguauaa

SEQ ID NO: 54206 - RNA, 1410 nt, Artificial Sequence; identical to SEQ ID NO: 53647
  derived and/or modified CDS sequence (wt) from neuraminidase__InfluenzaA__AFH75391

SEQ ID NO: 54207 - RNA, 1410 nt, Artificial Sequence; identical to SEQ ID NO: 51897
  derived and/or modified CDS sequence (wt) from neuraminidase__InfluenzaA__AFH97143

SEQ ID NO: 54208 - RNA, 1410 nt, Artificial Sequence
  derived and/or modified CDS sequence (wt) from neuraminidase__InfluenzaA__AFI56407
augaauccaaaccaaaagauaauaaccauugguucggucuguaugacaauuggaauggcuaacuuaauauuacaaauuggaaacauaaucucaauauggauuagucacucaauucaacuugggaaucaaaaucagauugaaacaugcaaucaaagcgucauuacuuaugaaaacaacacuuggguaaaucagacauauguuaacaucagcaacaccaacuuugcugcuggacagucagugguuuccgugaaauuagcgggcaauuccucucucugcccuguuaguggaugggcuauauacaguaaagacaacaguauaagaaucgguuccaaggggaauguguuugucauaagggaaccauucauaucaugcucccccuuggaaugcaggaccuucuucuugacucaaggggccuugcuaaaugacaaacauuccaauggaaccauuaaagacaggagcccauaucgaaccuuaaugagcuguccuauuggugaaguucccucuccauacaacucaagauuugagucagucgcuuggucagcaagugcuugucaugauggcaucaauuggcuaacaauuggaauuucuggcccagacaauggggcaguggcuguguuaaaguacaacggcauaauaacagacacuaucaagaguuggagaaacaauauauugagaacacaagagucugaaugugcauguguaaaugguucuugcuuuaccauaaugaccgauggaccaagugauggacaggccucauacaagaucuucagaauagaaaagggaaagauagucaaaucagucgaaaugaaugccccuaauuaucacuaugaggaaugcuccuguuauccugauucuagugaaaucacaugugugugcagggauaacuggcauggcucgaaucgaccgugggugucuuucaaccagaaucuggaauaucagauaggauacauaugcagugggauuuucggagacaauccacgcccuaaugauaagacaggcaguugugguccaguaucgucuaauggagcaaauggaguaaaaggauuuucauucaaauacggcaaugguguuuggauagggagaacuaaaagcauuaguucaagaaaagguuuugagaugauuugggauccaaacggauggacugggacagacaauagcuucucaauaaagcaagauaucguaggaauaaaugaguggucaggauauagcgggaguuuuguucagcauccagaacuaacagggcuggacuguauaagaccuugcuucuggguugaacuaaucagagggcgacccaaagagaacacaaucuggacuagcgggagcagcauauccuuuugugguguaaacaguggcacuguggguuggucuuggccagacggugcugaguugccauuuaccauugacaaguaa

SEQ ID NO: 54209 - RNA, 1410 nt, Artificial Sequence
  derived and/or modified CDS sequence (wt) from neuraminidase__InfluenzaA__AFJ05141
augaauccaaaucaaaagauaauaacgauuggcucuguuucucucaccauuuccacaauaugcuucuucaugcaaauugccaucuugauaacuacuguaacauugcauuucaagcaauaugaauucaacucccccccaaacaaccaagugaugcugugugaaccaacaauaauagaaagaaacauaacagagauaguguaucugaccaacaccaccauagagaaggaaauaugccccaaaccagcagaauacagaaauuggucaaaaccgcaaugugacauuacaggauuugcaccuuuuucuaaggacaauucgauuaggcuuuccgcugguggggacaucugggugacaagagaaccuuaugugucaugcgauccugacaaguguuaucaauuugcccuuggacagggaacaacacuaaacaaugugcauucgaauaacacaguacgugauaggaccccuuaucggucuuuauugaugaaugaguuagguguuccuuuucaucuggggaccaagcaagugugcauagcaugguccagcucaaguugucacgauggaaaagcauggcugcauguuuguauaacgggggaugauaaaaaugcaacugcuagcuucauuuacaaugggaggcuuguagauaguguuguuucaugguccaaagaaauucucaggacccaggagucagaaugcguuuguaucaauggaacuuguacagugguaaugacugauggaagugcuucaggaaaagcugauacuaaaauacuauucauugaggaggggaaaaucguucauacuagcacauugucaggaagugcucagcaugucgaggagugcucuugcuauccucgauauccuggugucagaugugucugcagagacaacuggaaaggcuccaauaggcccaucguagauauaaacauaaaggaucauagcauugucuccaguuauguguguucaggacuuguuggagacacacccagaaaaaacgacagcuccagcaguagccauuguuuggauccuaacaaugaagaagguggucauggagugaaaggcugggccuuugaugauggaaaugacguguggaugggaagaacaaucaacgagacgucacgcuuaggguaugaaaccuucaaagucauugaaggcugguccaacccuaaguccaaauugcagauaaauaggcaagucauaguugacagaggugauagguccgguuauucugguauuuucucuguugaaggcaaaagcugcaucaaucggugcuuuuauguggaguugauuaggggaagaaaagaggaaacugaagucuuguggaccucaaacaguauuguuguguuuuguggcaccucagguacauauggaacaggcucauggccugauggggcggaccucaaucucaugccuauauaa

SEQ ID NO: 54210 - RNA, 1410 nt, Artificial Sequence
  derived and/or modified CDS sequence (wt) from neuraminidase__InfluenzaA__AFJ05145
augaauccaaaucaaaagauaauaacgauuggcucuguuucucucaccauguccacaauaugcuucuucaugcaaauugccaucuugauaacuacuguaacauugcauuucaagcaauaugaauucaacucccccccaaacaaccaagugaugcugugugaaccaacaauaauagaaagaaacauaacagagauaguguaucugaccaacaccaccauagagaaggaaauaugccccaaaccagcagaauacagaaauuggucaaaaccgcaaugugacauuacaggauuugcaccuuuuucuaaggacaauucgauuaggcuuuccgcugguggggacaucugggugacaagagaaccuuaugugucaugcgauccugacaaguguuaucaauuugcccuuggacagggaacaacacuaaacaaugugcauucgaauaacacaguacgugauaggaccccuuaucggacuuuauugaugaaugaguuagguguuccuuuucaucuggggaccaagcaagugugcauagcaugguccagcucaaguugucacgauggaaaagcauggcugcauguuuguauaacgggggaugauaaaaaugcaacugcuagcuucauuuacaaugggaggcuuguagauaguguuguuucaugguccaaagaaauucucaggacccaggagucagaaugcguuuguaucaauggaacuuguacagugguaaugacugauggaagugcuucaggaaaagcugauacuaaaauacuauucauugaggaggggaaaaucguucauacuagcacauugucaggaagugcucagcaugucgaggagugcucuugcuauccucgauauccuggugucagaugugucugcagagacaacuggaaaggcuccaauaggcccaucguagauauaaacauaaaggaucauagcauugucuccaguuauguguguucaggacuuguuggagacacacccagaaaaaacgacagcuccagcaguagccauuguuuggauccuaacaaugaagaagguggucauggagugaaaggcugggccuuugaugauggaaaugacguguggaugggaagaacaaucaacgagacgucacgcuuaggguaugaaaccuucaaagucauugaaggcugguccaacccuaaguccaaauugcagauaaauaggcaagucauaguugacagaggugauagguccgguuauucugguauuuucucuguugaaggcaaaagcugcaucaaucggugcuuuuauguggaguugauuaggggaagaaaagaggaaacugaagucuuguggaccucaaacaguauuguuguguuuuguggcaccucagguacauauggaacaggcucauggccugauggggcggaccucaaucucaugccuauauaa

SEQ ID NO: 54211 - RNA, 1410 nt, Artificial Sequence
  derived and/or modified CDS sequence (wt) from neuraminidase__InfluenzaA__AFJ05635
augaauccaaaccaaaagauaauaaccauugguucggucuguaugacaauuggaauggcuaacuuaauauuacaaauuggaaacauaaucucaauauggauuagccacucaauucaacuuaggaaucaaagucagauugaaacaugcaaucaaagcgucauuacuuaugaaaacaacacuuggguaaaucagacauauguuaacaucagcaauaccaacuuugcugcuggacagucagugguuuccaugaaauuagcgggcaauuccucucucugcccuguuaguggaugggcuauauacaguaaagacaacaguauaagaaucgguuccaagggggauguguuugucauaagggaaccauucauaucaugcucccccuuggaaugcagaaccuucuucuugacccaaggggccuugcuaaaugacaaacauuccaauggaaccauuaaagacaggagcccauaucgaacccuaaugagcuguccuauuggugaaguucccucuccauacaacucaagauuugagucagucgcuuggucagcaagugcuugucaugauggcaucaauuggcuaacaauuggaauuucuggcccagacaauggggcaguggcuguguuaaaguacaacggcauaauaacagacacuaucaagaguuggagaaauaauauauugagaacacaagaaucugaaugugcauguguaaaugguucuugcuuuaccauaaugaccgauggaccaagugauggacaggccucauacaagaucuucagaauagaaaagggaaagauagucaaaucagucgaaaugaaugccccuaauuaucacuaugaggaaugcuccuguuauccugauucuagugaaaucacaugugugugcagggauaacuggcauggcucgaaucgaccgugggugucuuucaaccagaaucuggaauaucagauaggauacauaugcagugggauuuucggagacaauccacgcccuaaugauaagacaggcaguugugguccaguaucgucuaauggagcaaauggaguaaaaggauuuucauucaaauacggcaaugguguuuggauagggagaacuaaaagcauuaguucaagaaaagguuuugagaugauuugggauccaaacggauggacugggacagacaauaacuucucaauaaagcaagauaucguaggaauaaaugaguggucaggauacagcgggaguuuuguucagcauccagaacuaacagggcuggauuguauaagaccuugcuucuggguugaacuaaucagaggacgacccaaagagaacacaaucuggacuagcgggagcagcauauccuuuugugguguaaacagugacacuguggguuggucuuggccagacggugcugaguugccauuuaccauugacaaguaa

SEQ ID NO: 54212 - RNA, 1410 nt, Artificial Sequence
  derived and/or modified CDS sequence (wt) from neuraminidase__InfluenzaA__AFJ11709
augaauccaaaucaaaagauaauaacgauuggcucuguuucucucaccauuuccacaauaugcuucuucaugcaaauugccaucuugauaacuacuguaacauugcauuucaagcaauaugaauucaacucccccccaaacaaccaagugaugcugugugaaccaacaauaauagaaagaaacauaacagagauaguguaucugaccaacaccaccauagagaaggaaauaugccccaaacuagcagaauacagaaauuggucaaaaccgcaaugugacauuacaggauuugcaccuuuuucuaaggacaauucgauuaggcuuuccgcugguggggacaucugggugacaagagaaccuuaugugucaugcgauccugacaaguguuaucaauuugcccuuggacagggaacaacacuaaacaacgugcauucaaauaacacaguacgugauaggaccccuuaucggacccuauugaugaaugaguuagguguuccuuuucaucuggggaccaagcaagugugcauagcaugguccagcucgaguugucacgauggaaaagcauggcugcauguuuguauaacgggggaugauaaaaaugcaacugcuagcuucauuuacaaugggaggcuuguagauaguguuguuucaugguccaaagaaauucucaggacccaggagucagaaugcguuuguaucaauggaacuuguacaguaguaaugacugauggaagugcuucaggaaaagcugauacuaaaauacuauucauugaggaggggaaaauuguucacacuagcacauugucaggaagugcucagcaugucgaggagugcucuugcuauccucgauauccuggugucagaugugucugcagagacaacuggaaaggcuccaauaggcccaucguagauauaaacauaaaggaucauagcauuguuuccaguuauguguguucaggacuuguuggagacacacccagaaaaaacgacagcuccagcaguagccauuguuuggauccuaacaaugaagaagguggucauggagugaaaggcugggccuuugaugauggaaaugacguauggaugggaagaacaaucaacgagacgucacgcuuaggguaugaaaccuucaaagucauugaaggcugguccaacccuaaguccaaauugcagauaaauaggcaagucauaguugacagagguaauagguccgguuauucugguauuuucucuguugaaggcaaaagcugcaucaaucggugcuuuuauguggaguugauuaggggaagaaaagaggaaacugaagucuuguggaccucaaacaguauuguuguguuuuguggcaccucagguacauauggaacaggcucauggccugauggggcggaccucaaucucaugcuuauauaa

SEQ ID NO: 54213 - RNA, 1410 nt, Artificial Sequence
  derived and/or modified CDS sequence (wt) from neuraminidase__InfluenzaA__AFJ11720
augaauccaaaucaaaagauaauaacgauuggcucuguuucucucaccauuuccacaauaugcuucuucaugcaaauugccaucuugauaacuacuguaacauugcauuucaagcaauaugaauucaacucccccccaaacaaccaagugaugcugugugaaccgacaauaauagaaagaaacauaacagagauaguguaucugaccaacaccaccauagagaaggaaauaugccccaaacuagcggaauacagaaauuggucaaaaccgcaaugugacauuacaggauuugcaccuuuuucuaaggacaauucaauuaggcuuuccgcugguggggacaucugggugacaagagaaccuuaugugucaugcgauccugacaaguguuaucaauuugcccuuggacagggaacaacacuaaacaacgugcauucaaauaacacaguacgugauaggaccccuuaucggacccuauugaugaaugaguuagguguuccuuuucaucuggggaccaagcaagugugcauagcaugguccagcucaaguugucacgauggaaaagcauggcugcauguuuguauaacgggggaugauaaaaaugcaacugcaagcuucauuuacaaugggaggcuuauagauaguguuguuucaugguccaaagaaauucucaggacccaggagucagaaugcguuuguaucaauggaacuuguacaguaguaaugacugauggaagugcuucaggaaaagcugauacuaaaauacuauucauugaggaggggaaaaucguucauacuagcacauugucaggaagugcucagcaugucgaggagugcucuugcuauccucgauauccuggugucagaugugucugcagagacaacuggaaaggcuccaauaggcccaucguagauauaaacauaaaggaucauagcauaguuuccaguuauguguguucaggacuuguuggagacacacccagaaaaaacgacagcuccagcaguagccauuguuuggauccuaacaaugaagaagguggucauggagugaaaggcugggccuuugaugauggaaaugacguguggaugggaagaacaaucaacgagacgucacgcuugggguaugaaaccuucaaagucauugaaggcugguccaacccuaaguccaaauugcagauaaauaggcaagucauaguugacaaagguaauagguccgguuauucugguauuuucucuguugaaggcaaaagcugcaucaaucggugcuuuuauguggaguugauuaggggaagaaaagaggaaacugaagucuuguggaccucaaacaguauuguuguguuuuguggcaccucagguacauauggaacaggcucauggccugauggggcugaccucaaucucaugccuauauaa

SEQ ID NO: 54214 - RNA, 1410 nt, Artificial Sequence; identical to SEQ ID NO: 53798
  derived and/or modified CDS sequence (wt) from neuraminidase__InfluenzaA__AFJ11731

SEQ ID NO: 54215 - RNA, 1410 nt, Artificial Sequence
  derived and/or modified CDS sequence (wt) from neuraminidase__InfluenzaA__AFJ19845
augaauccaaaucaaaagauaauaacgauuggcucuguuucucucaccauuuccacaauaugcuucuucaugcaaauugccaucuugauaacuacuguaacauugcauuucaagcaauaugaauucaacucccccccaaacaaccaagugaugcugugugaaccgacaauaauagaaagaaacauaacagagauaguguaucugaccaacaccaccauagagaaggaaauaugccccaaacuagcagaauacagaaauuggucaaaaccgcaaugugacauuacaggauuugcaccuuuuucuaaggacaauucgauuaggcuuuccgcugguggggacaucugggugacaagagaaccuuaugugucaugcgauccugacaaguguuaucaauuugcccuuggacagggaacaacacuaaacaacgugcauucaaauaacacaguacgugauaggaccccuuaucggacccuauugaugaaugaguuagguguuccuuuucaucuggggaccaagcaagugugcauagcaugguccagcucaaguugucacgauggaaaagcauggcugcauguuuguauaacgggggaugauaaaaaugcaacugcaagcuucauuuacaaugggaggcuuguagauaguguuguuucaugguccaaagaaauucucaggacccaggagucagaaugcguuuguaucaauggaacuuguacaguaguaaugacugauggaagugcuucaggaaaagcugauacuaaaauacuauucauugaggaggggaaaaucguucauacuagcacauugucaggaagugcucagcaugucgaggagugcucuugcuauccucgauauccugaugucagaugugucugcagagacaacuggaaaggcuccaauaggcccaucguagauauaaacauaaaggaucauagcauaguuuccaguuauguguguucaggacuuguuggagacacacccagaaaaaacgacagcuccagcaguagccauuguuuggauccuaacaaugaagaagguggucauggggugaaaggcugggccuuugaugauggaaaugacguauggaugggaagaacaaucaacgagacgucacgcuugggguaugaaaccuucaaagucauugaaggcugguccaacccuaaguccaaauugcagauaaauaggcaagucauaguugacaaagguaauagguccgguuauucugguauuuucucuguugaaggcaaaagcugcaucaaucggugcuuuuauguggaguugauuaggggaagaaaagaggaaacugaagucuuguggaccucaaacaguauuguuguguuuuguggcaccucagguacauauggaacaggcucauggccugauggggcggaccucaaucucaugccuauauaa

SEQ ID NO: 54216 - RNA, 1410 nt, Artificial Sequence; identical to SEQ ID NO: 48750
  derived and/or modified CDS sequence (wt) from neuraminidase__InfluenzaA__AFJ44697

SEQ ID NO: 54217 - RNA, 1410 nt, Artificial Sequence; identical to SEQ ID NO: 52602
  derived and/or modified CDS sequence (wt) from neuraminidase__InfluenzaA__AFJ69989

SEQ ID NO: 54218 - RNA, 1410 nt, Artificial Sequence
  derived and/or modified CDS sequence (wt) from neuraminidase__InfluenzaA__AFJ69990
augaauccaaaucaaaagauaauaaccauugguucggucuguaugacaauuggaauggcuaacuuaauauuacaaauuggaaacauaaccucaauauggauuagccacucaauucaacuugggaaucaaaaucagauugaaacaugcaaucaaagcgucauuacuuaugaaaacaacacuuggguaaaucagacauauguuaacaucagcaacaccaacuuugcugcuggacagucagugguuuccgugaaauuagcgggcaauuccucucucugcccuguuaguggaugggcuauauacaguaaagacaacaguauaagaaucgguuccaagggggauguguuugucauaagggaaccauucauaucaugcucccccuuggaaugcagaaccuucuucuugacucaaggggccuugcuaaaugacaaacauuccaauggaaccauuaaagacaggagcccauaucgaacccuaaugagcuguccuauuggugaaguucccucuccauacaacucaagauuugagucagucgcuuggucagcaagugcuugucaugauggcaucaauuggcuaacaauuggaauuucuggcccagacaauggggcaguggcuguguuaaaguacaacggcauaauaacagacacuaucaagaguuggagaaacaauauauugagaacacaagagucugaaugugcauguguaaaugguucuugcuuuacuguaaugaccgauggaccaagugauggacaggccucauacaagaucuucagaauagaaaagggaaagauagucaaaucagucgaaaugaaugccccuaauuaucacuaugaggaaugcuccuguuauccugauucuagugaaaucacaugugugugcagggauaacuggcauggcucgaaucgaccgugggugucuuucaaccagaaucuggaauaucggauaggauacauaugcagugggauuuucggagacaauccacgcccuaaugauaagacaggcaguugugguccaguaucgucuaauggagcaaauggaguaaaaggauuuucauucaaauacggcaaugguguuuggauagggagaacuaaaagcauuaguucgagaaacgguuuugagaugauuugggauccgaacggauggacugggacagacaauaacuucucaauaaagcaagauaucauaggaauaaaugaguggucaggauauagcgggaguuuuguucagcauccagaacuaacagggcuggauuguauaagaccuugcuuuuggguugaacuaaucagagggcggcccaaagagaauacaaucuggacuagcgggagcagcauauccuuuugugguguaaacagugacacuguggguuggucuuggccagacggugcugaguugccauuuaccauugacaaguaa

SEQ ID NO: 54219 - RNA, 1410 nt, Artificial Sequence
  derived and/or modified CDS sequence (wt) from neuraminidase__InfluenzaA__AFJ69991
augaauccaaaccaaaagauaauaaccauugguucagucuguaugacaauuggaauggcuaacuuaauauuacaaauuggaaacauaaucucaauauggauuagccacucaauucaacuugggaaucaaagccagauugaaacaugcaaucaaagcgucauuacuuaugaaaacaacacuuggguaaaucaaacauauguuaacaucagcaacaccaacuuugcugcuggacagucagugguuuccgugaaauuagcgggcaauuccucucucugcccuguuaguggaugggcuauauacaguaaagacaacaguauaagaaucgguuccaagggggauguguuugucauaagggaaccauucauaucaugcucccccuuggaaugcagaaccuucuucuugacucaaggggccuugcuaaaugacaaacauuccaauggaaccauuaaagacaggagcccauaucgaacccuaaugagcuguccuauuggugaaguucccucuccauacaaucaagauuugagucauucugcuuggucagcaagugcuugucaugauggcaucaauuggcuaacaauuggaauuucuggcccagacaauggggcaguggcuguguuaaaguacaacggcauaauaacagacacuaucaagaguuggagaaacaauauauugagaacacaagagucugaaugugcauguguaaaugguucuugcuuuaccauaaugaccgauggaccaagugauggacaggccucauacaagaucuucagaauagaaaagggaaagauagucaaaucagucgaaaugaaugccccuaauuaucacuaugaggaaugcuccuguuauccugauucuagugaaaucacaugugugugcagggauaacuggcauggcucgaaucgaccgugggugucuuucaaccagaaucuggaauaucagauaggauacauaugcagugggauuuucggagacaauccacgcccuaaugauaagacaggcaguugugguccaguaucgucuaauggagcaaauggaguaaaaggauuuucauucaaauacggcaaugguguuuggauagggagaacuaaaagcauuaguucaagaaaagguuuugagaugauuugggauccaaacggauggacugggacagacaauaacuucucaauaaagcaagauaucguaggaauaaaugaguggucaggauauagcgggaguuuuguucagcauccagaacuaacagggcuggauuguauaagaccuugcuucuggguugaacuaaucagagggcgacccaaagagaacacaaucuggacuagcgggagcagcauauccuuuugugguguaaacagugacacuguggguuggucuuggccagacggugcugaguugccauuuaccauugacaaguaa

SEQ ID NO: 54220 - RNA, 1410 nt, Artificial Sequence
  derived and/or modified CDS sequence (wt) from neuraminidase__InfluenzaA__AFJ69992
augaauccaaaccaaaagauaauaaccauugguucggucuguaugacaauuggaauggccaacuuaauauuacaaauuggaaacauaaucucaauauggauuagccacucaauucaacuugggaaucaaaaucagauugaaacaugcaaucaaagcgucauuacuuaugaaaacaacacuuggguaaaucagacauauguuaacaucagcaacaccaacuuugcugcuggacagucagugguuuccgugaaauuagcgggcaauuccucucucugcccuguuaguggaugggcuauauacaguaaagacaacaguauaagaaucgguuccaagggggauguguuugucauaagggaaccauucauaucaugcucccccuuggaaugcagaaccuucuucuugacucaaggggccuuacuaaaugacaaacauuccaauggaaccauuaaagacaggagcccauaucgaacccuaaugagcuguccuauuggugaaguucccucuccauacaacucaagauuugagucagucgcuuggucagccagugcuugucaugauggcaucaauuggcuaacaauuggaauuucuggcccaaacaauggagcaguggcuguguuaaaguacaacggcauaauaacagacacuaucaagaguuggagaaacaauauauugagaacacaagagucugaaugugcauguguaaaugguucuugcuuuacuguaaugaccgauggaccaagugauggacaggccucauacaagaucuucagaauagaaaagggaaagauagucaaaucagucgaaaugaaugccccuaauuaucacuaugaggaaugcuccuguuauccugauucuagugaaaucacaugugugugcagggauaacuggcauggcucgaaucgaccgugggugucuuucaaccagaaucuggaauaucagauaggauacauaugcagugggauuuucggagacaauccacguccuaaugacaagacaggcaguugugguccaguaucgucuaauggagcaaauggaguaaaaggauuuucauucaaauacggcaaugguguuuggauagggagaacuaaaagcauuaguucaagaaacgguuuugagaugauuugggauccgaacggauggacugggacagacaauaacuucucaauaaagcaagauaucguaggaauaaaugaguggucaggauauagcgggaguuuuguucagcauccagaacuaacagggcuggauuguauaagaccuugcuucuggguugaacuaaucagagggcgacccaaagagaacacaaucuggacuagcgggagcagcauauccuuuugugguguaaacagugacacuguugguuggucuuggccagacggugcugaguugccauuuaccauugacaaguaa

SEQ ID NO: 54221 - RNA, 1410 nt, Artificial Sequence
  derived and/or modified CDS sequence (wt) from neuraminidase__InfluenzaA__AFJ69993
augaauccaaaucaaaagauaauaacgauuggcucuguuucucucaccauuuccacaauaugcuucuucaugcaaauugccaucuugauaacuacuguaacauugcauuucaagcaauaugaauucaacucccccccaaacaaccaagugaugcugugugaaccaacaauaauagaaagaaacauaacagagauaguguaucugaccaacaccaccauagagaaggaaauaugccccaaacuagcagaauacagaaauuggucaaagccgcaaugugacauuacaggauuugcaccuuuuucuaaggacaauucgauuaggcuuuccgcugguggggacaucugggugacaagagaaccuuaugugucaugcgauccugacaaguguuaucaauuugcccuuggacagggaacaacacuaaacaacgugcauucaaauaacacaguacgugauaggaccccuuaucggacccuauugaugaaugaguuagguguuccuuuucaucuggggaccaagcaagugugcauagcaugguccagcucaaguugucacgauggaaaagcauggcugcauguuuguauaacgggggaugauaaaaaugcaacugcuagcuucauuuacaaugggaggcuuguagauaguguuguuucaugguccaaagaaauccucaggacccaggagucagaaugcguuuguaucaauggaacuuguacaguaguaaugacugaugggagugcuucaggaaaagcugauacuaaaauacuauucauugaggaggggaaaaucguucauacuagcacauugucaggaagugcucagcaugucgaggagugcucuugcuauccucgauauccuggugucagaugugucugcagagacaacuggaaaggcuccaauaggcccaucguagauauaaacauaaaggaucauagcauuguuuccaguuauguguguucaggacuuguuggagacacacccagaaaaaaugacagcuccagcaguagccauuguuuggauccuaacaaugaagaagguggucauggagugaaaggcugggccuuugaugauggaaaugacguguggaugggaagaacgaucaacgagacgucacguuuaggguaugaaaccuucaaagucauugaaggcugguccaacccuaaguccaaauugcagauaaauaggcaagucauaguuggcagagguaauagguccgguuauucugguauuuucucuguugaaggcaaaagcugcaucaaucggugcuuuuauguggaguugauuaggggaagaaaagaggaaacugaagucuuguggaccucaaacaguauuguuguguuuuguggcaccucagguacauauggaacaggcucauggccugauggggcgaaccucaaucucaugccuauauaa

SEQ ID NO: 54222 - RNA, 1410 nt, Artificial Sequence
  derived and/or modified CDS sequence (wt) from neuraminidase__InfluenzaA__AFJ69994
augaauccaaaucaaaagauaauaacgauuggcucuguuucucucaccauuuccacaauaugcuucuucaugcaaauugccaucuugauaacuacuguaacauugcauuucaagcaauaugaauucaacucccccccaaacaaccaagugaugcugugugaaccaacaauaauagaaagaaacauaacagagauaguguaucugaccaacaccaccauagagaaggaaauaugccccaaacuagcagaauacagaaauuggucaaagccgcaaugugacauuacaggauuugcaccuuucucuaaggacaauucgauuaggcuuuccgcugguggggacaucugggugacaagagaaccuuaugugucaugcgauccugacaaguguuaucaauuugcccuuggacagggaacaacacuaaacaaugugcauucaaauaacacaguacgugauaggaccccuuaucggacccuauugaugaaugaguuagguguuccuuuucaucuggggaccaagcaagugugcauagcaugguccagcucaaguugucacgauggaaaagcauggcugcauguuuguauaacgggggaugauaaaaaugcaacugcuagcuucauuuacaaugggaggcuuguagauaguguuguuucaugguccaaagaaauccucaggacccaggagucagaaugcguuuguaucaauggaacuuguacaguaguaaugacugaugggagugcuucaggaaaagcugauacuaaaauacuauucauugaggaggggaaaaucguucauacuagcacauugucaggaagugcucagcaugucgaggagugcucuugcuauccucgauauccuggugucagaugugucugcagagacaacuggaaaggcuccaauaggcccaucguagauauaaacauaaaggaucauagcauuguuuccaguuauguguguucaggacuuguuggagacacacccagaaaaaacgacagcuccagcaguagccauuguuuggauccuaacaaugaagaagguggucauggagugaaaggcugggccuuugaugauggaaaugacguguggaugggaagaacgaucaacgagacgucacguuuaggguaugaaaccuucaaagucauugaaggcugguccaacccuaaguccaaauugcagauaaauaggcaagucauaguugacagagguaauagguccgguuauucugguauuuucucuguugaaggcaaaagcugcaucaaucggugcuuuuauguggaguugauuaggggaagaaaagaggaaacugaagucuuguggaccucaaacaguauuguuguguuuuguggcaccucagguacauauggaacaggcucauggccugauggagcggaccucaaucucaugccuauauaa

SEQ ID NO: 54223 - RNA, 1413 nt, Artificial Sequence
  derived and/or modified CDS sequence (wt) from neuraminidase__InfluenzaA__AFJ74389
augaauccaaaucaaaaaauaauaaccauuggaucaaucaguauugcaauuggaauaauuagucugauauugcaaauaggaaauauuauuucaauaugggcuagccacucaauccaaacuggaagucaaaaccacacuggaguaugcaaccaaagaaucauuacauaugaaaauagcaccuggguaaaucaaacauaugucaauauuaacaacacuaauguuguugcuggaaaggacaaaaccucaaugacauuggccggcaauucaucucuuugcccuauccguggaugggcuauauacacaaaagacaacagcauaagaauugguuccaaaggagauguuuuugucauaagagagccuuuuauaucauguucucacuuggaaugcagaaccuuuuuucugacccaaggugcucuauuaaaugacaagcauucaaaugggaccguuaaggacagaagcccuuauagggccuuaaugagcuguccucuaggugaagcuccgucuccauacaauucaagauuugaaucaguugcuuggucagcaagcgcaugccaugauggcuugggcuggcuaacaaucggaauuucugguccagauaauggggcaguggcuguacuaaaauacaacggcauaauaacugaaaccauuaaaaguuggaagaagcgaauauuaagaacacaagagucugaaugugucuguaugaacgguucauguuuuaccauaaugaccgauggcccgaguaauggggccgcaucguacagaaucuucaaaaucgaaaaggggagaguuacuaaaucaauagaguuggaugcacccaauuaucauuacgaggaauguucauguuacccagacaccggcacagugaugugugugugcagggacaauuggcacgguucaaaucgaccuugggugucuuuuaaucaaaaccuggauuaucaaauaggauacaucugcagugggguguucggugacaauccgcgucccaaagauggagaaggcagcuguaauccagugacuguugauggagcagacggaguaaagggguuuucauacagauaugguaaugguguuuggauaggaaggacuaaaaguaacagacucagaaagggauuugagaugauuugggauccuaauggauggacagauaccgacagugauuucucaaugaaacaggauaucguggcaaugacugauuggucaggguacagcggaaguuuuguucaacauccugagcuaacaggauuggacuguaugagaccuugcuucuggguugaauuagucagagggcuaccuagagaaaauacaacaaucuggacuagugggagcagcauuucuuuuuguggcguaaauagcgauacugcaaacuggucuuggccagacggugccgaguugccauuuaccauugacaaguag

SEQ ID NO: 54224 - RNA, 1410 nt, Artificial Sequence
  derived and/or modified CDS sequence (wt) from neuraminidase__InfluenzaA__AFJ74399
augaauccaaaucaaaagauaauaacaauuggcucuguuucucucacuauugccacaauaugcuuccuuaugcaaauugccauccugguaauuacuuuaacauugcauuucaagcaauaugaaugcaacuccccuccaaacaaccaaguaaugcugugugaaccaacaauaauagaaagaaacauaacagagauaguguaucugaccaacaccaccauagagaaagaaauaugccccaaacuagcagaauacagaaauuggucaaagccgcaauguaaaauuacaggauuugcaccuuuuucuaaggacaauucaauucggcuuuccgcugguggagacauuugggugacaagagaaccuuaugugucaugcgauccuggcaaguguuaucaauuugcccuuggacagggaacaacacuaaacaacaggcauucaaaugacacaguacaugauaggaccccuuaucgaacccuauugaugaaugaguuggguguuccauuucauuugggaaccaagcaagugugcauagcaugguccagcucaaguugucacgauggaaaagcauggcugcauguuuguguaacugggcauaaugaaaaugcaacugcuagcuucauuuacgaugggaggcuuguagauaguauugguucaugguccaaaaauauccucaggacccaggagucggaaugcguuuguaucaauggaacuuguacaguaguaaugacugauggaagugcuucaggaagagcugauacuaaaauacuauucauugaagaggggaaaaucguucauauuagcccauugucaggaagugcucagcaugucgaggagugcuccuguuauccucgauauccuggugucagaugugucugcagagacaacuggaaaggcuccaauaggcccaucguagauauaaaugugaaagauuuuagcauuguuuccaguuaugugugcucaggacuuguuggagacacacccagaaaaaacgacagcuccagcaguagccauugccugaauccuaacaaugaggaagggggucauggagugaaaggcugggccuuugaugauggaaaugauguguggaugggaagaacgaucagcgagaaguuacgcucagguuaugaaaccuucaaagucauuggaggcugguccaaaccuaacuccaaauugcagauaaacaggcaagucauaguugacagagguaauagguccgguuauucugguauuuucucuguugaaggcaaaagcugcaucaaucggugcuuuuauguggaguugauaaggggaaggaaacaggaaacugaagucugguggaccucaaacaguauuguuguguuuuguggcaccucagguacauauggaacaggcucauggccugauggggcggacaucaaucucaugccuauauaa

SEQ ID NO: 54225 - RNA, 1410 nt, Artificial Sequence
  derived and/or modified CDS sequence (wt) from neuraminidase__InfluenzaA__AFJ74410
augaauccaaaucaaaagauaauaacaauuggcucuguuucucucacuauugccacaauaugcuuccuuaugcaaauugccauccugguaaugacuguaacauugcauuucaagcaauaugaaugcaacucccccccaaacaaccaaguaaugcugugugaaccaacaauaauagaaagaaacauaacagagauaguguaucugaccaacaccaccauagagaaagaaauaugccccaaacuagcagaauacagaaauuggucaaagccgcaauguaaaauuacaggauuugcaccuuuuucuaaggacaauucaauucggcuuuccgcugguggagacauuugggugacaagagaaccuuaugugucaugcgauccuggcaaguguuaucaauuugcccuuggacagggaacaacacuaaacaacaggcauucaaaugacacaguacaugauaggaccccuuaucgaacccuauugaugaaugaguuggguguuccauuucauuugggaaccaagcaagugugcauagcaugguccagcucaaguugucacgauggaaaagcauggcugcauguuuguguaacugggcauaaugaaaaugcaacugcuagcuucauuuacgaugggaggcuuguagauaguauugguucaugguccaaaaauauccucaggacccaggagucggaaugcguuuguaucaauggaacuuguacaguaguaaugacugauggaagugcuucaggaagagcugauacuaaaauacuauucauugaagaggggaaaaucguucauauuagcccauugucaggaagugcucagcaugucgaggagugcuccuguuauccucgauauccuggugucagaugugucugcagagacaacuggaaaggcuccaauaggcccaucguagauauaaaugugaaagauuauagcauuauuuccaguuaugugugcucaggacuuguuggagacacacccagaaaaaacgacagcuccagcaguagccauugccugaauccuaauaaugaggaagggggucauggagugaaaggcugggccuuugaugauggaaaugauguguggaugggaagaacgaucagcgagaaguuacgcucagguuaugaaaccuucaaagucauuggaggcugguccaaaccuaacuccaaauugcagauaaacaggcaagucauaguugacagagguaauagguccgguuauucugguauuuucucuguugaaggcaaaagcugcaucaaucggugcuuuuauguggaguugauaaggggaaggaaacaggaaacugaagucugguggaccucaaacaguauuguuguguuuuguggcaccucagguacauauggaacaggcucauggccugauggggcggacaucaaucucaugccuauauaa

SEQ ID NO: 54226 - RNA, 1410 nt, Artificial Sequence
  derived and/or modified CDS sequence (wt) from neuraminidase__InfluenzaA__AFJ74451
augaauccaaaucaaaagauaauaacgauuggcucuguuucucucacuauugccacaauaugcuuccuuaugcaaauugccauccugguaacuacuguaacauugcauuucaagcaauaugaaugcaacucucucccaaacaaccaaguaaugcugugugaaccaacaauaauagaaagaaacauaacagagauaguguaucugaccaacaccaccauagagaaggaaauaugccccaaacuagcagaauacagaaauuggucaaagccgcaauguaaaauuacaggauuugcaccuuuuucuaaggacaauucaauucggcuuuccgcugguggggacauuugggugacaagagaaccuuaugugucaugcgauccugacaaguguuaucaauuugcccuuggacagggaacaacacuaaacaacaggcauucaaaugacacaguacaugauaggaccccuuaucgaacccuauugaugaaugaguuggguguuccauuucauuugggaaccaagcaagugugcauagcaugguccagcucaaguugucacgauggaaaagcauggcugcauguuuguguaacuggacacgaugaaaaugcaacugcuagcuucauuuacggugggaggcuuguagauaguauugguucaugguccaaaaaaauccucaggacccaggagucggaaugcguuuguaucaauggaacuuguacaguaguaaugacugaugggagugcuucaggaagagcugauacuaaaauacuauucauugaggaggggaaaaucauucauauuagccaauugucaggaagugcucagcaugucgaggagugcucauguuauccucgauauccuggugucagaugugucugcagagacaacuggaaaggcuccaauaggcccauuguagauauaaauguaaaggauuauagcauuguuuccaguuaugugugcucaggacuuguuggagacacacccagaaaaaacgacagcuccagcaguagccauugccugaauccuaacaaugaggaagggggucauggaguaaaaggcugggccuuugaugauggaaaugacguguggaugggaagaacgaucagcgagaaauuccgcucagguuaugaaaccuucaaagucauugaaggcugguccaaaccuaacuccaaauugcagauaaauaggcaagucauaguugacagagauaauagguccgguuauucugguauuuucucuguugaaggcaaaagcugcaucaaucggugcuuuuauguggaguugauaaggggaaggaaacaggaaacugaagucugguggaccucaaacaguauuguuguguuuuguggcaccucagguacauauggaacaggcucauggccugauggggcggacaucaaucucaugccuauauaa

SEQ ID NO: 54227 - RNA, 1413 nt, Artificial Sequence
  derived and/or modified CDS sequence (wt) from neuraminidase__InfluenzaA__AFJ74462
augaauccaaaucaaaaaauaauaaccauuggaucaaucaguguggcaaucggaauaauuagucuaauauugcaaauaggaaauauuauuucaauaugggcuagccacucaauccaaacuggaagucaaaacuacacuggaauaugcaaccaaagaaucauuacauaugaaaauagcaccuggguaaaucaaacauauguuaacauuaacaacacuaauguuguugcuggaaaggacaaaaccucaaugacauuggccggcaauucaucucuuugcccuauccguggaugggcuauauacacaaaagacaacagcauaagaauugguuccaaaggagauguuuuugucauaagagagccuuuuauaucauguucucacuuggaaugcagaaccuuuuuucugacccaaggugcucuauuaaaugacaagcauucaaaugggaccguuaaggacagaagcccuuauagggccuuaaugagcuguccucugggugaagcuccgucuccauacaauucaagauuugaaucaguugcuuggucagcaagcgcaugccaugauggcuugggcuggcuaacaaucggaauuucugguccagauaauggagcaguggcuguacuaaaauacaacggcauaauaacugaaaccauaaaaaguuggaagaagcaaaucuuaagaacacaagagucugaaugugucugugugaacgguucauguuuuaccauaaugaccgauggcccgaguaauagggccgcaucguacagaaucuucaaaaucgagaaggggagaguuacuaaaucaauagaguuggaugcacccaauuaucauuacgaagaauguuccuguuacccagacaccggcacaguaaugugugugugcagggacaauuggcacgguucaaaucgaccuugggugucuuuuaaucaaaaccuugauuaucaaauaggauacaucugcagcgggguguucggugacaauccgcgucccaaagauggagaaggcagcuguaauccagugacuguugauggagcagacggaguaaagggguuuucauacagauaugguaaugguguuuggauaggaaggacuaaaaguaacagacuaagaaagggauuugagaugauuugggauccuaauggauggacagauaccgacagugauuucucaaugaaacaggaugucguggcaaugacugauuggucaggguacagcggaaguuuuguucaacauccugagcuaacaggauuggacuguaugagaccuugcuucuggguugaauuagucagagggcuaccuagagaaaauacaacaaucuggacuagugggagcagcauuucuuuuuguggcguaaauagcgagacugcaaacuggucuuggccagacggugcugaguugccauucaccauugacaaguag

SEQ ID NO: 54228 - RNA, 1410 nt, Artificial Sequence
  derived and/or modified CDS sequence (wt) from neuraminidase__InfluenzaA__AFJ74517
augaauccaaaucaaaagauaauaacgauuggcucuguuucucucacuauugccacaauaugcuuccuuaugcaaauugccauccugguaacuacuguaacauugcauuucaagcaauaugaaugcaacucccccccaaacaaccaaguaaugcugugugaaccaacaauaauagaaagaaacauaacagagauaguguauaugaccaacaccaccauagagaaggaaauaugccccaaacuagcagaauacagaaauuggucaaagccgcaauguaaaauuacaggauuugcaccuuuuucuaaggacaauucaauucggcuuuccgcugguggggacauuugggugacaagagaaccuuaugugucaugcgauccugacaaguguuaucaauuugcccuuggacagggaacaacacuaaacaacaggcauucaaaugacacaguacaugauaggaccccuuaucgaacccuauugaugaaugaguuggguguuccauuucauuugggaaccaagcaagugugcauagcaugguccagcucaagcugucacgauggaaaagcauggcugcauguuuguguaacugggcaugaugaaaaugcaacugcuagcuucauuuacgaugggaggcuuguagauaguauugguucaugguccaaaaaaauccucaggacccaggagucggaaugcguuuguaucaauggaacuuguacaguaguaaugacugaugggagugcuucaggaagagcugacaccaaaauacuauucauugaggaggggaaaaucguucauauuagccaauugucaggaagugcucagcaugucgaggagugcuccuguuauccucgauauccuggugucagaugugucugcagagacaacuggaaaggcuccaauaggcccaucguagauauaaauguaaaggacuauagcauugucuccaguuaugugugcucaggacuuguuggagacacacccagaaaaaacgacagcuccagcaguagccauugccugaauccuaacaaugaggaagggggucauggagugaaaggcugggccuuugaugauggaaaugacguguggauggggagaacgaucagcgagaaguuacgcucagguuaugaaaccuucaaagucauugaaggcugguccaaaccuaacuccaaauugcagauaaauaggcaagucauaguugacagagguaauagguccgguuauucugguauuuucucuguugaaggcaaaagcugcaucaaucggugcuuuuauguggaguugauaaggggaaggaaacaggaaaaugaagucugguggaccucaaacaguauuguuguguuuuguggcaccucagguacauauggaacaggcucauggccugauggggcggacaucaaccucaugccuauauaa

SEQ ID NO: 54229 - RNA, 1410 nt, Artificial Sequence
  derived and/or modified CDS sequence (wt) from neuraminidase__InfluenzaA__AFJ74564
augaauccaaaucaaaagauaauaacaauuggcucuguuucucucaccauugccacaauaugcuuccuuaugcaaauugccauccugguaacuacuguaacauugcauuucaagcaguaugaaugcaacucccccccaaacaaccaaguaaugcugugugaaccaacaauaauagaaagaaacauaacagagauaguguaucugaccaacaccaccacagagaaggaaauaugccccaaacuagcagaauacagaaauuggucaaagccgcaauguaacauuacaggauuugcaccuuuuucuaaggacaauucgauucggcuuuccgcugguggggacaucugggugacaagagaaccuuaugugucaugcgauccugacaaguguuaucaauuugcccuugggcagggaacaacacuaaacaacgggcauucaaaugacacaguacaugauaggaccccuuaccggacccuauugaugaaugaauuggguguuccauuucauuugggaaccaggcaagugugcauagcaugguccagcucaaguugucacgauggaaaagcauggcugcauguuuguguaacuggggaugaugaaaaugcaacugcuagcuucauuuacaaugggaggcuuguagauaguauugguucaugguccaaaaaaauacucagaacccaggagucggaaugcguuuguaucaauggaacuuguacaguaguaaugacugaugggagcgcuucaggaaaagcugauacuaaaauacuauucauugaggaggggaaaaucguccauauuagcacauugucaggaagugcucagcaugucgaggagugcuccuguuauccucgauauccuggugucagaugugucugcagagacaacuggaaaggcuccaauaggcccaucguagauauaaauguaaaggacuauagcauuguuuccaguuaugugugcucaggacuuguuggagacacacccagaaaaaaugacagcuucagcaguagccauugccuagauccuaacaaugaggaagguggucauggagugaaaggcugggccuuugaugauggaaaugacguguggaugggaagaacgaucagcgagacguuacgcucagguuaugaaaccuucaaagucaucgaaggcugguccaaaccuaacuccaaauuacagauaaauaggcaagucauaguugaaagagguaacagguccgguuauucugguauuuucuccguugaaggcaaaagcugcaucaaucggugcuuuuauguggaguugauaaggggaaggaaagaggaaacugaagucugguggaccucaaacaguauuguuguguuuuguggcaccucagguacauauggaacaggcucauggccugauggggcggauaucaaucucaugccuauauaa

SEQ ID NO: 54230 - RNA, 1413 nt, Artificial Sequence
  derived and/or modified CDS sequence (wt) from neuraminidase__InfluenzaA__AFJ74639
augaacccaaaucaaaaaauaauaaccauuggaucaaucaguauagcaaucggaauaauuagucuaauguugcaaauaggaaauauuauuucaauaugggcuagucacucaauccaaacuggaagucaaaaccacacuggaauaugcaaccaaagaaucaucacauaugaaaacaacaccugggugaaucacacauauguuaauauuaacaacacuaauguuguugcuggaaaggacaaaacuucagugacauuggccggcaauucaucucuuuguucuaucaguggaugggcuauauacacaaaagacaacagcauaagaauuggcuccaaaggagauguuuuugucauaagagaaccuuucauaucauguucucacuuggaaugcagaaccuuuuuucugacccaaggugcucuauuaaaugacaaacauucaaaugggaccguaaaggacagaaguccuuauagggccuuaaugagcuguccucuaggugaagcuccguccccauacaauucaaaguucgaaucaguugcauggucagcaagcgcaugccaugauggcaugggcugguuaacaaucggaauuucugguccagacaauggagcuguggcuguacuaaaauacaacggaauaauaacugaaaccauaaaaaguuggaaaaagcgaauauuaagaacacaagagucugaaugugucuguaugaacgggucauguuucaccauaaugaccgauggcccuaguaauggggccgccucguacaaaauuuucaagaucgagaaggggaagguuacuaaaucaauagaguugaaugcacccaguuuucauuaugaggaauguuccuguuacccagacacuggcacagugauguguguaugcagggacaacuggcaugguucaaaucgaccuugggugucuuuuaaucaaaacuuggauuaucaaauaggauacaucugcaguggaguguucggugacaauccgcgucccaaagauggagagggcagcugcaauccagugacuguugauggagcagacggaguaaaaggguuuucauacaaauaugguaaugguguuuggauagggaggaccaaaaguaacaggcuuagaaagggguuugagaugauuugggauccuaauggauggacaaauaccgacagugauuucucagugaaacaggauguuguagcaauaacugauuggucaggguacaguggaaguuucguucaacauccugaguuaacaggauuggacuguauaagaccuugcuucuggguugaguuagucagagggcugccuagagaaaauacaacaaucuggacuagugggagcagcauuucuuuuuguggcguuaauagugauacugcaaacuggucuuggccagacggugcugaguugccguucaccauugacaaguag

SEQ ID NO: 54231 - RNA, 1410 nt, Artificial Sequence
  derived and/or modified CDS sequence (wt) from neuraminidase__InfluenzaA__AFJ74640
augaauccaaaucaaaagauaauaacgauuggcucuguuucucucaccauuuccacaauaugcuucuucaugcaaauugccauccugauaacuacuguaacauugcauuucaagcaauaugaauucaacucccccccaaacaaccaagugaugcugugugaaccaacaauaauagaaagaaacauaacagagauaguguaucugaccaacaccaccauagagaaggaaauaugccccaaacuagcaggauacagaaauuggucaaagccgcaauguaacauuacaggauuugcaccuuuuucuaaggacaauucgauucggcuuuccgcugguggggacaucugggugacaagagaaccuuaugugucaugcgauccugacaaguguuaucaauuugcccuuggacagggaacaacacuaaacaacgugcauucaaaugacacaguacaugauaggaccccuuaucggacccuauugaugaaugaguuggguguuccauuucaucuggggaccaagcaagugugcauagcaugguccagcucaaguugucacgauggaaaagcauggcugcauguuuguguaacgggggaugaugaaaaugcaacugcuagcuucauuuacaaugggaggcuuguagauaguauuguuucaugguccaaaaaaauccucaggacccaggagucagaaugcguuuguaucaauggaacuuguacaguaguaaugacugaugggagugcuucaggaaaagcugauacuaaaauacuauucauugaggaggggaaaaucguucauacuagcacauugucaggaagugcucagcaugucgaggagugcuccuguuauccucgauauccuggugucagaugugucugcagagacaacuggaaaggcuccaauaggcccaucguagauauaaacauaaaggauuauagcauuguuuccaguuaugugugcucaggacuuguuggagacacacccagaaaaaacgacagcuccagcaguagccauugcuuggauccaaacaaugaggaagguggucauggagugaaaggcugggccuuugaugauggaaaugacguguggaugggaagaacgaucagcgagaaguuacgcucaggauaugaaaccuucaaagucauugaaggcugguccaacccuaacuccaaauugcagauaaauaggcaagucauaguugacaaagguaauagguccgguuauucugguauuuucucuguugaaggcaaaagcugcaucaaucggugcuuuuauguggaguugauaaggggaagaaaacaggaaacugaagucuuguggaccucaaacaguauuguuguguuuuguggcaccucagguacauauggaacaggcucauggccugauggggcggacaucaaucucaugccuauauaa

SEQ ID NO: 54232 - RNA, 1413 nt, Artificial Sequence; identical to SEQ ID NO: 54230
  derived and/or modified CDS sequence (wt) from neuraminidase__InfluenzaA__AFJ74659

SEQ ID NO: 54233 - RNA, 1413 nt, Artificial Sequence
  derived and/or modified CDS sequence (wt) from neuraminidase__InfluenzaA__AFJ74679
augaacccaaaucaaaaaauaauaaccauuggaucaaucaguauagcaaucggaauaauuagucuaauguugcaaauaggaaauauuauuucaauaugggcuagucacucaauccaaacuggaagucaaaaccacacuggaauaugcaaccaaagaaucaucacauaugaaaacaacaccugggugaaucacacauauguuaauauuaacaacacuaauguuguugcuggaaaggacaaaacuucagugacauuggccggcaauucaucucuuuguucuaucaguggaugggcuauauacacaaaagacaacagcauaagaauuggcuccaaaggagauguuuuugucauaagagaaccuuucauaucauguucucacuuggaaugcagaaccuuuuuucugacccaaggugcucuauuaaaugacaaacauucaaaugggaccguaaaggacagaaguccuuauagggccuuaaugagcuguccucuaggugaagcuccguccccauacaauucaaaguucgaaucaguugcauggucagcaagcgcaugccaugauggcaugggcugguuaacaaucggaauuucugguccagacaauggagcuguggcuguacuaaaauacaacggaauaauaacugaaaccauaaaaaguuggaaaaagcgaauauuaagaacacaagagucugaaugugucuguaugaacgggucauguuucaccauaaugaccgauggcccuaguaauggggccgccucguacaaaauuuucaagaucgagaaggggaagguuacuaaaucaauagaguugaaugcacccaguuuucauuaugaggaauguuccuguuacccagacacuggcacagugauguguguaugcagggacaacuggcaugguucaaaucgaccuugggugucuuuuaaucaaaacuuggauuaucaaauaggauacaucugcaguggaguguucggugacaauccgcgucccaaagauggagagggcagcugcaauccagugacuguugauggagcagacggaguaaaaggguuuucauacaaauaugauaaugguguuuggauagggaggaccaaaaguaacaggcuuagaaagggguuugagaugauuugggauccuaauggauggacaaauaccgacagugauuucucagugaaacaggauguuguagcaauaacugauuggucaggguacaguggaaguuucguucaacauccugaguuaacaggauuggacuguauaagaccuugcuucuggguugaguuagucagagggcugccuagagaaaauacaacaaucuggacuagugggagcagcauuucuuuuuguggcguuaauagugauacugcaaacuggucuuggccagacggugcugaguugccguucaccauugacaaguag

SEQ ID NO: 54234 - RNA, 1410 nt, Artificial Sequence
  derived and/or modified CDS sequence (wt) from neuraminidase__InfluenzaA__AFJ74680
augaauccaaaucaaaagauaauaacgauuggcucuguuucucucaccauuuccacaauaugcuucuucaugcaaauugccauccugauaacuacuguaacauugcauuucaagcaauaugaauucaacucccccccaaacaaccaagugauacugugugaaccaacaauaauagaaagaaacauaacagagauaguguaucugaccaacaccaccauagagaaggaaauaugccccaaacuagcagaauacagaaauuggucaaagccgcaauguaacauuacaggauuugcaccuuuuucuaaggacaauucgauucggcuuuccgcugguggggacaucugggugacaagggaaccuuaugugucaugcgauccugacaaguguuaucaauuugcccuuggacagggaacaacacuaaacaacgugcauucaaaugacacaguacaugauaggaccccuuaucggacccuauugaugaaugaguuggguguuccauuucaucuggggaccaagcaagugugcauagcaugguccagcucaaguugucacgauggaaaagcauggcugcauguuuguguaacgggggaugaugaaaaugcaacugcuagcuucauuuacaaugggaggcuuguagauaguauuguuucaugguccaaaaaaauccucaggacccaggagucagaaugcguuuguaucaauggaacuuguacaguaguaaugacugaugggagugcuucaggaaaagcugauacuaaaauacuauucauuaaggaggggaaaaucguucauacuagcacauugucaggaagugcucagcaugucgaggagugcuccuguuauccucgauauccuggugucagaugugucugcagagacaacuggaaaggcuccaauaggccuaucguagauauaaacauaaaggauuauagcauuguuuccaguuaugugugcucaggacuuguuggagacacacccagaaaaaacgacagcuccagcaguagccauugcuuggauccuaacaaugaggaagguggucauggagugaaaggcugggccuuugaugauggaaaugacguguggaugggaagaacgaucagcgagaaguuacgcucaggauaugaaaccuucaaagucauugaaggcugguccaacccuaacuccaaauugcagauaaauaggcaagucauaguugacagagguaauagguccgguuauucugguauuuucucuguugaaggcaaaagcugcauaaaucggugcuuuuauguggaguugauaaggggaagaaaacaggaaacugaagucuuguggaccucaaacaguauuguuguguuuuguggcaccucagguacauauggaacaggcucauggccugauggggcggacaucaaucucaugccuauauaa

SEQ ID NO: 54235 - RNA, 1410 nt, Artificial Sequence
  derived and/or modified CDS sequence (wt) from neuraminidase__InfluenzaA__AFJ74701
augaauccaaaucaaaagauaauaacaauuggcucuguuucucucaccauugccacaauaugcuuccuuaugcaaauugccauccugguaacuacuguaacauugcauuucaaccaguaugaaugcaacucccccccaaacaaccaaguaaugcugugugaaccaacaauaauagaaagaaacauaacagagauaguguaucugaccaacaccaccauagagaaggaaauaugccccaaacuagcagaauacagaauuuggucaaagccgcaauguaacauuacaggauuugcaccuuuuucuaaggacaauucgauucggcuuuccgcugguggggacaucugggugacaagagaaccuuaugugucaugcgauccugacaaguguuaucaauuugcccuugggcagggaacaacacuaaacaacgggcauucaaaugacacaguacaugauaggaccccuuaccggacccuauugaugaaugaauuggguguuccauuucauuugggaaccaggcaagugugcauggcaugguccagcucaaguugucacgauggaaaagcauggcugcauguuuguguaacuggggaugaugaaaaugcaacugcuagcuucauuuacaaugggaggcuuguagauaguauugguucaugguccaaaaaaauacucagaacccaggagucggaaugcguuuguaucaauggaacuuguacaguaguaaugacugaugggagcgcuucaggaaaagcugauacuaaaauauuauucauugaggaggggaaaaucguucauauuagcacauugucaggaagugcucagcaugucgaggagugcuccuguuauccucgauauccuggugucagaugugucugcagagacaacuggaaaggcuccaauaggcccaucguagauauaaauguaaaggauuauagcauuguuuccaguuaugugugcucaggacuuguuggagacacacccagaaaaaacgacagcuucagcaguagccauugccuagauccuaacaaugaggaagguggucauggagugaaaggcugggccuuugaugauggaaaugacguguggaugggaagaacuaucagcgagaaguuacgcucagguuaugaaaccuucaaagucauugaaggcugguccaaaccuaacuccaaauuacagguaaauaggcaagucauaguugaaagagguaacagguccgguuauucugguauuuucuccguugaaggcaaaagcugcaucaaucggugcuuuuauguggaguugauaaggggaaggaaagaggaaacugaagucugguggaccucaaacaguauuguuguguuuuguggcaccucagguacauauggaacaggcucauggccugauggggcggauaucaaucucaugccuauauaa

SEQ ID NO: 54236 - RNA, 1410 nt, Artificial Sequence
  derived and/or modified CDS sequence (wt) from neuraminidase__InfluenzaA__AFJ74731
augaauccaaaucaaaagauaauaacgauuggcucuguuucucucaccauuuccacaauaugcuucuucaugcaaauugccauccugauaacuacuguaacauugcauuucaagcaauaugaauucaacucccccccaaacaaccaagugaugcugugugaaccaacaauaauagaaagaaacauaacagagauaguguaucugaccaacaccaccauagagaaggaaauaugccccaaacuagcagaauacagaaauuggucaaagccgcaauguaacauuacaggauuugcaccuuuuucuaaggacaauucgauucggcuuuccgcugguggggacaucugggugacaagagaaccuuaugugucaugcgauccugacaaguguuaucaauuugcccuuggacagggaacaacacuaaacaacgugcauucaaaugacacaguacaugauaggaccccuuaucggacccuauugaugaaugaguuggguguuccauuucaucuggggaccaagcaagugugcauagcaugguccagcucaaguugucacgauggaaaagcauggcugcauguuugugugacgggggaugaugaaaaugcaacugcuagcuucauuuacaaugggaggcuuguagauaguauuguuucaugguccaaaaaaauccucaggacccaggagucagaaugcguuuguaucaauggaacuuguacaguaguaaugacugaugggagugcuucaggaaaagcugauacuaaaauacuauucauugaggaggggaaaaucguucauacuagcacauugucaggaagugcucagcaugucgaggagugcuccuguuauccucgauauccuggugucagaugugucugcagagacaacuggaaaggcuccaauaggcccaucguagauauaaacauaaaggauuauagcauuguuuccaguuaugugugcucaggacuuguuggagacacacccagaaaaaccgacagcuccagcaguagccauugcuuggauccaaacaaugaggaagguggucauggagugaaaggcugggccuuugaugauggaaaugacguguggaugggaagaacgaucagcgagaaguuacgcucaggauaugaaaccuucaaagucauugaaggcugguccaacccuaauuccaaauugcagauaaauaggcaagucauaguugacagagguaauagguccgguuauucugguauuuucucuguugaaggcaaaagcugcaucaaucggugcuuuuauguggaguugauaaggggaagaaaccaggaaacugaagucuuguggaccucaaacaguauuguuguguuuuguggcaccucagguacauauggaacaggcucauggccugauggggcggaaaucaaucucaugccuauauaa

SEQ ID NO: 54237 - RNA, 1413 nt, Artificial Sequence; identical to SEQ ID NO: 54230
  derived and/or modified CDS sequence (wt) from neuraminidase__InfluenzaA__AFJ74766

SEQ ID NO: 54238 - RNA, 1410 nt, Artificial Sequence
  derived and/or modified CDS sequence (wt) from neuraminidase__InfluenzaA__AFJ74767
augaauccaaaucaaaagauaauaacgauuggcucuguuucucucaccauuuccacaauaugcuucuucaugcaaauugccauccugauaacuacuguaacauugcauuucaagcaauaugaauucaacucccccccaaacaaccaagugaugcugugugaaccaacaauaauagaaagaaacauaacagagauaguguaucugaccaacaccaccauagagaaggaaauaugccccaaacuagcagaauacagaaauuggucaaagccgcaauguaacauuacaggauuugcaccuuuuucuaaggacaauucgauucggcuuuccgcugguggggacaucugggugacaagagaaccuuaugugucaugcgauccugacaaguguuaucaauuugcccuuggacagggaacaacacuaaacaacgugcauucaaaugacacaguacaugauaggaccccuuaucggacccuauugaugaaugaguuggguguuccauuucaucuggggaccaagcaagugugcauagcaugguccagcucaaguugucacgauggaaaagcauggcugcauguuugugugacgggggaugaugaaaaugcaacugcuagcuucauuuacaaugggaggcuuguagauaguauuguuucaugguccaaaaaaauccucaggacccaggagucagaaugcguuuguaucaauggaacuuguacaguaguaaugacugaugggagugcuucaggaaaagcugauacuaaaauacuauucauugaggaggggaaaaucguucauacuagcacauugucaggaagugcucagcaugucgaggagugcuccuguuauccucgauauccuggugucagaugugucugcagagacaacuggaaaggcuccaauaggcccaucguagauauaaacauaaaggauuauagcauuguuuccaguuaugugugcucaggacuuguuggagacacacccagaaaaaacgacagcuccagcaguagccauugcuuggauccaaacaaugaggaagguggucauggagugaaaggcugggccuuugaugauggaaaugacguguggaugggaagaacgaucagcgagaaguuacgcucaggauaugaaaccuucaaagucauugaaggcugguccaacccuaauuccaaauugcagauaaauaggcaagucauaguugacagagguaauagguccgguuauucugguauuuucucuguugaaggcaaaagcugcaucaaucggugcuuuuauguggaguugauaaggggaagaaaccaggaaacugaagucuuguggaccucaaacaguauuguuguguuuuguggcaccucagguacauauggaacaggcucauggccugauggggcggacaucaaucucaugccuauauaa

SEQ ID NO: 54239 - RNA, 1410 nt, Artificial Sequence
  derived and/or modified CDS sequence (wt) from neuraminidase__InfluenzaA__AFJ74783
augaauccaaaucaaaagauaauaacgauuggcucuguuucucucaccauuuccacaauaugcuucuucaugcaaauugccauccugauaacuacuguaacauugcauuucaagcaauaugaauucaacucccccccaaacaaccaagugaugcugugugaaccaacaauaauagaaagaaacauaacagagauaguguaucugaccaacaccaccauagagaaggaaauaugccccaaacuagcagaauacagaaauuggucaaagccgcaauguaacauuacaggauuugcaccuuuuucuaaggacaauucgauucggcuuuccgcugguggggacaucugggugacaagagaaccuuaugugucaugcgauccugacaaguguuaucaauuugcccuuggacagggaacaacacuaaacaacgugcauucaaaugacacaguacaugauaggaccccuuaucggacccuauugaugaaugaguuggguguuccauuucaucuggggaccaagcaagugugcauagcaugguccagcucaaguugucacgauggaaaagcauggcugcauguuugugugacgggggaugaugaaaaugcaacugcuagcuucauuuacaaugggaggcuuguagauaguauuguuucaugguccaaaaaaauccucaggacccaggagucagaaugcguuuguaucaauggaacuuguacaguaguaaugacugaugggagugcuucaggaaaagcugauacuaaaauacuauucauugaggaggggaaaaucguucauacuagcacauugucaggaagugcucagcaugucgaggagugcuccuguuauccucgauauccuggugucagaugugucugcagagacaacuggaaaggcuccaauaggcccaucguagauauaaacauaaaggauuauagcauuguuuccaguuaugugugcucaggacuuguuggagacacacccagaaaaaacgacagcuccagcaguagccauugcuuggauccaaacaaugaggaagguggucauggagugaaaggcugggccuuugaugauggaaaugacguguggaugggaagaacgaucagcgagaaguuacgcucaggauaugaaaccuucaaagucauugaaggcugguccaacccuaauuccaaauugcagauaaauaggcaagucauaguugacagagguaauagguccgguuauucugguauuuucucuguugaaggcaaaagcugcaucaaucggugcuuuuauguggaguugauaaggggaagaaaccaggaaacugaagucuuguggaccucaaacaguauuguuguguuuuguggcaccucagguacguauggaacaggcucauggccugauggggcggacaucaaucucaugccuauauaa

SEQ ID NO: 54240 - RNA, 1410 nt, Artificial Sequence; identical to SEQ ID NO: 48711
  derived and/or modified CDS sequence (wt) from neuraminidase__InfluenzaA__AFJ74807

SEQ ID NO: 54241 - RNA, 1410 nt, Artificial Sequence; identical to SEQ ID NO: 48711
  derived and/or modified CDS sequence (wt) from neuraminidase__InfluenzaA__AFJ74822

SEQ ID NO: 54242 - RNA, 1410 nt, Artificial Sequence
  derived and/or modified CDS sequence (wt) from neuraminidase__InfluenzaA__AFJ74834
augaauccaaaucaaaagauaauaacgauuggcucuguuucucucaccauuuccacaauaugcuucuucaugcaaauugccaucuugauaacuacuguaacauugcauuucaagcaauaugaauucaacucccccccaaacaaccaagugaugcugugugaaccaacaauaauagaaagaaacauaacagagauaguguaucugaccaacaccaccauagagaaggaaauaugccccaaacuagcagaauacagaaauuggucaaagccgcaaugugacauuacaggauuugcaccuuuuucuaaggacaauucgauuaggcuuuccgcugguggggacaucugggugacaagagaaccuuaugugucaugcgauccugacaaguguuaucaauuugcccuuggacagggaacaacacuaaacaacgugcauucaaaugacacaguacaugauaggaccccuuaucggacccuauugaugaaugaguuagguguuccauuucaucuggggaccaagcaagugugcauagcaugguccagcucaaguugucacgauggaaaagcauggcugcauguuuguguaacgggggaugauaaaaaugcaacugcuagcuucauuuacaaugggaggcuuguagauaguauuguuucaugguccaaaaaaauccucaggacccaggagucagaaugcguuuguaucaauggaacuuguacaguaguaaugacugaugggagugcuucaggaaaagcugauacuaaaauacuauucauugaggaggggaaaaucguucauacuagcacauugucaggaagugcucagcaugucgaggagugcuccugcuauccucgauauccuggugucagaugugucugcagagacaacuggaaaggcuccaauaggcccaucguagauauaaacauaaaggauuauagcauuguuuccaguuaugugugcucaggacuuguuggagacacacccagaaaaaacgacagcuccagcaguagccauugcuuggauccuaacaaugaagaagguggucauggagugaaaggcugggccuuugaugauggaaaugacguguggaugggaagaacgaucagcgagaaguuacgcucaggauaugaaaccuucaaagucauugaaggcugguccaacccuaauuccaaauugcagauaaauaggcaagucauaguugacagagguaauagguccgguuauucugguauuuucucuguugaaggcaaaagcugcaucaaucggugcuuuuauguggaguugauaaggggaagaaaagaggaaacugaagucuuguggaccucaaacaguauuguuguguuuuguggcaccucagguacauauggaacaggcucauggccugauggggcggacaucaaucucaugccuauauaa

SEQ ID NO: 54243 - RNA, 1410 nt, Artificial Sequence
  derived and/or modified CDS sequence (wt) from neuraminidase__InfluenzaA__AFJ74845
augaauccaaaucaaaagauaauaacaauuggcucuguuucucucaccauugccacaauaugcuuccuuaugcaaauugccauccugguaacuacuguaacauugcauuucaagcagcaugaaugcaacucccccccaaacaaccaagugaugcugugugaaccaacaauaauagaaagaaacauaacagagauaguguaucugaccaacaccaccauagagaaggaaauaugccccaaacuagcagaauacagaaauuggucaaagccgcaauguaacauuacaggauuugcaccuuuuucuaaggacaauucgauucggcuuuccgcugguggggacaucugggugacaagagaaccuuaugugucaugcgauccugacaaguguuaucaauuugcccuugggcagggaacaacacuaaacaacgggcauucaaaugacacaguacaugauaggaccccuuaccggacccuauugaugaaugaauuggguguuccauuucauuugggaaccaggcaagugugcauagcaugguccagcucaaguugucacgauggaaaagcguggcugcauguuuguguaacuggggaugauaaaaaugcaacugcuagcuucauuuacaaugggaggcuuguagauaguauugguucaugguccaaaaaaauacucagaacccaggagucggaaugcguuuguaucaauggaacuuguacaguaguaaugacugaugggagcgcuucaggaaaagcugauacuaaaauacuauucauugaggaggggaaaaucguucauauuagcacauugucgggaagugcucagcaugucgaggagugcuccuguuauccucgauauccuggugucagaugugucugcagagacaacuggaaaggcuccaauaggcccauuguagauauaaauguaaaggauuauagcauuguuuccaguuaugugugcucaggacuuguuggagacacacccagaaaaaacgacagcuucagcaguagccauugccuagauccuaacaaugaggaagguggucauggagugaaaggcugggcuuuugaugauggaaaugacguguggaugggaagaacgaucagcgagaaguuacgcucagguuaugaaaccuucaaagucaucgaaggcugguccaaaccuaacuccaaauuacagauaaauaggcaaguuauaguugaaagagguaacagguccgguuauucugguauuuucuccguugaaggcaaaagcugcaucaaucggugcuuuuauguggaguugauaaggggaaggaaagaggaaacugaagucugguggaccucaaacaguauuguuguguuuuguggcaccucugguacauauggaacaggcucauggccugauggggcggauaucaaucucaugccuauauaa

SEQ ID NO: 54244 - RNA, 1413 nt, Artificial Sequence
  derived and/or modified CDS sequence (wt) from neuraminidase__InfluenzaA__AFJ75039
augaacccaaaucaaaaaauaauaaccauuggaucaaucaguauagcaaucggaauaauuagucuaauguugcaaauaggaaauauuauuucaauaugggcuagucacucaauccaaacuggaagucaaaaccacacuggaauaugcaaccaaagaaucaucacauaugaaaacagcaccugggugaauaacacauauguuaauauuaacaacacuaguguuguugcugaaaaggacaaaacuucagugacauuggccggcaauucaucucuuuguucuaucaguggaugggcuauauacacaaaagacaacagcauaagaauuggcuccaaaggagauguuuuugucauaagagaaccuuucauaucauguucucacuuggaaugcagaaccuuuuuucugacccaaggugcucuauuaaaugacaaacauucaaaugggaccguaaaggacagaaguccuuauagggccuuaaugaguuguccucuaggugaagcuccguccccauacaauucaaaguucgaaucaguugcauggucagcaagcgcaugccaugauggcaugggcugguuaacaaucggaauuucugguccagacaauggagcuguggcuguacuaaaauacaacggaauaauaacugaaaccauaaaaaguuggaaaaagcgaauauuaagaacacaagagucugaaugugucuguaugaacgggucauguuucaccauaaugaccgauggcccgaguaaugggggcgccucguacaaaauuuucaagaucgaaaaggggaagguuacuaaaucaauagaguugaaugcacccaauuuucauuaugaggaauguuccuguuacccagacacuggcacagugauguguguaugcagagacaacuggcaugguucaaaucgaccuugggugucuuuuaaucaaaacuuggauuaucaaauaggauacaucugcaguggaguguucggugacaauccacgucccaaagauggggagggcagcugcaauccagugacuauugauggagcagacggaguaaaaggguuuucauacaaauaugguaaugguguuuggauaggaaggaccaaaaguaacagacuuagaaagggguuugagaugauuugggauccuaauggauggacaaauaccgacagugauuucucagugaaacaggauguuguagcaauaacugauuggucaggguacagcggaaguuuuguucaacauccugaguuaacaggauuggacuguauaagaccuugcuucuggguugaguuagucagagggcugccuagggaaaauacaacaaucuggacuagugggagcagcauuucuuuuuguggcguuaauagugauacugcaaacuggucuuggccagacggugcugaguugccguucaccauugacaaguag

SEQ ID NO: 54245 - RNA, 1410 nt, Artificial Sequence
  derived and/or modified CDS sequence (wt) from neuraminidase__InfluenzaA__AFJ75050
augaauccaaaucaaaagauaauaacgauuggcucuguuucucucaccauuuccacaauaugcuucuucaugcaaauugccaucuugauaacuacuguaacauugcauuucaagcaauaugaauucaacucccccccaaacaaccaagugaugcugugugaaccaacaauaauagaaagaaacauaacagagauaguguaucugaccaacaccaccauagagaaggaaauaugccccaaacuagcagaauacagaaauuggucaaagccgcaauguaacauuacaggauuugcaccuuuuucuaaggacaauucgguuaggcuuuccgcugguggggacaucugggugacaagagaaccuuaugugucaugcgauccugacaaguguuaucaauuugcccuuggacagggaacaacacuaaacaacgugcauucaaaugacacaguacaugauaggaccccuuaucggacccuauugaugaaugaguuagguguuccauuucaucuggggaccaagcaagugugcauagcaugguccagcucaaguugucacgauggaaaagcauggcugcauguuuguguaacgggggaugauaaaaaugcaacugcuagcuucauuuacaaugggaggcuuguagauaguauuguuucaugguccaaagaaauccucaggacucaggagucagaaugcguuuguaucaauggaacuuguacaguaguaaugacugaugggagugcuucaggaaaagcugauacuaaaauacuauucauuguggaggggaaaaucguucauacuagcgcauugucaggaagugcucagcaugucgaggagugcuccugcuauccucgauauccuggugucagaugugucugcagagacaacuggaaaggcuccaauaggcccauaguagauauaaacauaaaggauuauagcauuguuuccaguuaugugugcucaggacuuguuggagacacacccagaaaaaacgacagcuccagcaguagccauugcuuggauccuaacaaugaagaagguggucauggagugaaaggcugggccuuugaugauggaaaugacguguggaugggaagaacgaucagcgagaaguuacgcucaggauaugaaaccuucaaagucauugaaggcugguccaacccuaauuccaaauugcagauaaauaggcaagucauaguugacagagguaauagguccgguuauucugguauuuucucuguugaaggcaaaagcugcaucaaucggugcuuuuauguggaguugauaagaggaagaaaagaggaaacugaagucuuguggaccucaaacaguauuguuguguuuuguggcaccucagguacauauggaacaggcucauggccugauggggcggacaucaaucucaugccuauauaa

SEQ ID NO: 54246 - RNA, 1410 nt, Artificial Sequence
  derived and/or modified CDS sequence (wt) from neuraminidase__InfluenzaA__AFJ75094
augaauccaaaucaaaagauaauaacgauuggcucuguuucucucaccauuuccacaauaugcuucuucaugcaaauugccaucuugauaacuacuguaacauugcauuucaagcaauaugaauucaacucccccccaaacaaccaagugaugcugugugaaccaacaauaauagaaaaaaacauaacagagauaguguaucugaccaacaccaccauagagaaggaaauaugccccaaacuagcagaauacagaaauuggucaaagccgcaaugugacauuacaggauuugcaccuuuuucuaaggacaacucgauuaggcuuucagcugguggggacaucugggugacaagagaaccuuaugugucaugcgauccugacaaguguuaucaauuugcccuuggacagggaacaacacuaaacaacgugcauucaaaugacacaguacgugauaggaccccuuaucggacccuauugaugaaugaguuagguguuccuuuucaucuggggaccaagcaagugugcauagcauggucaagcucaaguugucacgauggaaaagcauggcugcauguuuguauaacgggggaugauaaaaaugcaacugcuagcuucauuuacaaugggaggcuuguagauaguauuguuucaugguccaaagaaauccucaggacccaggagucagaaugcguuuguaucaauggaacuuguacaguaguaaugacugaugggagugcuucaggaaaagcugauacuaaaauacuauucauugaggaggggaaaauaguucauacuagcacauugucaggaagugcucagcaugucgaggagugcuccugcuauccucgauauccuggugucagaugugucugcagagacaacuggaaaggcuccaauaggcccaucguagauauaaacauaaaggaucauagcauuguuuccaguuauguguguucaggacuuguuggagacacacccagaaaaaacgacagcuccagcaguagcaauuguuuggauccuaacaaugaagaagguggucauggagugaaaggcugggccuuugaugauggaaaugacguguggaugggaagaacgaucagcgagaagucacgcuuaggauaugaaaccuucaaagucauugaaggcugguccaacccuaauuccaaauugcagauaaauaggcaagucauaguugacagagguaauagguccgguuauucugguauuuucucuguugaaggcaaaagcugcaucaaucggugcuuuuauguggaguugauaaggggaagaaaagaggaaauugaagucuuguggaccucaaacaguauuguuguguuuuguggcaccucagguacauauggaacaggcucauggccugauggggcggacaucaauaucaugccuauauaa

SEQ ID NO: 54247 - RNA, 1413 nt, Artificial Sequence
  derived and/or modified CDS sequence (wt) from neuraminidase__InfluenzaA__AFJ75104
augaacccaaaucaaaaaauaauaaccauuggaucaaucaguauagcaaucggaauaauuagucuaauguugcaaauaggaaauauuauuucaauaugggcuagucacucaauccaaacuggaagucaaaaccacacuggaauaugcaaccaaagaaucauuacauaugaaaacagcaccugggugaaucacacauauguuaauauuaacaacacuaauguuguugcuggaaaggacaaaacuccaguaacauuggccggcaacucaucucuuuguucuaucaguggaugggcuauacacacaaaagacaacagcauaagaauuggcuccaaaggagauguuuuugucauaagagaaccuuucauaucauguucucacuuggaaugcaaaaccuuuuuucugacccaaggcgcucuauuaaaugacaaacauucaaaugggaccguaaaggacagaaguccuuauagggccuuaaugagcuguccucuaggugaagcuccguccccauacaauucaaaguucgaaucaguugcauggucagcaagcgcaugccaugauggcauaggcugguuaacaaucggaauuucugguccagacaauggagcuguggcuguacuaaaauacaacggaauaauaacuggaaccauaaaaaguuggaaaaagcaaauauuaagaacacaagagucugaaugugucuguaugaacgggucauguuucaccauaaugaccgaugguccgaguaauggggcagccucguacaaaauuuucaagaucgaaaaggggaagguuacuaaaucaauggaguuaaaugcacccaauuuucauuaugaggaauguucuuguuacccagacacuggcacagugauguguguaugcagggacaacuggcaugguucaaaucgaccuugggugucuuuuaaucaaaacuuggauuaucaaauaggauacaucugcaguggaguguucggugacaauccgcgucccgaagauggagagggcagcugcaauccagugacuguugauggagcaaacggaguaaaaggguuuucauacaaauaugguaaugguguuuggauaggaaggaccaaaaguaacagaauuagaaagggguuugagaugauuugggauccuaauggauggacaaauaccgacagugauuucucagugaaacaggauauuguagcaauaacugauuggucaggguacagcggaaguuucguccaacauccugaguuaacaggauuggacuguauaagaccuugcuucuggguugaguuagucagagggcugccuagagaaaauacgacaaucuggacuaguggaagcagcauuucuuuuuguggcguuaauagugauauugcaaacuggucuuggccagacggugcugaguugccguucaccauugacaaguag

SEQ ID NO: 54248 - RNA, 1410 nt, Artificial Sequence; identical to SEQ ID NO: 48291
  derived and/or modified CDS sequence (wt) from neuraminidase__InfluenzaA__AFJ75114

SEQ ID NO: 54249 - RNA, 1410 nt, Artificial Sequence
  derived and/or modified CDS sequence (wt) from neuraminidase__InfluenzaA__AFJ75452
augaauccaaaucaaaagauaauaacgauuggcucuguuucucucaccauuuccacaauaugcuucuucaugcaaauugccaucuugauaacuacuguaacauugcauuucaagcaauaugaauucaacucccccccaaacaaccaagugaugcugugugaaccaacaauaauagaaagaaacauaacagagauaguguaucugaccaacaccaccauagagaaggaaauaugccccaaacuagcagaauacagaaauuggucaaagccgcaaugugacauuacaggauuugcaccuuuuucuaaggacaauucgauuaggcuuuccgcugguggggacaucugggugacaagagaaccuuaugugucaugcgauccugacaaguguuaucaauuugcccuuggacagggaacaacacuaaacaaugugcauucaaaugacacaguacgugauaggaccccuuaucggacccuauugaugaaugaguuagguguuccuuuucaucuggggaccaagcaagugugcauagcaugguccagcucaaguugucacgauggaaaagcauggcugcauguuuguauaacgggggaugauaaaaaugcaacugcuagcuucauuuacaaugggaggcuuguagauaguauuguuucaugguccaaagaaauccucaggacccaggagucagaaugcguuuguaucaauggaacuuguacaguaguaaugacugaugggagugcuucaggaaaagcugauacuaaaauacuauucauugaggaggggaaaaucguucauacuagcacauugucaggaagugcucagcaugucgaggagugcuccugcuauccucgauauccuggugucagaugugucugcagagacaacuggaaaggcuccaauaggcccaucguagauauaaacauaaaggaucauagcauuguuuccaguuauguguguucaggacuuguuggagacacacccagaaaaaacgacaguuccagcaguagccauuguuuggauccuaacaaugaagaagguggucauggagugaaaggcugggccuuugaugauggaaaugacguguggaugggaagaacgaucagcgagaagucacgcuuaggguaugaaaccuucaaagucauugaaggcugguccaacccuaaguccaaauugcagauaaauaggcaagucauaguugacagagguaauagguccgguuauucugguauuuucucuguugaaggcaaaagcugcaucaaucggugcuuuuauguggaguugauaaggggaagaaaagaggaaacugaagucuuguggaccucaaacaguauuguuguguuuuguggcaccucagguacauauggaacaggcucauggccugauggggcggacaucaaucucaugccuauauaa

SEQ ID NO: 54250 - RNA, 1410 nt, Artificial Sequence
  derived and/or modified CDS sequence (wt) from neuraminidase__InfluenzaA__AFJ75463
augaauccaaaucaaaagauaauaacgauuggcucuguuucucucaccauuuccacaauaugcuucuucaugcaaauugccaucuugauaacuacuguaacauugcauuucaagcaauaugaauucaacucccccccaaacaaccaagugaugcugugugaaccaacaauaauagaaagaaacauaacagagauaguguaucugaccaacaccaccauagagaaggaaauaugccccaaacuagcagaauacagaaauuggucaaagccgcaaugugacauuacaggauuugcaccuuuuucuaaggacaauucgauuaggcuuuccgcugguggggacaucugggugacaagagaaccuuaugugucaugcgauccugacaaguguuaucaauuugcccuuggacagggaacaacacuaaacaacgugcauucaaaugacacaguacgugauaggaccccuuaucggacccuauugaugaaugaguuagguguuccuuuucaucuggggaccaagcaagugugcauagcaugguccagcucaaguugucacgauggaaaagcauggcugcauguuuguauaacgggagaugauaaaaaugcaacugcuagcuucauuuacaaugggaggcuuguagauaguauuguuucaugguccaaagaaauccucaggacccaggagucagaaugcguuuguaucaauggaacuuguacaguaguaaugacugaugggagugcuucaggaaaagcugauacuaaaauacuauucauugaggaggggaaaaucguucauacuagcacauugucaggaagugcucagcaugucgaggagugcuccugcuauccucgauauccuggugucagaugugucugcagagacaacuggaaaggcuccaauaggcccaucguagauauaaacauaaaggaucauagcauuguuuccaguuauguguguucaggacuuguuggagacacacccagaaaaaacgacagcuccagcaguagccauuguuuggauccuaacaaugaagaagguggucauggagugaaaggcugggccuuugaugauggaaaugacguguggaugggaagaacgaucagcgagaagucacgcuuaggguaugaaaccuucaaagucauugaaggcugguccaacccuaaguccaaauugcagauaaauaggcaagucauaguugacagagguaauagguccgguuauucugguauuuucucuguugaaggcaaaagcugcaucaaucggugcuuuuauguggaguugauaaggggaagaaaagaggaaacugaagucuuguggaccucaaacaguauuguuguguuuuguggcaccucagguacauauggaacaggcucauggccugauggggcggacaucaaucucaugccuauauaa

SEQ ID NO: 54251 - RNA, 1413 nt, Artificial Sequence
  derived and/or modified CDS sequence (wt) from neuraminidase__InfluenzaA__AFJ75552
augaacccaaaucaaaaaauaauaaccauuggaucaaucaguauagcaaucggaauaauuagucuaauguugcaaauaggaaauauuauuucaauaugggcuagucacucaauccaaacuggaagucaaaaccacacuggaauaugcaaccaaagaaucauuacauaugaaaacagcaccugggugaaucacacauauguuaauauuaacaacacuaauguuguugcuggaaaggacaaaacuccagugacauuggccggcaacucaucucuuuguucuaucaguggaugggcuauacacacaaaagacaacagcauaagaauuggcuccaaaggagauguuuuugucauaagagaaccuuucauaucauguucucacuuggaaugcaaaaccuuuuuucugacccaaggcgcucuauuaaaugacaaacauucaaaugggaccguaaaggacagaaguccuuauagggccuuaaugagcuguccucuaggugaagcuccguccccauacaauucaaaguucgaaucaguugcauggucagcaagcgcaugccaugauggcauaggcugguuaacaaucggaauuucugguccagacaauggagcuguggcuguacuaaaauacaacggaauaauaacuggaaccauaaaaaguuggaaaaagcaaauauuaagaacacaagagucugaaugugucuguaugaacgggucauguuucaccauaaugaccgaugguccgaguaauggggccgccucguacaaaauuuucaagaucgaaaaggggaagguuacuaaaucaauggaguuaaaugcacccaauuuucauuaugaggaauguucuuguuacccagacacuggcacagugauguguguaugcagggacaacuggcaugguucaaaucgaccuugggugucuuuuaaucaaaacuuggauuaucaaauaggauacaucugcaguggaguguucggugacaauccgcgucccgaagauggagagggcagcugcaauccagugacuguugauggagcaaacggaguaaaaggguuuucauacaaauaugguaaugguguuuggauaggaaggaccaaaaguaacagaauuagaaagggguuugagaugauuugggauccuaauggauggacaaauaccgacagugauuucucagugaaacaggauauuguagcaauaacugauuggucaggguacagcggaaguuucguccaacauccugaguuaacaggauuggacuguauaagaccuugcuucuggguugaguuagucagagggcugccuagagaaaauacgacaaucuggacuaguggaagcagcauuucuuuuuguggcguuaauagugauauugcaaacuggucuuggccagacggugcugaguugccguucaccauugacaaguag

SEQ ID NO: 54252 - RNA, 1413 nt, Artificial Sequence
  derived and/or modified CDS sequence (wt) from neuraminidase__InfluenzaA__AFJ75574
augaacccaaaucaaaaaauaauaaccauuggaucaaucaguauagcaaucggaauaauuaguuuaauguugcaaauaggaaauauuauuucaauaugggcuagucacucaauccaaacuggaagucaaaaccacacuggaauaugcaaccaaagaaucauuacauaugaaaacagcaccugggugaaucacacauauguuaauauuaacaacacuaauguuguugcuggaaaggacaaaacuccaguuacauuggccggcaacucaucucuuuguucuaucaguggaugggcuauacacacaaaagacaacagcauaagaauuggcuccaaaggagauguuuuugucauaagagaaccuuucauaucauguucucacuuggaaugcaaaaccuuuuuucugacccaaggcgcucuauuaaaugacaaacauucaaaugggaccguaaaggacagaaguccuuauagggccuuaaugagcuguccucuaggugaagcuccguccccauacaauucaaaguucgaaucaguugcauggucagcaagcgcaugccaugauggcauaggcugguuaacaaucggaauuucugguccagacaauggagcuguggcuguacuaaaauacaacggaauaauaacuggaaccauaaaaaguuggaaagggcagauauuaagaacacaagagucugaaugugucuguaugaacgggucauguuucaccauaaugaccgaugguccgaguaauggggccgccucguacaaaauuuucaagaucgaaaaggggaagguuacuaaaucaauggaguuaaaugcacccaauuuucauuaugaggaauguucuuguuacccagacacuggcacagugauguguguaugcagggacaacuggcaugguucaaaucgaccuugggugucuuuuaaucaaaacuuggauuaucaaauaggauacaucugcaguggaguguucggugacaauccgcgucccgaagauggagaaggcagcugcaauccagugacuguugauggagcaaacggaguaaaaggguuuucauacaaauaugguaaugguguuuggauaggaaggaccaaaaguaacagaauuagaaagggguuugagaugauuugggauccuaauggauggacaaauaccgacagugauuucucagugaaacaggauauuguagcaauaacugauuggucaggguacagcggaaguuucguccaacauccugaguuaacaggauuggacuguauaagaccuugcuucuggguugaguuagucagagggcugccuagagaaaauacgacaaucuggacuaguggaagcagcauuucuuuuuguggcguuaauagugauauugcaaacuggucuuggccagacggugcugaguugccguucaccauugacaaguag

SEQ ID NO: 54253 - RNA, 1410 nt, Artificial Sequence
  derived and/or modified CDS sequence (wt) from neuraminidase__InfluenzaA__AFJ75585
augaauccaaaucaaaagauaauaacgauuggcucuguuucucucaccauuuccacaauaugcuucuuuaugcaaauugccaucuugauaacuacuguaacauugcauuucaagcaauaugaauucaacucccccccaaacaaccaagugaugcugugugaaccaacaauaauagaaagaaacauaacagagauaguguaucugaccaacaccaccauagagaaggaaauaugccccaaacuagcagaauacagaaauuggucaaagccgcaaugugacauuacaggauuugcaccuuuuucuaaggacaauucgauuaggcuuuccgcugguggggacaucugggugacaagagaaccuuaugugucaugcgauccugacaaguguuaucaauucgcccuuggacagggaacaacacuaaacaaugugcauucaaaugacacaguacgugauaggaccccuuaucggacccuauugaugaaugaguuagguguuccuuuucaucuggggaccaagcaagugugcauagcaugguccagcucaaguugucacgauggaaaagcauggcugcauguuuguauaacgggggaugauaaaaaugcaacugcuagcuucauuuacaaugggaggcuuguagauaguauuguuucaugguccaaagaaauccucaggacccaggagucagaaugcguuuguaucaauggaacuuguacaguaguaaugacugaugggagugcuucaggaaaagcugauacuaaaauacuauucauugaggaggggaaaaucguucauacuagcacauugucaggaagugcucagcaugucgaggagugcuccugcuauccucgauauccuggugucagaugugucugcagagacaacuggaaaggcuccaauaggcccaucguagauauaaacauaaaggaucauagcauuguuuccaguuauguguguucaggacuuguuggagacacacccagaaaaaacgacagcuccagcaguagccauuguuuggauccuaacaaugaagaagguggucauggagugaaaggcugggccuuugaugauggaaaugacguguggaugggaagaacgaucagcgagaagucacgcuuaggguaugaaaccuucaaagucauugaaggcugguccaacccuaaguccaaauugcagauaaauaggcaagucauaguugacagagguaauagguccgguuauucugguauuuucucuguugaaggcaaaagcugcaucaaucggugcuuuuauguggaguugauaaggggaagaaaagaggaaacugaagucuuguggaccucaaacaguauuguuguguuuuguggcaccucagguacauauggaacaggcucauggccugauggggcggacaucaaucucaugccuauauaa

SEQ ID NO: 54254 - RNA, 1410 nt, Artificial Sequence
  derived and/or modified CDS sequence (wt) from neuraminidase__InfluenzaA__AFJ75596
augaauccaaaucaaaagauaauaacgauuggcucuguuucucucaccauuuccacaauaugcuucuucaugcaaacugccaucuugauaacuacuguaacauugcauuucaagcaauaugaauucaacucccccccaaacaaccaagugaugcugugugaaccaacaauaauagaaagaaacauaacagagauaguguaucugaccaacaccaccauagagaaggaaauaugccccaaauuagcagaauacagaaauuggucaaagccgcaauguggcauuacaggauuugcaccuuuuucuaaggacaauucgauuaggcuuuccgcugguggggacaucugggugacaagagaaccuuaugugucaugcgauccugacaaguguuaucaauuugcccuuggacagggaacaacacuaaacaacgugcauucaaauaacacaguacgugauaggaccccuuaucggacccucuugaugaaugaguuagguguuccuuuucaucuggggaccaagcaagugugcauagcaugguccagcucaaguugucacgauggaaaagcauggcugcauguuuguauaacgggggaugauaaaaaugcaacugcuagcuucauuuacaaugggaggcuuguagauaguauuguuucaugguccaaagaaauccucaggacucaggagucagaaugcguuuguaucaauggaacuuguacaguaguaaugacugaugggagugcuucaggaaaagcugauacuaaaauacuauucauugaggaggggaaaaucguucauacuagcacauugucaggaagugcucagcaugucgaggagugcuccugcuauccucgauauccuggugucagaugugucugcagagacaacuggaaaggcuccaauaggcccaucguagauauaaacauaaaggaucauagcauuguuuccaguuauguguguucaggacuuguuggagacacacccagaaaaaacgacagcuccagcaguagccauuguuuggauccuaacaaugaagaagguggucauggagugaaaggcugggccuuugaugauggaaaugacguguggaugggaagaacgaucagcgagaagucacgcuugggguaugaaaccuucaaagucauugaaggcugguccaacccuaaguccaaauugcagauaaauaggcaagucauaguugacagagguaauagguccgguuauucugguauuuucucuguugaaggcaaaagcugcaucaaucggugcuuuuauguggaguugauaaggggaagaaaagaggaaacugaagucuuguggaccucaaacaguauuguuguguuuuguggcaccucagguacauauggaacaggcucauggccugauggggcggacaucaaucucaugccuauauaa

SEQ ID NO: 54255 - RNA, 1410 nt, Artificial Sequence
  derived and/or modified CDS sequence (wt) from neuraminidase__InfluenzaA__AFJ75607
augaauccaacucaaaagauaauaacgauuggcucuguuucucucaccauuuccacaauaugcuucuucaugcaaacugccaucuugauaacuacuguaacauugcauuucaagcaauaugaauucaacucccccccaaacaaccaagugaugcugugugaaccaacaauaauagaaagaaacauaacagagauaguguaucugaccaacaccaccauagagaaggaaauaugccccaaauuagcagaauacagaaauuggucaaaaccgcaaugugacauuacaggauuugcaccuuuuucuaaggacaauucgauuaggcuuuccgcugguggggacaucugggugacaagagaaccuuaugugucaugcgauccugaaaaguguuaucaauuugcccuuggacagggaacaacacuaaacaacgugcauucaaauaacacaguacgugauaggaccccuuaucggacccuauugaugaaugaguuagguguuccuuuucaucuggggaccaagcaagugugcauagcaugguccagcucaagcugucacgauggaaaagcauggcugcauguuuguauaacgggggaugauaaaaaugcaacugcuagcuucauuuacaaugggaggcuuguagauaguauuguuucaugguccaaagaaauccucaggacccaggagucagaaugcguuuguaucaauggaacuuguacaguaguaaugacugaugggagugcuucaggaaaagcugauacuaaaauacuauucaucgaggaggggaaaaucguucauacuagcaaauugucaggaagugcucagcaugucgaggagugcuccugcuauccucgauauccuggugucagaugugucugcagagacaacuggaaaggcuccaauaggcccaucguagauauaaacauaaaggaucauagcauuguuuccaguuauguguguucaggacuuguuggagacacacccagaaaaaaugacagcuccggcaguagccauuguuuggauccuaacaaugaagaagguggucauggagugaaaggcugggccuuugaugauggaaaugacguguggaugggaagaacgaucagcgagaagucacgcuuaggguaugaaaccuucaaagucauugaaggcugguccaacccuaaguccaaauugcagauaaauaggcaagucauaguugacagagguaauagguccgguuauucugguauuuucucuguugaaggcaaaagcugcaucaaucggugcuuuuauguggaguugauaaggggaagaaaagaggaaacugaaguuuuguggaccucaaacaguauuguuguguuuuguggcaccucagguacauauggaacaggcucauggccugauggggcggacaucaaucucaugccuauauaa

SEQ ID NO: 54256 - RNA, 1410 nt, Artificial Sequence
  derived and/or modified CDS sequence (wt) from neuraminidase__InfluenzaA__AFJ75633
augaauccaaaucaaaagauaauaacgauuggcucuguuucucucaccauuuccacaauaugcuucuucaugcaaauugccaucuugauaacuacuguaacauugcauuucaagcaauaugaauucaacucccccccaaacaaccaagugaugcugugugaaccaacaauaauagaaagaaacauaacagagauaguguaucugaccaacaccaccauagagaaggaaauaugccccaaacuagcagaauacagaaauuggucaaagccgcaaugugacauuacaggauuugcaccuuuuucuaaggacaauucgauuaggcuuuccgcugguggggacaucugggugacaagagaaccuuaugugucaugcgauccugacaaguguuaucaauuugcccuuggacagggaacaacacuaaacaacgugcauucaaaugacacaguacgugauaggaccccuuaucggacccuauugaugaaugaguuagguguuccuuuucaucuggggaccaagcaagugugcauagcaugguccagcucaaguugucacgauggaaaagcauggcugcauguuuguauaacgggggaugauaaaaaugcaacugcuagcuucauuuacaaugggaggcuuguagauaguguuguuucaugguccaaagacauccucaggacccaggagucagaaugcguuuguaucaauggaacuuguacaguaguaaugacugaugggagugcuucaggaaaagcugauacuaaaauacuauucauugaggaggggaaaaucguucauacuagcacauugucaggaagugcucagcaugucgaggagugcuccugcuauccucgauauccuggugucagaugugucugcagagacaacuggaaaggcuccaauaggcccaucguagauauaaacauaaagaaucauagcauuguuuccaguuauguguguucaggacuuguuggagacacacccagaaaaaacgacagcuccagcaguagccauuguuuggauccuaacaaugaagaagguggucauggagugaaaggcugggccuuugaugauggaaaugacguguggaugggaagaacgaucagcgagaagucacgcuuaggguaugaaaccuucaaagucauugaaggcugguccaacccuaaguccaaauugcagauaaauaggcaagucauaguugacagagguaauagguccgguuauucugguauuuucucuguugaaggcaaaagcugcaucaaucggugcuuuuauguggaguugauaaggggaagaaaagaggaaacugaagucuuguggaccucaaacaguauuguuguguuuuguggcaccucagguacauauggaacaggcucauggccugauggggcggacaucaaucucaugccuauauaa

SEQ ID NO: 54257 - RNA, 1413 nt, Artificial Sequence
  derived and/or modified CDS sequence (wt) from neuraminidase__InfluenzaA__AFJ75654
augaacccaaaucaaaagauaauaaccauuggaucaaucaguauagcaaucggaauaauuagucuaauguugcaaauaggaaauauuauuucaauaugggcuagucacucaauccaaacuggaagucaaaacaacacuggaauaugcaaccaaagaaucaucacauaugaaaacagcaccugggugaaucacacauauguuaauauuaacaacacuaauguuguugcuggagaggacaaaacuucagugacauuggccggcaauucaucucuuuguucuaucaguggaugggcuauauacacaaaagacaacagcauaagaauuggcuccaaaggagauguuuuugucauaagagaaccuuucauaucauguucucacuuggaaugcagaaccuuuuuucugacccaaggcgcucuauuaaaugacaaacauucaaaugggaccguaaaggacagaaguccuuauagggccuuaaugagcuguccucuaggugaagcuccguccccauacaauucaaaguucgaaucaguugcauggucagcaagcgcaugccaugauggcaugggcugguuaacaaucggaauuucugguccagacaauggagcuguggcuguacuaaaauacaacggaauaauaacuggaaccauaaaaaguuggaaaaagcaaauauuaagaacacaagagucugaaugugucuguaugaacgggucauguuucaccauaaugaccgauggcccgaguaauaaggccgccucguacaaaauuuucaagaucgaaaaggggaagguuacuaaaucaauagaguugaaugcacccaauuuuuauuaugaggaaugcuccuguuacccagacacuggcauagugauguguguaugcagggacaacuggcaugguucaaaucgaccuugggugucuuuuaaucaaaacuuggauuaucaaauaggauacaucugcaguggaguguuuggugacaauccgcgucccgaagauggagagggcagcugcaauccagugacuguugauggagcaaacggaguaaaaggguuuucauacaaauaugguaaugguguuuggauaggaaggaccaaaaguaacagacuuagaaagggguuugagaugauuugggauccuaauggauggacaaauaccgacagugauuucucagugaaacaggauguuguagcaauaacugauuggucaggguacagcggaaguuucguccaacauccugaguuaacaggauuggacuguauaagaccuugcuucuggguugaguuagucagagggcugccuagagaaaauacaacaaucuggacuagugggagcagcauuucuuuuuguggcguuaauagugauacugcaaacuggucuuggccagacggugcugaguugccguucaccauugacaaguag

SEQ ID NO: 54258 - RNA, 1410 nt, Artificial Sequence
  derived and/or modified CDS sequence (wt) from neuraminidase__InfluenzaA__AFJ75665
augaauccaaaucaaaagauaauaacaauuggcucuguuucucucacuauuuccacaauaugcuucuuuaugcaaauugccaucuugauaacuacuguaacauugcauuucaagcaauaugaauucaacucccccccaaacaaccaagugaugcugugugaaccaacaauaauagaaagaaacauaacagagauaguguaucugaccaacaccaccauagagaaggaaauaugccccaaacuagcagaauacagaaauuggucaaagccgcaaugugacauuacaggauuugcaccuuuuucuaaggacaauucgauuaggcuuuccgcugguggggacaucugggugacaagagaaccuuaugugucaugcgauccugacaaguguuaucaauucgcccuuggacagggaacaacacuaaacaaugugcauucaaaugacacaguacgugauaggaccccuuaucggacccuauugaugaaugaguuagguguuccuuuucaucuggggaccaagcaagugugcauagcaugguccagcucaaguugucacgauggaaaagcauggcugcauguuuguauaacgggggaugauaaaaaugcaacugcuagcuucauuuacaaugggaggcuuguagauaguauuguuucaugguccaaagaaauccucaggacccaggagucagaaugcguuuguaucaauggaacuuguacaguaguaaugacugaugggagugcuucaggaaaagcugauacuaaaauacuauucauugaggaggggaaaaucguucauacuagcacauugucaggaagugcucagcaugucgaggagugcuccugcuauccucgauauccuggugucagaugugucugcagagacaacuggaaaggcuccaauaggcccaucguagauauaaacauaaaggaucauagcauuguuuccaguuauguguguucaggacuuguuggagacacacccagaaaaaacgacagcuccagcaguagccauuguuuggauccuaacaaugaagaagguggucauggagugaaaggcugggccuuugaugauggaaaugauguguggaugggaagaacgaucagcgagaagucacgcuuaggguaugaaaccuucaaagucauugaaggcugguccaacccuaaguccaaauugcagauaaauaggcaagucauaguugacagagguaacagguccgguuauucugguauuuucucuguugaaggcaaaagcugcaucaaucggugcuuuuauguggaguugauaaggggaagaaaagaggaaacugaagucuuguggaccucaaacaguauuguuguguuuuguggcaccucagguacauauggaacaggcucauggccugauggggcggacaucaaucucaugccuauauaa

SEQ ID NO: 54259 - RNA, 1413 nt, Artificial Sequence
  derived and/or modified CDS sequence (wt) from neuraminidase__InfluenzaA__AFJ75676
augaacccaaaucaaaaaauaauaaccauuggaucaaucaguauagcaaucggaauaauuagucuaauguugcaaauaggaaauauuauuucaauaugggcuagucacucaauccaaacuggaagucaaaaccacacuggaauaugcaaccaaagaaucauuacauaugaaaacagcaccugggugaaucacacauauguuaauauuaacaacacuaauguuguugcuggaaaggacaaaacuccagugacauuggccggcaacucaucucuuuguucuaucaguggaugggcuauacacacaaaagacaacagcauaagaauuggcuccaaaggagauguuuuugucauaagagaaccuuucauaucauguucucacuuggaaugcaaaaccuuuuuucugacccaaggcgcucuauuaaaugacaaacauucaaaugggaccguaaaggacagaaguccuuauagggccuuaaugagcuguccucuaggugaagcuccguccccauacaauucaaaguucgaaucaguugcauggucagcaagcgcaugccaugauggcauaggcugguuaacaaucggaauuucugguccagacaauggagcuguggcuguacuaaaauacaacggaauaauaacuggaaccauaaaaaguuggaaaaagcaaauauuaagaacacaagagucugaaugugucuguaugaacgggucauguuucaccauaaugaccgaugguccgaguaauggggccgccucguacaaaauuuucaagaucgaaaaggggaagguuacuaaaucaauggaguuaaaugcacccaauuuucauuaugaggaauguucuuguuacccagacacuggcacagugauguguguaugcagggacaacuggcaugguucaaaucgaccuugggugucuuuuaaucaaaacuuggauuaucaaauaggauacaucugcaguggaguguucggugacaauccgcgucccaaagauggagagggcagcugcaauccagugacuguugauggagcaaacggaguaaaaggguuuucauacaaauaugguaaugguguuuggauaggaaggaccaaaaguaacagaauuagaaagggguuugagaugauuugggauccuaauggauggacaaauaccgacagugauuucucagugaaacaggauauuguagcaauaacugauuggucaggguacagcggaaguuucguccaacauccugaguuaacaggauuggacuguauaagaccuugcuucuggguugaguuagucagagggcugccuagagaaaauacaacaaucuggacuaguggaagcagcauuucuuuuuguggcguuaauagugauauugcaaacuggucuuggccagacggugcugaguugccguucaccauugacaaguag

SEQ ID NO: 54260 - RNA, 1413 nt, Artificial Sequence
  derived and/or modified CDS sequence (wt) from neuraminidase__InfluenzaA__AFJ75687
augaacccaaaucaaaagauaauaaccauuggaucaaucaguauagcaaucggaauaauuagucuaauguugcaaauaggaaauauuauuucaauaugggcuagucacucaauccaaacugggagucaaaacaacacuggaauaugcaaccaaagaaucaucacauaugaaaacagcaccugggugaaucacacauauguuaauauuaacaacacuaauguuguugcuggagaggacaaaacaucagugacauuggccggcaauucaucucuuuguucuaucaguggaugggcuauauacacaaaagacaacagcauaagaauuggcuccaaaggagauguuuuugucauaagagaaccuuucauaucauguucucacuuggaaugcagaaccuuuuuucugacccaaggcgcucuauuaaaugacaaacauucaaaugggaccguaaaggacagaaguccuuauagggccuugaugagcuguccucuaggugaagcuccguccccauacaauucaaaguucgaaucaguugcauggucagcaagcgcaugccaugauggcaugggcugguuaacaaucggaauuucugguccagacaauggagcuguggcuguacuaaaauacaacggaauaauaacuggaaccauaaaaaguuggaaaaagcaaauauuaagaacacaagagucugaaugugucuguaugaacgggucauguuucaccauaaugaccgauggcccgaguaauaaggccgccucguacaaaauuuucaagaucgaaaaggggaagguuacuaaaucaauagaguugaaugcacccaauuuuuauuaugaggaaugcuccuguuacccagauacuggcauagugauguguguaugcagggacaacuggcaugguucaaaucgaccuugggugucuuuuaaucaaaacuuggauuaucaaauaggauacaucugcaguggaguguuuggugacaauccgcgucccgaagauggagagggcagcugcaauccagugacuguugauggagcaaacggaguaaaaggguuuucauacaaauaugguaaugguguuuggauagggaggaccaaaaguaacagacuuagaaagggguuugagaugauuugggauccuaauggauggacaaauaccgacagugauuucucagugaaacaggauguuguagcaauaacugauuggucaggguacagcggaaguuucguccaacauccugaguuaacaggauuggacuguauaagaccuuguuucuggguugaguuagucagagggcugccuagagaaaauacaacaaucuggacuagugggagcagcauuucuuuuuguggcguuaauagugauacugcaaacuggucuuggccagacggugcugaguugccguucaccauugacaaguag

SEQ ID NO: 54261 - RNA, 1410 nt, Artificial Sequence; identical to SEQ ID NO: 48750
  derived and/or modified CDS sequence (wt) from neuraminidase__InfluenzaA__AFJ76122

SEQ ID NO: 54262 - RNA, 1410 nt, Artificial Sequence
  derived and/or modified CDS sequence (wt) from neuraminidase__InfluenzaA__AFJ76134
augaauccaaaccaaaagauaauaaccauugguucggucuguaugacaauuggaauggcuaacuuaauauuacaaauuggaaacauaaucucaauauggauuagccacucaauucaacuugggaaucaaaaucagauugaaacaugcaaucaaagcgucauuacuuaugaaaacaacacuuggguaaaucagacauauguuaacaucagcaacaccaacuuugcugcuggacagucagugguuuccgugaaauuagcgggcaauuccucucucugcccuguuaguggaugggcuauauacaguaaagacaacaguauaagaaucgguuccaagggggauguguuugucauaagggaaccauucauaucaugcucccccuuggaaugcagaaccuucuucuugacucaaggggccuugcuaaaugacaaacauuccaauggaaccauuaaagacaggagcccauaucgaacccuaaugagcuguccuauuggugaaguucccucuccauacaacucaagauuugagucagucgcuuggucagcaagugcuugucaugauggcaucaauuggcuaacaauuggaauuucuggcccagacaauggggcaauggcuguguuaaaguacaacggcauaauaacagacacuaucaagaguuggagaaacaauauauugagaacacaagagucugaaugugcauguguaaaugguucuugcuuuacuguaaugaccgauggaccaagugauggacaggccucauacaagaucuucagaauagaaaagggaaagauagucaaaucagucgaaaugaaugccccuaauuaucacuaugaggaaugcuccuguuauccugauucuagugaaaucacauguguaugcagggauaacuggcauggcucgaaucgaccgugggugucuuucaaccagaaucuggaauaucagauaggauacauaugcagugggauuuucggagacaauccacgcccuaaugauaagacaggcaguugugguccaguaucgucuaauggagcaaauggaguaaaaggauuuucauucaaauacggcaaugguguuuggauagggagaacuaaaagcauuaguucaagaaacgguuuugagaugauuugggauccgaacggauggacugggacagacaauaacuucucaauaaagcaagauaucguaggaauaaaugaguggucaggauauagcgggaguuuuguucagcauccagaacuaacagggcuggauuguauaagaccuugcuucuggguugaacuaaucagagggcgacccaaagagaacacaaucuggacuagcgggagcagcauauccuuuugugguguaaacagugacacuguggguuggucuuggccagacggugcugaguugccauuuaccauugacaaguaa

SEQ ID NO: 54263 - RNA, 1410 nt, Artificial Sequence; identical to SEQ ID NO: 48750
  derived and/or modified CDS sequence (wt) from neuraminidase__InfluenzaA__AFJ76146

SEQ ID NO: 54264 - RNA, 1410 nt, Artificial Sequence; identical to SEQ ID NO: 48814
  derived and/or modified CDS sequence (wt) from neuraminidase__InfluenzaA__AFJ76159

SEQ ID NO: 54265 - RNA, 1410 nt, Artificial Sequence; identical to SEQ ID NO: 49979
  derived and/or modified CDS sequence (wt) from neuraminidase__InfluenzaA__AFJ76173

SEQ ID NO: 54266 - RNA, 1410 nt, Artificial Sequence
  derived and/or modified CDS sequence (wt) from neuraminidase__InfluenzaA__AFJ76191
augaauccaaaccaaaagauaauaaccauugguucggucuguaugacaauuggaauggcuaacuuaauauuacaaauuggaaacauaaucucaauauggauuagccacucaauucaacuugggaaucaaaaucagauugaaacaugcaaucaaagcgucauuacuuaugaaaacaacacuuggguaaaucagacauauguuaacaucagcaacaccaacuuugcugcuggacagucagugguuuccgugaaauuagcgggcaauuccucucucugcccuguuaguggaugggcuauauacaguaaagacaacaguauaagaaucgguuccaagggggauguguuugucauaagggaaccauucauaucaugcucccccuuggaaugcagaaccuucuucuugacucaaggggccuugcuaaaugacaaacauuccaauggaaccauuaaagacaggagcccauaucgaacccuaaugagcuguccuauuggugaaguucccucuccauacaacucaagauuugagucagucgcuuggucagcaagugcuugucaugaugguaucaauuggcuaacaauuggaauuucuggcccagacaauggggcaguggcuguguuaaaguacaacggcauaauaacagacacuaucaagaguuggagaaacaauauauugagaacacaagagucugaaugugcauguguaaaugguucuugcuuuacuguaaugaccgauggaccaagugauggacaggccucauacaagaucuucagaauagaaaagggaaagauagucaaaucagucgaaaugaaugccccuaauuaucacuaugaggaaugcuccuguuauccugauucuagugaaaucacaugugugugcagggauaacuggcauggcucgaaucgaccgugggugucuuucaaccagaaucuggaauaucagauaggauacauaugcagugggauuuucggagacaauccacgcccuaaugauaagacaggcaguugugguccaguaucgucuaauggagcaaauggaguaaagggauuuucauucaaauacggcaaugguguuuggauagggagaacuaaaagcauuaguucaagaaacgguuuugagaugauuugggauccgaacggauggacugggacagacaauaacuucucaauaaagcaagauaucguaggaauaaaugaguggucaggauauagcgggaguuuuguucagcauccagaacuaacagggcuggauuguauaagaccuugcuucuggguugaacuaaucagagggcgacccaaagagaacacaaucuggacuagcgggagcagcauauccuuuugugguguaaacagugacacuguggguuggucuuggccagacggugcugaguugccauuuaccauugacaaguaa

SEQ ID NO: 54267 - RNA, 1413 nt, Artificial Sequence
  derived and/or modified CDS sequence (wt) from neuraminidase__InfluenzaA__AFJ76192
augaacccaaaucaaaagauaauaaccauuggaucgaucaguauagcaaucggaauaauuagucuaauggugcaaauaggaaauauuauuucaauaugggcuagucacucaauccaaacuggaauucaaaacaacacuggaauaugcaaccaaagaaucaucacauaugaaaacagcaccugggugaaucacacauauguuaauauuaacaacacuaauguuguugcuggagaggacaaaacuucagugacauuggccggcaauucaucucuuuguucuaucaguggaugggcuauauacacaaaagacaacagcauaagaauuggcuccaaaggagauguuuuugucauaagagaaccuuucauaucauguucucacuuggaaugcagaaccuuuuuucugacccaaggcgcucuauuaaaugacaaacauucaaaugggaccguaaaggacagaaguccuuauagggccuuaaugagcuguccucuaggugaagcuccguccccauacaauucaaaguucgaaucaguugcauggucagcaagcgcaugccaugauggcaugggcugguuaacaaucggaauuucugguccagacaauggagcaguggcuguacuaaaauacaacggaauaauaacuggaaccauaaaaaguuggaaaaagcaaauauuaagaacacaagagucugaaugugucuguaugaacgggucauguuucaccauaaugaccgauggcccgaguaauaaggccgccucauacaaaauuuucaagaucgaaaaggggaagguuacuaaaucaauagaguugaaugcacccaauuuuuauuaugaggaaugcuccuguuacccagacacuggcauagugauguguguaugcagggacaacuggcaugguucaaaucgaccuugggugucuuuuaaucaaaacuuggauuaucaaauaggauacaucugcaguggaguguuuggugacaauccgcgucccgaagauggagagggcagcugcaauccagugacuguugauggagcaaacggaguaaaaggguuuucauacaaauaugguaaugguguuuggauaggaaggaccaaaaguaacagacuuagaaagggguuugagaugauuugggauccuaauggauggacaaauaccgacagugauuucucagugaaacaggauguuguagcaauaacugauuggucaggguacagcggaaguuucguccaacauccugaguuaacaggauuggacuguauaagaccuugcuucuggguugaguuagucagagggcugccuagagaaaauacaacaaucuggacuagugggagcagcauuucuuuuuguggcguuaauagugauacugcaaacuggucuuggccagacggugcugaguugccguucaccauugacaaguag

SEQ ID NO: 54268 - RNA, 1410 nt, Artificial Sequence; identical to SEQ ID NO: 48750
  derived and/or modified CDS sequence (wt) from neuraminidase__InfluenzaA__AFJ76206

SEQ ID NO: 54269 - RNA, 1410 nt, Artificial Sequence
  derived and/or modified CDS sequence (wt) from neuraminidase__InfluenzaA__AFJ76216
augaauccaaaucaaaagauaauaacaauuggcucuguuucucucaccauugccacaauaugcuuccuuaugcaaauugccauccugguaacuacuguaacauugcauuucaagcagcaugaaugcaacucccccccaaacaaccaaguaaugcugugugaaccaacaauaauaaaaagaaacauaacagagauaguguaucugaccaacaccaccauagagaaggaaauaugccccaaacuagcagaauacagaaauuggucaaagccgcaauguaacauuacaggauuugcaccuuuuucuaaggacaauucgauucggcuuuccgcugguggggacaucugggugacaagagaaccuuaugugucaugcgauccugacaaguguuaucaauuugcccuugggcagggaacaacacuaaacaacgggcauucaaaugacacaguacaugauaggaccccuuaccggacccuauugaugaaugaauuggguguuccauuucauuugggaaccaggcaagugugcauagcaugguccagcucaaguugucacgauggaaaagcguggcugcauguuuguguaacuggggaugauaaaaaugcaacugcuagcuucauuuacaaugggaggcuuguagauaguauugguucaugguccaaaaaaauacucagaacccaggagucggaaugcguuuguaucaauggaacuuguacaguaguaaugacugaugggagcgcuucaggaaaagcugauacuaaaauacuauucauugaggaggggaaaaucguucauauuagcacauugucgggaagugcucagcaugucgaggagugcuccuguuauccucgauauccuggugucagaugugucugcagagacaacuggaaaggauccaauaggcccauuguagauauaaauguaaaggauuauagcauuguuuccaguuaugugugcucaggacuuguuggagacacacccagaaaaaacgacagcuucagcaguagccauugccuagauccuaacaaugaggaagguggucauggagugaaaggcugggcuuuugaugauggaaaugacguguggaugggaagaacgaucagcgagaaguuacgcucagguuaugaaaccuucaaagucaucgaaggcugguccaaaccuaacuccaaauuacagauaaauaggcaaguuauaguugaaagagguaacagguccgguuauucugguauuuucuccguugaaggcaaaagcugcaucaaucggugcuuuuauguggaguugauaaggggaaggaaagaggaaacugaagucugguggaccucaaacaguauuguuguguuuuguggcaccucagguacauauggaacaggcucauggccugauggggcggauaucaaucucaugccuauauaa

SEQ ID NO: 54270 - RNA, 1410 nt, Artificial Sequence
  derived and/or modified CDS sequence (wt) from neuraminidase__InfluenzaA__AFJ77411
augaauccaaaucaaaagauaauaacaauuggcucuguuucucucacuauugccacaauaugcuuccuuaugcaaauugucauccugguaacuacuguaacauugcauuucaagcaauaugaaugcaacucccccccaaacaaccaaguaaugcugugugaaccaacaauaauagaaagaaacauaacagagauaguguaucugaccaacaccaccauagagaaagaaauaugccccaaacuagcagaauacagaaauuggucaaagccgcaauguaaaauuacaggauuugcaccuuuuucuaaggacaauucaauucggcuuuccgcugguggagacauuuggguaacaagagaaccuuaugugucaugcgauccuggcaaguguuaucaauuugcccuuggacagggaacaacacuaaacaacaggcauucaaaugacacaguacaugauaggaccccuuaucgaacccuauugaugaaugaguuggguguuccauuucauuugggaaccaagcaagugugcauagcaugguccagcucaaguugucacgauggaaaagcauggcugcauguuuguguaacugggcaugaugaaaaugcaacugccagcuucauuuacgaugggaggcuuguagauaguauugguucaugguccaaaaauauccucaggacccaggagucggaaugcguuuguaucaauggaacuuguacaguaguaaugacugauggaagugcuucagaaagagcugauacuaaaauacuauucauugaagaggggaaaaucguucauauuagcccauugucaggaagugcucagcaugucgaggagugcuccuguuauccucgauauccuggugucagaugugucugcagagacaacuggaaaggcuccaauaggcccaucguagauauaaaugugaaagauuauagcauugucuccaguuauguguguucaggacuuguuggagacacacccagaaaaaacgacagcuccagcaguagcuauugccugaauccuaacaaugaggaagggggucauggagugaaaggcugggccuuugaugauggaaaugacguguggaugggaagaacgaucagcgagaaguuacgcucagguuaugaaaccuucaaggucauuggaggcugguccaaaccuaacuccaaauugcagauaaauaggcaagucauaguugacagagguaauagguccgguuauucugguauuuucucuguugaaggcaaaagcugcgucaaucggugcuuuuauguggaguugauaaggggaaggaaacaggaaacugaagucugguggaccucaaacaguauuguuguguuuuguggcaccucagguacauauggaacaggcucauggccugauggggcggacaucaaucucaugccuauauaa

SEQ ID NO: 54271 - RNA, 1410 nt, Artificial Sequence
  derived and/or modified CDS sequence (wt) from neuraminidase__InfluenzaA__AFJ77422
augaauccaaaucaaaagauaauaacuauuggcucuguuucucucacuauugccacaauaugcuuccuuaugcaaauugccauccugguaauuacuguaacauuacauuucaagcaauaugaaugcaacucccccccaaacaaccaaguaaugcugugugaaccaacaauaauagaaagaaacauaacagagauaguguaucugaccaacaccaccauagagaaggaaauaugccccaaacuagcagaauacagaaauuggucaaagccgcaauguaaaauuacaggauuugcaccuuuuucuaaggacaauucaauucggcuuuccgcugguggggacauuugggugacaagagaaccuuaugugucaugcgauccugacaaguguuaucaauuugcccuuggacagggaacaacacuaaacaacaggcauucaaaugacacaguacaugauaggaccccuuaucgaacccuauugaugaaugaguuggguguuccauuucauuugggaaccaagcaagugugcauagcaugguccagcucaaguugucacgauggaaaagcauggcugcauguuuguguaacugggcaugaugaaaaugcaacugcuagcuucauuuacgaugggaggcuuguagauaguauugguucaugguccaaaaaaauccucaggacccaggaaucggaaugcguuuguaucaauggaacuuguacaguaguaaugacugauggaagugcuucaggaagagcugauacuaaaauacuauucauugaagaggggaaaaucguucauauuagcccauugucaggaagugcucagcaugucgaggagugcuccuguuauccucgauauucuggugucagaugugucugcagagacaacuggaaaggcuccaauaggcccaucguagauauaaaugugaaagauuauagcauuguuuccaguuuugugugcucaggacuuguuggagacacacccagaaaaaacgacagcuccagcaguagccauugccugaauccuaacaaugaggaagggggucauggagugaaaggcugggccuuugaugauggaaaugacguguggaugggaagaacgaucagcgagaaauuacgcucagguuaugaaaccuucaaagucauuggaggcugguccaaaccuaacuccaaauugcagauaaauaggcaagucauaguugacagagguaauagguccgguuauucugguauuuucucuguugaaggcaaaagcugcaucaaucggugcuuuuauguggaguugauaaggggaaggaaacaggaaacugaagucugguggaccucaaacaguauuguuguguuuuguggcaccucagguacauauggaacaggcucauggccugauggggcggacaucaaucucaugccuauauaa

SEQ ID NO: 54272 - RNA, 1410 nt, Artificial Sequence
  derived and/or modified CDS sequence (wt) from neuraminidase__InfluenzaA__AFJ77433
augaauccaaaucaaaagauaauaacaauuggcucuguuucucucacuauugccacaauaugcuuccuuaugcaaauugucauccugguaacuacuguaacauugcauuucaagcaauaugaaugcaacucccccccaaacaaccaaguaaugcugugugaaccaacaauaauagaaagaaacauaacagagauaguguaucugaccaacaccaccauagagaaagaaauaugccccaaacuagcagaauacagaaauuggucaaagccgcaauguaaaauuacaggauuugcaccuuuuucuaaggacaauucaauucggcuuuccgcugguggagacauuuggguaacaagagaaccuuaugugucaugcgauccuggcaaguguuaucaauuugcccuuggacagggaacaacacuaaacaacaggcauucaaaugacacaguacaugauaggaccccuuaucgaacccuauugaugaaugaguuggguguuccauuucauuugggaaccaagcaagugugcauagcaugguccagcucaaguugucacgauggaaaagcauggcugcauguuuguguaacugggcaugaugaaaaugcaacugcuagcuucauuuacgaugggaggcuuguagauaguauugguucaugguccaaaaauauccucaggacccaggagucggaaugcguuuguaucaauggaacuuguacaguaguaaugacugauggaagugcuucagaaagagcugauacuaaaauacuauucauugaagaggggaaaaucguucauauuagcccauugucaggaagugcucagcaugucgaggagugcuccuguuauccucgauauccuggugucagaugugucugcagagacaacuggaaaggcuccaauaggcccaucguagauauaaaugugaaagauuauagcauugucuccaguuauguguguucaggacuuguuggagacacacccagaaaaaccgacagcuccagcaguagcgauugccugaauccuaacaaugaggaagggggucauggagugaaaggcugggccuuugaugauggaaaugacguguggaugggaagaacgauuagcgagaaguuacgcucagguuaugaaaccuucaaggucauuggaggcugguccaaaccuaacuccaaauugcagauaaauaggcaagucauaguugacagagguaauagguccgguuauucugguauuuucucuguugaaggcaaaagcugcgucaaucggugcuuuuauguggaguugauaaggggaaggaaacaggaaacugaagucugguggaccucaaacaguauuguuguguuuuguggcacuucagguacauauggaacaggcucauggccugauggggcggacaucaaucucaugccuauauaa

SEQ ID NO: 54273 - RNA, 1410 nt, Artificial Sequence
  derived and/or modified CDS sequence (wt) from neuraminidase__InfluenzaA__AFJ77443
augaauccaaaucaaaagauaauaacaauuggcucuguuucucucacuauugccacaauaugcuuccuuaugcaaauugccauccugguaauuacuuuaacauugcauuucaagcaauaugaaugcaacuccccuccaaacaaccaaguaaugcugugugaaccaacaauaauagaaagaaacauaacagagauaguguaucugaccaacaccaccauagagaaagaaauaugccccaaacuagcagaauacagaaauuggucaaagccgcaauguaaaauuacaggauuugcaccuuuuucuaaggacaauucaauucggcuuuccgcugguggagacauuugggugacaagagaaccuuaugugucaugcgauccuggcaaguguuaucaauuugcccuuggacagggaacaacacuaaacaacaggcauucaaaugacacaguacaugauaggaccccuuaucgaacccuauugaugaaugaguuggguguuccauuucauuugggaaccaagcaagugugcauagcaugguccagcucaaguugucacgauggaaaagcauggcugcauguuuguguaacugggcauaaugaaaaugcaacugcuagcuucauuuacgaugggaggcuuguagauaguauugguucaugguccaaaaauauccucaggacccaggagucggaaugcguuuguaucaauggaacuuguacaguaguaaugacugauggaagugcuucaggaagagcugauacuaaaauacuauucauugaagaggggaaaaucguucauauuagcccauugucaggaagugcucagcaugucgaggagugcuccuguuauccucgauauccuggugucagaugugucugcagagacaacuggaaaggcuccaauaggcccaucguagauauaaaugugaaagauuuuagcauuguuuccaguuaugugugcucaggacuuguuggagacacacccagaaaaaacgacagcuccagcaguagccauugccugaauccuaacaaugaggaaggggguaauggagugaaaggcugggccuuugaugauggaaaugauguguggaugggaagaacgaucagcgagaaguuacgcucagguuaugaaaccuucaaagucauuggaggcugguccaaaccuaacuccaaauugcagauaaacaggcaagucauaguugacagagguaauagguccgguuauucugguauuuucucuguugaaggcaaaagcugcaucaaucggugcuuuuauguggaguugauaaggggaaggaaacaggaaacugaagucugguggaccucaaacaguauuguuguguuuuguggcaccucagguacauauggaacaggcucauggccugauggggcggacaucaaucucaugccuauauaa

SEQ ID NO: 54274 - RNA, 1410 nt, Artificial Sequence
  derived and/or modified CDS sequence (wt) from neuraminidase__InfluenzaA__AFJ77465
augaauccaaaucaaaagauaauaacgauuggcucuguuucucucacuauugccacaauaugcuuccuuaugcaaauugccauccugguaacuacuguaacauugcauuucaagcaauaugaaugcaacccccccccaaacaaccaaguaaugcugugugaaccaacaauaauagaaagaaacauaacagagauaguguaucugaccaacaccaccauagagaaggaaauaugccccaaacuagcagaauacagaaauuggucaaagccgcaauguaaaauuacaggauuugcaccuuuuucuaaggacaauucaauucggcuuuccgcugguggggacauuugggugacaagagaaccuuaugugucaugcgauccugacaaguguuaucaauuugcccuuggacagggaacaacacuaaacaacaggcauucaaaugacacaguacaugauaggaccccuuaucgaacccuauugaugaaugaguuggguguuccauuucauuugggaaccaagcaagugugcauagcaugguccagcucaaguugucacgauggaaaagcauggcugcauguuuguguaacugggcaugaugaaaaugcaacugcuagcuucauuuacgaugggaggcuuguagauaguauugguucaugguccaaaaaaauccucaggacccaggagucggaaugcguuuguaucaauggaacuuguacaguaguaaugacugaugggagugcuucagggagagcugauacuaaaauacuauucauugaggaggggaaaaucguucauauuagcccauugucaggaagugcucagcaugucgaggagugcuccuguuauccucgauauccuggugucagaugugucugcagagacaacuggaaaggcuccaauaggcccaucguagauauaaauguaaagaauuauagcauuguuuccaguuaugugugcucaggacuuguuggagacacacccagaaaaaacgacagcuccagcaguagccauugccugaauccuaacaaugaggaagggggucauggagugaaaggcugggccuuugaugauggaaaugacguguggaugggaagaacgaucagcgagaaguuacgcucagguuaugaaaccuucaaagucauugaaggcugguccaaaccuaacuccaaauugcagauaaauaggcaagucauaguugacagagguaauagguccgguuauucugguauuuucucuguugaaggcaaaagcugcaucaaucggugcuuuuauguggaguugauaaggggaaggaaacaggaaacugaagucugguggaccucaaacaguauuguuguguuuuguggcaccucagguacauauggaacaggcucauggccugauggggcggacaucaaucucaugccuauauaa

SEQ ID NO: 54275 - RNA, 1410 nt, Artificial Sequence
  derived and/or modified CDS sequence (wt) from neuraminidase__InfluenzaA__AFJ77476
augaauccaaaucaaaagauaauaacgauuggcucuguuucucucacuauugccacaauaugcuuccuuaugcaaauugccauccugguaacuacuguaacauugcauuucaagcaauaugaaugcaacucucucccaaacaaccaaguaaugcugugugaaccaacaauaauagaaagaaacauaacagagauaguguaucugaccaacaccaccauagagaaggaaauaugccccaaacuagcagaauacagaaauuggucaaagccgcaauguaaaauuacaggauuugcaccuuuuucuaaggacaauucaauucggcuuuccgcugguggggacauuugggugacaagagaaccuuaugugucaugcgauccugacaaguguuaucaauuugcccuuggacagggaacaacacuaaacaacaggcauucaaaugacacaguacaugauaggaccccuuaucgaacccuauugaugaaugaguuggguguuccauuucauuugggaaccaagcaagugugcauagcaugguccagcucaaguugucacgauggaaaagcauggcugcauguuuguguaacugggcacgaugaaaaugcaacugcuagcuucauuuacggugggaggcuuguagauaguauugguucaugguccaaaaaaauccucaggacccaggagucggaaugcguuuguaucaauggaacuuguacaguaguaaugacugaugggagugcuucaggaagagcugauacuaaaauacuauucauugaggaggggaaaaucauucauauuagucaauugucaggaagugcucagcaugucgaggagugcucauguuauccucgauauccuggugucagaugugucugcagagacaacuggaaaggcuccaauaggcccauuguagauauaaauguaaaggauuauagcauuguuuccaguuaugugugcucaggacuuguuggagacacacccagaaaaaacgacagcuccagcaguagccauugccuggauccuaacaaugaggaagggggucauggaguaaaaggcugggccuuugaugauggaaaugacguguggaugggaagaacgaucagcgagaaauuccgcucagguuaugaaaccuucaaggucauugaaggcugguccaaaccuaacuccaaauugcagauaaauaggcaaaucauaguugacagagauaauagguccgguuauucugguauuuucucuguugaaggcaaaagcugcaucaaucggugcuuuuauguggaguugauaaggggaaggaaacaggaaacugaagucugguggaccucaaacaguauuguuguguuuuguggcaccucagguacauauggaacaggcucauggccugauggggcggacaucaaucucaugccuauauaa

SEQ ID NO: 54276 - RNA, 1410 nt, Artificial Sequence
  derived and/or modified CDS sequence (wt) from neuraminidase__InfluenzaA__AFJ77487
augaauccaaaucaaaagauaauaacgauuggcucuguuucucucacuauugccacaauaugcuuccuuaugcaaauugccauccugguaacuacuguaacauugcauuucaagcaauaugaaugcaacucucucccaaacaaccaaguaaugcugugugaaccaacaauaauagaaagaaacauaacagagauaguguaucugaccaacaccaccauagagaaggaaauaugccccaaacuagcagaauacagaaauuggucaaagccgcaauguaaaauuacaggauuugcaccuuuuucuaaggacaauucaauucggcuuuccgcugguggggacauuugggugacaagagaaccuuaugugucaugcgauccugacaaguguuaucaauuugcccuuggacagggaacaacacuaaacaacaggcauucaaaugacacaguacaugauaggaccccuuaucgaacccuauugaugaaugaguuggguguuccauuucauuugggaaccaagcaagugugcauagcaugguccagcucaaguugucacgauggaaaagcauggcugcauguuuguguaacugggcacgaugaaaaugcaacugcuagcuucauuuacggugggaggcuuguagauaguauugguucaugguccaaaaaaauccucaggacccaggagucggaaugcguuuguaucaauggaacuuguacaguaguaaugacugaugggagugcuucaggaagagcugauacuaaaauacuauucauugaggaggggaaaaucauucauauuagccaauugucaggaagugcucagcaugucgaggagugcucauguuauccucgauauccuggugucagaugugucugcagagacaacuggaaaggcuccaauaggcccauuguagauauaaauguaaaggauuauagcauuguuuccaguuaugugugcucaggacuuguuggagacacacccagaaaaaacgacagcuccagcaguagccauugccugaauccuaacaaugaggaagggggucauggaguaaaaggcugggccuuugaugauggaaaugacguguggaugggaagaacgaucagcgagaaauuccgcucagguuaugaaaccuucaaagucauugaaggcugguccaaaccuaacuccaaauugcagauaaauaggcaagucauaguugacagagauaauagguccgguuauucugguauuuucucuguugaaggcaaaagcugcaucaaucggugcuuuuauguggaguugauaaggggaaggaaacaggaaacugaagucugguggaccucaaacaguauuguuguguuuuguggcaccucagguacauauggaacaggcucauggccugauggggcggacaucaaucucaugccuauauaa

SEQ ID NO: 54277 - RNA, 1410 nt, Artificial Sequence
  derived and/or modified CDS sequence (wt) from neuraminidase__InfluenzaA__AFJ77498
augaauccaaaucaaaagauaauaacgauuggcucuguuucucucacuauugccacaauaugcuuccuuaugcaaauagccauccugguaacuacuguaacauugcauuucaagcaauaugaaugcaacucccccccaaacaaccaaguaaugcugugugaaccaacaauaauagaaagaaacauaacagagauaguguaucugaccaacaccaccauagagaaggaaauaugccccaaacuagcagaauacagaaauuggucaaagccgcaauguaaaauuacaggauuugcaccuuuuucuaaggauaauucaauucggcuuuccgcugguggggacauuugggugacaagagaaccuuaugugucaugcgauccugacaaguguuaucaauuugcccuuggacagggaacaacacuaaacaacaggcauucaaaugacacaguacaugauaggaccccuuaucgaacccuauugaugaaugaguuggguguuccauuucauuugggaaccaagcaaguguguauagcaugguccagcucaaguugucacgauggaaaagcauggcugcauguuuguguaacugggcaugaugaaaaugcaacugcuagcuucauuuacgaugggagacuuguagauaguauugguucaugguccaaaaaaauccucaggacccaggagucggaaugcguuuguaucaauggaacuuguacaguaguaaugacugaugggagugcuucaggaagagcugauacuaaaauacuauucauugaggaggggaaaaucguucauacuagcaaauugucaggaagugcucagcaugucgaggagugcuccuguuauccucgauauccuggugucagaugugucugcagagacaacuggaaaggcuccaauaggcccaucguagauauaaauguaaaggauuauagcauuauuuccaguuaugugugcucaggacuuguuggagacacacccagaaaaaacgacagcuccagcaguagccauugccuggauccuaacaaugaagaagggggucauggagugaaaggcugggccuuugaugauggaaaugacguguggaugggaagaacgaucagcgagaagucacgcucagguuaugaaaccuucaaggucauugaaggcugguccaaaccuaacuccaaauugcagauaaauaggcaagucauaguugaaagagguaauauguccgguuauucugguauuuucucuguugaaggcaaaagcugcaucaaucggugcuuuuauguggaguugauaaggggaaggaaacaggagacugaagucugguggaccucaaacaguauuguuguguuuuguggcaccucagguacauauggaacaggcucauggccugauggggcggacaucaaucucaugccuauauaa

SEQ ID NO: 54278 - RNA, 1410 nt, Artificial Sequence
  derived and/or modified CDS sequence (wt) from neuraminidase__InfluenzaA__AFJ77509
augaauccaaaucaaaagauaauaacgauuggcucuguuucucucacuauugccacaauaugcuuccuuaugcaaauugccauccugguaacuacuguaacauugcauuucaagcaauaugaaugcaacucucucccaaacaaccaaguaaugcugugugaaccaacaauaauagaaagaaacauaacagagauaguguaucugaccaacaccaccauagagaaggaaauaugccccaaacuagcagaauacagaaauuggucaaagccgcaauguaaaauuacaggauuugcaccuuucucuaaggacaauucaauucggcuuuccgcugguggggacauuugggugacaagagaaccuuaugugucaugcgauccugacaaguguuaccaauuugcccuuggacagggaacaacacuaaacaacaggcauucaaaugacacaguacaugauaggaccccuuaucgaacccuauugaugaaugaguuggguguuccauuucauuugggaaccaagcaagugugcauagcaugguccagcucaaguugucacgauggaaaagcauggcugcauguuuguguaacugggcacgaugaaaaugcaacugcuagcuucauuuacggugggaggcuuguagauaguauugguucaugguccaaaaaaauccucaggacccaggagucggaaugcguuuguaucaauggaacuuguacaguaguaaugacugaugggagugcuucaggaagagcugauacuaaaauacuauucauugaggaggggaaaaucauucauauuagccaauugucaggaagugcucagcauguugaggagugcucauguuauccucgauauccuggugucagaugugucugcagagacaacuggaaaggcuccaauaggcccauuguagauauaaauguaaaggauuauagcauuguuuccaguuaugugugcucaggacuuguuggagacacacccagaaaaaacgacagcuccagcaguagccauugccugaauccuaacaaugaggaagggggucauggaguaaaaggcugggccuuugaugauggaaaugacguguggaugggaagaacgaucagcgagaaauuccgcucagguuaugaaaccuucaaagucauugaaggcugguccaaaccuaacuccaaauugcagauaaauaggcaagucauaguugacagagauaauagguccgguuauucugguauuuucucuguugaaggcaaaagcugcaucaaucggugcuuuuauguggaguugauaaggggaaggaaacaggaaacugaagucugguggaccucaaacaguauuguuguguuuuguggcaccucagguacauauggaacaggcucauggccugauggggcggacaucaaucucaugccuauauaa

SEQ ID NO: 54279 - RNA, 1410 nt, Artificial Sequence
  derived and/or modified CDS sequence (wt) from neuraminidase__InfluenzaA__AFJ77520
augaauccaaaucaaaagauaauaacgauuggcucuguuucucucacuauugccacaauaugcuuccuuaugcaaauugccauccugguaacuacuguaacauugcauuucaagcaauaugaaugcaacucccccccaaacaaccaagugaugcugugugaaccaacaauaauagaaagaaacauaacagagauaguguaucugaccaacaccaccauagagaaggaaauaugccccaaacuagcagaauacagaaauuggucaaagccgcaauguaacauuacaggauuugcaccuuuuucuaaggacaauucgauucggcuuuccgcugguggggacaucugggugacaagagaaccuuaugugucaugcgauccugacaaguguuaucaauuugcccuuggacagggaacaacacuaaacaacgggcauucaaaugacacaguacaugauaggaccccuuaucggacccuauugaugaaugaguuggguguuccauuucaucugggaaccaagcaagugugcauagcaugguccagcucaaguugucacgauggaaaagcauggcugcauguuuguguaacgggggaugaugaaaaugcaacugcuagcuucauuuacaaugggaggcuuguagauaguauugguucaugguccaaaaaaauccucaggacccaggagucggaaugcguuuguaucaauggaacuuguacaguaguaaugacugaugggagugcuucaggaaaagcugauacuaaaauacuauucauugaggaggggaaaaucguucauacuagcucauugucaggaagugcucagcaugucgaggagugcuccuguuauccucgauauccuggugucagaugugucugcagagacaacuggaaaggcuccaauaggcccaucguagauauaaacguaaaggauuauagcauuguuuccaguuaugugugcucaggacuuguuggagacacacccagaaaaaacgacagcuccagcaguagccauugccuggauccuaacaaugaggaagguggucauggagugaaaggcugggccuuugaugauggaaaugacguguggaugggaagaacgaucagcgagaaauuacgcucaggauaugaaaccuucaaagucauugaaggcugguccaaaccuaacuccaaauugcagauaaauaggcaagucauaguugacagagguaauagguccgguuauucugguauuuucucuguugaaggcaaaagcugcaucaaucggugcuuuuauguggaguugauaaggggaaggaaacaggaaauugaagucuuguggaccucaaacaguauuguuguguuuuguggcaccucagguacauauggaacaggcucauggccugauggggcggacaucaaucucaugccuauauaa

SEQ ID NO: 54280 - RNA, 1410 nt, Artificial Sequence
  derived and/or modified CDS sequence (wt) from neuraminidase__InfluenzaA__AFJ77531
augaauccaaaucaaaagauaauaacaauuggcucuguuucucucacuauuaccacaauaugcuuccuuaugcaaauugccauccugguaauuacuguaacauugcauuucaagcaaugugaaugcaacucccccccaaacaaccaaguaaugcugugugaaccaacaauaauagaaagaaacauaacagagauaguguaucugaccaacaccaccauagagaaagaaauaugccccaaacuagcagaauacagaaauuggucaaagccgcaauguaaaguuacaggauuugcaccuuuuucuaaggacaauucaauucggcuuuccgcugguggagacauuugggugacaagagaaccuuaugugucaugcgauccuggcaaguguuaucaauuugcccuuggacagggaacaacacuaaacaacaggcauucaaaugacacaguacaugauaggaccccuuaucgaacccuauugaugaaugaguuggguguuccauuucauuugggaaccaagcaagugugcauagcaugguccagcucaaguugucacgauggaaaagcauggcugcauguuuguguaacugggcauaaugaaaaugcaacugcgagcuucauuuacgaugggaggcuuguagauaguauugguucaugguccaaaaauauccucaggacccaggagucggaaugcguuuguaucaauggaacuuguacaguaguaaugacugauggaagugcuucaggaagagcugauacuaaaauacuauucauugaagaggggaaaaucguucauauuagcccauugucaggaagugcucagcaugucgaggagugcuccuguuauccucgauauccuggugucagaugugucugcagagacaacuggaaaggcuccaauaggcccaucguagauauaaaugugaaagauuauagcauuguuuccaguuaugugugcucaggacuuguuggagacacacccagaaaaaacgacagcuccagcaguagcuauugccuggauccuaacaaugaggaagggggucauggagugaaaggcugggccuuugaugauggaaaugauguguggaugggaagaacgaucagcgagaaguuacgcucagguuaugaaaccuucaaagucauuggaggcugguccaaaccuaacuccaaauugcagauaaauaggcaagucauaguugacagagguaauagguccgguuauucugguauuuucucuguugaaggcaaaagcugcaucaaucggugcuuuuauguggaguugauaaggggaaggaaacaggaaacugaaguuugguggaccucaaacaguauuguuguguuuuguggcaccucagguacauauggaacaggcucauggccugauggggcggacaucaaucucaugccuauauaa

SEQ ID NO: 54281 - RNA, 1410 nt, Artificial Sequence
  derived and/or modified CDS sequence (wt) from neuraminidase__InfluenzaA__AFJ77542
augaauccaaaucaaaagauaauaacgauuggcucuguuucucucaccauuuccacaauaugcuuccuuaugcaaauugccauccugguaacuacuguaacauugcauuucaagcaauaugaaugcaacucccccccaaacaaccaagugaugcugugugaaccaacaauaauagaaagaaacauaacagagauaguguaucugaccaacaccaccauagagaaggaaauaugccccaaacuagcagaauacagaaauuggucaaagccgcaauguaacauuacaggauuugcaccuuuuucuaaggacaauucgauucggcuuuccgcugguggggacaucugggugacaagagaaccuuaugugucaugcgauccugacaaguguuaucaauuugcccuuggacagggaacaacacuaaacaacgggcauucaaaugacacaguacaugauaggaccccuuaucggacccuauugaugaaugaguuggguguuccauuucauuugggaaccaagcaagugugcauagcaugguccagcucaaguugucacgauggaaaagcauggcugcauguuuguguaacgggggaugaugaaaaugcaacugcuagcuucauuuacaaugggaggcuuguagauaguauugguucaugguccaaaaaaauccucaggacccaagagucagaaugcguuuguaucaauggaacuuguacaguaguaaugacugaugggagugcuucaggaaaagcugauacuaaaauacuauucauugaggaggggaaaaucguucauacuagcacauugucaggaagugcucagcaugucgaggagugcuccuguuauccucgauauccuggugucagaugugucugcagagacaacuggaaaggcuccaauaggcccaucguagauauaaauauaaaggauuauagcauuguuuccaguuaugugugcucaggacuuguuggagacacgcccagaaaaaacgacagcuccagcaguagccauugcuuggauccuaacaaugaggaagguggucauggagugaaaggcugggccuuugaugauggaaaugacguguggaugggaagaacgaucagcgagaaguuacgcucaggauaugaaaccuucaaagucauugaaggcugguccaaaccuaacuccaaauugcagauaaauaggcaagucauaguugacagagguaauaggucugguuauucugguauuuucucuguugaaggcaaaagcugcaucaaucggugcuuuuauguggaguugauaaggggaaggaaacaggaaacugaagucuuguggaccucaaacaguauuguuguguuuuguggcaccucagguacauauggaacaggcucauggccugauggggcggacaucaaucucaugccuauauaa

SEQ ID NO: 54282 - RNA, 1410 nt, Artificial Sequence; identical to SEQ ID NO: 46265
  derived and/or modified CDS sequence (wt) from neuraminidase__InfluenzaA__AFJ77553

SEQ ID NO: 54283 - RNA, 1410 nt, Artificial Sequence
  derived and/or modified CDS sequence (wt) from neuraminidase__InfluenzaA__AFJ77564
augaauccaaaucaaaagauaauaacgauuggcucuguuucucucacuauugccacaauaugcuuccuuaugcaaauugccauccugguaacuacuguaacauugcauuucaagcaauaugaaugcaacucccccccaaacaaccaaguaaugcugugugaaccaacaauaauagaaagaaacauaacagagauaguguaucugaccaacaccaccauagagaaggaaauaugccccaaacuagcagaauacagaaauuggucaaagccgcaauguaaaauuacaggauuugcaccuuuuucuaaggacaauucaauucggcuuuccgcugguggggacauuugggugacaagagaaccuuaugugucaugcgauccugacaaguguuaucaauuugcccuuggacagggaacaacacuaaacaacaggcauucaaaugacacaguacaugauaggaccccuuaucgaacccuauugaugaaugaguuggguguuccauuucauuugggaaccaagcaagugugcauagcaugguccagcucaaguugucacgauggaaaagcauggcugcauguuuguguaacugggcaugaugaaaaugcaacugcuagcuucauuuacgaugggaggcuuguagauaguauugguucaugguccaaaaaaauccucaggacccaggagucggaaugcguuuguaucaauggaacuuguacaguaguaaugacugaugggagugcuucaggaagagcugauacuaaaauacuauucauugaggaggggaaaaucguucauauuagccaauugucaggaagugcucagcaugucgaggagugcuccuguuauccucgauauccuggugucagaugugucugcagagacaacuggaaaggcuccaauaggcccaucguagauauaaauguaaaggauuauagcauuguuuccaguuaugugugcucaggacuuguuggagacacacccagaaaaaacgacagcuccagcaguagccauugccugaauccuaacaaugaggaagggggucauggagugaaaggcugggccuuugaugauggaaaugacguguggaugggaagaacgaucagcgagaaguuacgcucagguuaugaaaccuucaaagucauugaaggcugguccaaaccuaacuccaaauugcagauaaauaggcaagucauaguugacagagguaauagguccgguuauucugguauuuucucuguugaaggcaaaagcugcaucaaucggugcuuuuauguggaguugauaaggggaaggaaacaggaaaaugaagucugguggaccucaaacaguauuguuguguuuuguggcaccucagguacauauggaacaggcucauggccugauggggcggacaucaaccucaugccuauauaa

SEQ ID NO: 54284 - RNA, 1329 nt, Artificial Sequence
  derived and/or modified CDS sequence (wt) from neuraminidase__InfluenzaA__AFJ77575
augaauccaaaucaaaagauaauaacgauuggcucuguuucucucaccauugccacaauaugcuuccuuaugcaaauugccauccugguaauagaaagaaacauaacagagauaguauaucugaccaacaccaccauagagaaggaaauaugccccaaacuagcagaauacagaaauuggucaaagccgcaauguaacauuacaggauuugcaccuuuuucuaaggacaauucgauucggcuuuccgcugguggggacaucugggugacaagagaaccuuaugugucaugcgauccugacaaguguuaucaauuugcccuuggacagggaacaacacuaaacaacgggcauucaaaugacacaguacaugauaggaccccuuaucgaacccuauugaugaaugaguuggguguuccauuucauuugggaaccaagcaagugugcauagcaugguccagcucaaguugucacgauggaaaagcauggcugcauguuuguguaacgggggaugaugaaaaugcaacugcuagcuucauuuacaaugggaggcuuguagauaguauugguucaugguccaaaaaaauccucaggacccaggagucggaaugcguuuguaucaauggaacuuguacaguaguaaugacugaugggagugcuucaggaaaagcugauacuaaaauacuauucauugaggaggggaaaaucguucauacuagcucauugucaggaagugcucagcaugucgaggagugcuccuguuauccucgauauccuggugucagaugugucugcagagacaacuggaaaggcuccaauaggcccaucguagauauaaauguaaaggauuauagcauuguuuccaguuaugugugcucaggacuuguuggagacacacccagaaaaaacgacagcuccagcaguagccauugcuuggauccuaacaaugaggaagguggucauggagugaaaggcugggccuuugaugauggaaaugacguguggaugggaagaacgaucagcgagaaguuacgcucaggauaugaaaccuucaaagucauugaaggcugguccaaaccuaacuccaaauugcagauaaauaggcaagucauaguugacagagguaauagguccgguuauucugguauuuucucuguugaaggcaaaagcugcaucaaucggugcuuuuauguggaguugauaaggggaaggaaacaggaaacugaagucuuguggaccucaaacaguauuguuguguuuuguggcaccucagguacauauggaacaggcucauggccugauggggcggacaucaaucucaugccuauauaa

SEQ ID NO: 54285 - RNA, 1410 nt, Artificial Sequence
  derived and/or modified CDS sequence (wt) from neuraminidase__InfluenzaA__AFJ77597
augaauccaaaucaaaagauaauaacgauuggcucuguuucucucaccauugccacaauaugcuuccuuaugcaaauugccauccugguaacuacuguaacauugcauuucaagcaauaugaaugcaacucccccccaaacaaccaagugaugcugugugaaccaacaauaauagaaagaaacauaacagagauaguguaucugaccaacaccaccauagagaaggaaauaugccccaaacuagcagaauacagaaauuggucaaagccgcaauguaacauuacaggauuugcaccuuuuucuaaggacaauucgauucggcuuuccgcugguggggacaucugggugacaagagaaccuuauguaucaugcgauccugacaaguguuaucaauuugcccuuggacagggaacaacacuaaacaacgggcauucaaaugacacaguacaugauaggaccccuuaucggacccuauugaugaaugaguuggguguuccauuucauuugggaaccaagcaagugugcauagcaugguccagcucaaguugucacgauggaaaagcauggcugcauguuuguguaacgggggaugaugaaaaugcaacugcuagcuucauuuacaaugggaggcuuguagauaguauugguucaugguccaaaaaaauccucaggacccaggagucggaaugcguuuguaucaauggaacuuguacaguaguaaugacugaugggagugcuucaggaaaagcugauacuaaaauacuauucauugaggaggggaaaaucguucauacuagaccauugucaggaagugcucagcaugucgaggagugcuccuguuauccucgauauccuggugucagaugugucugcagagacaacuggaaaggcuccaauaggcccaucguagauauaaauguaaaggauuauagcauuguuuccaguuaugugugcucaggacuuguuggagacacacccagaaaaaacgacagcuccagcaguagccauugcuuggauccuaacaaugaagaagguggucauggagugaaaggcugggccuuugaugauggaaaugacguguggaugggaagaacgaucagcgagaaguuacgcucaggauaugaaaccuucaaagucauugaaggcugguccaaaccuaacuccaaauugcagauaaauaggcaagucauaguugacagagguaauagguccgguuauucugguauuuucucuguugaaggcaaaagcugcaucaaucggugcuuuuauguggaguugauaaggggaaggaaacaggaaacugaagucuuguggaccucaaacaguauuguuguguuuuguggcaccucagguacauauggaacaggcucauggccugauggggcggacaucaaucucaugccuauauaa

SEQ ID NO: 54286 - RNA, 1410 nt, Artificial Sequence
  derived and/or modified CDS sequence (wt) from neuraminidase__InfluenzaA__AFJ77608
augaauccaaaucaaaagauaauaacgauuggcucuguuucucucaccauugccacaauaugcuuccuuaugcaaacugccauccugguaacuacuguaacauugcauuucaagcaauaugaaugcaacucccccccaaacaaccaagugaugcugugugaaccaacaauaauagaaagaaacaugacagagauaguguaucugaccaacaccaccauagagaaggaaauaugccccaaacuagcagaauacagaaauuggucaaagccgcaauguaacauuacaggauuugcaccuuuuucuaaggacaauucgauucggcuuuccgcugguggggaccucugggugacaagagaaccuuacgugucaugcgauccugacaaguguuaucaauuugcccuuggacagggaacaacacugaacaacgggcauucaaaugacacaguacaugauaggaccccuuaucgaacccuauugaugaaugaguuggguguuccauuucauuugggaaccaagcaagugugcauagcaugguccagcucaaguugucacgauggaaaagcauggcugcauguuuguguaacgggggaugaugaaaaugcaacugcuagcuucauuuacaaugggaggcuuguagauaguauugguucaugguccaaaaaaauccucaggacccaggagucggaaugcguuuguaucaauggaacuuguacaguaguaaugacugaugggagugcuucaggaaaagcugauacuaaaauacuauucauugaggaggggaaaaucguucauacuagcucauugucaggaagugcucagcaugucgaggagugcuccuguuauccucgauauccuggugucagaugugucugcagagacaacuggaaaggcuccaauaggcccaucguagauauaaauguaaaggauuauagcauuguuuccaguuaugugugcucaggacuuguuggagacacacccagaaaaaacgacagcuccagcaguagccauugcuuggauccuaacaaugaggaagguggucauggagugaaaggcugggccuuugaugauggaaaugacguguggaugggaagaacgaucagcgagaaguuacgcucaggauaugaaaccuucaaagucauugaagguugguccaaaccuaacuccaaauugcagauaaauaggcaagucauaguugacagagguaauagguccgguuauucugguauuuucucuguugaaggcaaaagcugcaucaaucggugcuuuuauguggaguugauaaggggaaggaaacaggaaacugaagucuuguggaccucaaacaguauuguuguguuuuguggcaccucagguacauauggaacaggcucauggccugauggggcggacaucaaucucaugccuauauaa

SEQ ID NO: 54287 - RNA, 1410 nt, Artificial Sequence
  derived and/or modified CDS sequence (wt) from neuraminidase__InfluenzaA__AFJ77619
augaauccaaaucaaaagauaauaacgauuggcucuguuucucucaccauugccacaauaugcuuccuuaugcaaauugccauccugguaacuacuguaacauugcauuucaagcaauaugaaugcaacucccccccaaacaaccaagugaugcugugugaaccaacaauaauagaaagaaacauaacagagauaguguaucugaccaacaccaccauagagaaggaaauaugccccaaacuagcagaauacagaaauuggucaaagccgcaauguaacauuacaggauuugcaccuuuuucuaaggacaauucgauucggcuuuccgcugguggggacaucugggugacaagagaaccuuaugugucaugcgauccugacaaguguuaucaauuugcccuuggacagggaacaacacuaaacaacgggcauucaaaugacacaguacaugauaggaccccuuaucggacccuauugaugaaugaguuggguguuccauuucauuugggaaccaagcaagugugcauagcaugguccagcucaaguugucacgauggaaaagcauggcugcauguuuguguaacgggggaugaugaaaaugcaacugcuagcuucauuuacaaugggaggcuuguagauaguauugguucaugguccaaaaaaauccucaggacccaggagucggaaugcguuuguaucaauggaacuuguacaguaguaaugacugaugggagugcuucaggaaaagcugauacuaaaauacuauucauugaggaggggaaaaucguucauacuagaccauugucaggaagugcucagcaugucgaggagugcuccuguuauccucgauauccuggugucagaugugucugcagagacaacuggaaaggcuccaauaggcccaucguagauauaaauguaaaggauuauagcauuguuuccaguuaugugugcucaggacuuguuggagacacacccagaaaaaacgacagcuccagcaguagccauugcuuggauccuaacaaugaggaagguggucauggagugaaaggcugggccuuugaugauggaaaugacguguggaugggaagaacaaucagcgagaaguuacgcucaggauaugaaaccuucaaagucauugaaggcugguccaaaccuaacuccaaauugcagauaaauaggcaagucauaguugacagagguaauagguccgguuauucugguauuuucucuguugaaggcaaaagcugcaucaaucggugcuuuuauguggaguugauaaggggaaggaaacaggaaacugaagucuuguggaccucaaacaguauuguuguguuuuguggcaccucagguacauauggaacaggcucauggccugauggggcggacaucaaucucaugccuauauaa

SEQ ID NO: 54288 - RNA, 1410 nt, Artificial Sequence
  derived and/or modified CDS sequence (wt) from neuraminidase__InfluenzaA__AFJ77630
augaauccaaaucaaaagauaauaacgauuggcucuguuucucucaccauugccacaauaugcuuccuuaugcaaauugccauccugguaacuacuguaacauugcauuucaagcaauaugaaugcaacucccccccaaacaaccaagugaugcugugugaaccaacaauaauagaaagaaacauaacagagauaguguaucugaccaacaccaccauagagaaggaaauaugccccaaacuagcagaauacagaaauuggucaaagccgcaauguaacauuacaggauuugcaccuuuuucuaaggacaauucgauucggcuuuccgcugguggggacaucugggugacaagagaaccuuaugugucaugcgauccugacaaguguuaucaauuugcccuuggacagggaacaacacuaaacaacgggcauucaaaugacacaguacaugauaggaccccuuaucggacccuauugaugaaugaguuggguguuccauuucauuugggaaccaagcaagugugcauagcaugguccagcucaaguugucacgauggaaaagcauggcugcauguuuguguaacgggggaugaugaaaaugcaacugcuagcuucauuuacaaugggaggcuuguagauaguauugguucaugguccaaaaaaauccucaggacccaggagucggaaugcguuuguaucaauggaacuuguacaguaguaaugacugaugggagugcuucaggaaaagcugauacuaaaauacuauucauugaggaggggaaaaucguucauacuagaccauugucaggaagugcucagcaugucgaggagugcuccuguuauccucgauauccuggugucagaugugucugcagagacaacuggaaaggcuccaauaggcccaucguagauauaaauguaaaggauuauagcauuguuuccaguuaugugugcucaggacuuguuggagacacacccagaaaaaacgacagcuccagcaguagccauugcuuggauccuaacaaugaggaagguggucauggagugaaaggcugggccuuugaugauggaaaugacguguggaugggaagaacgaucagcgagaaguuacgcucaggauaugaaaccuucaaagucauugaaggcugguccaaaccuaacuccaaauugcagauaaauaggcaagucauaguugacagagguaauagguccgguuauucugguauuuucucuguugaaggcaaaagcugcaucaaucggugcuuuuauguggaguugauaaggggaaggaaacaggaaacugaagucuuguggaccucaaacaguauuguuguguuuuguggcaccucagguacauauggaacaggcucauggccugauggggcggacaucaaucucaugccuauauaa

SEQ ID NO: 54289 - RNA, 1410 nt, Artificial Sequence
  derived and/or modified CDS sequence (wt) from neuraminidase__InfluenzaA__AFJ77641
augaauccaaaucaaaagauaauaacgauuggcucuguuucucucaccauuuccacaauaugcuuccuuaugcaaauugccauucugguaacuacuguaacauugcauuucaagcaauaugaaugcaacucccccccaaacaaccaagugaugcugugugaaccaacaauaauagaaagaaacauaacagagauaguguaucugaccaacaccaccauagagaaggaaauaugccccaaacuagcagaauacagaaauuggucaaagccgcaauguaacauuacaggauuugcaccuuuuucuaaggacaauucgauucggcuuuccgcugguggggacaucugggugacaagagaaccuuaugugucaugcgauccugacaaguguuaucaauuugcccuuggacagggaacaacacuaaacaacgggcauucaaaugacacaguacaugauaggaccccuuaucggacccuauugaugaaugaguuggguguuccauuucauuugggaaccaagcaagugugcauagcaugguccagcucaaguugucacgauggaaaagcauggcugcauguuuguguaacgggggaugaugaaaaugcaacugcuagcuucauuuacaaugggaggcuuguagauaguauugguucaugguccaaaaaaauccucaggacccaggagucagaaugcguuuguaucaauggaacuuguacaguaguaaugacugaugggagugcuucaggaaaagcugauacuaaaauacuauucauugaggaggggaaaaucguucauacuagcacauugucaggaagugcucagcaugucgaggagugcuccuguuauccucgauauccuggugucagaugugucugcagagacaacuggaaaggcuccaauaggcccaucguagauauaaauauaaaggauuauagcauuguuuccaguuaugugugcucaggacuuguuggagacacgcccagaaaaaacgacagcuccagcaguagccauugcuuggauccuaacaaugaggaagguggucauggagugaaaggcugggccuuugaugauggaaaugacguguggaugggaagaacgaucagcgagaaguuacgcucaggauaugaaaccuucaaagucauugaaggcugguccaaaccuaacuccaaauugcagauaaauaggcaagucauaguugacagagguaauagguccgguuauucugguauuuuuucuguugaaggcaaaagcugcaucaaucggugcuuuuauguggaguugauaaggggaaggaaacaggaaacugaagucuuguggaccucaaacaguauuguuguguuuuguggcaccucagguacauauggaacaggcucauggccugauggggcggacaucaaucucaugccuauauaa

SEQ ID NO: 54290 - RNA, 1410 nt, Artificial Sequence
  derived and/or modified CDS sequence (wt) from neuraminidase__InfluenzaA__AFJ77652
augaauccaaaucaaaagauaauaacgauuggcucuguuucucucaccauuuccacaauaugcuuccuuaugcaaauugccauccugguaacuacuguaacauugcauuucaagcaauaugaaugcaacucccccccaaacaaccaagugaugcugugugaaccaacaauaauagaaagaaacauaacagagauaguguaucugaccaacaccaccauagagaaggaaauaugccccaaacuagcagaauacagaaauuggucaaagccgcaauguaacauuacaggauuugcaccuuuuucuaaggacaauucgauucggcuuuccgcugguggggacaucugggugacaagagaaccuuaugugucaugcgauccugacaaguguuaucaauuugcccuuggacagggaacaacacuaaacaacgggcauucaaaugacacaguacaugauaggaccccuuaucgaacccuauugaugaaugaguuggguguuccauuucauuugggaaccaagcaagugugcauagcaugguccagcucaaguugucacgauggaaaagcauggcugcauguuuguguaacgggggaugaugaaaaugcaacugcuagcuucauuuacaaugggaggcuuguagauaguauugguucaugguccaaaaaaauccucaggacccaggagucagaaugcguuuguaucaauggaacuuguacaguaguaaugacugaugggagugcuucaggaaaagcugauacuaaaauacuauucauugaggaggggaaaaucguucauacuagcacauugucaggaagugcucagcaugucgaggagugcuccuguuauccucgauauccuggugucagaugugucugcagagacaacuggaaaggcuccaauaggcccaucguagauauaaauauaaaggauuauagcauuguuuccaguuaugugugcucaggacuuguuggagacacgcccagaaaaaacgacagcuccagcaguagccauugcuuggauccuaacaaugaggaagguggucauggagugaaaggcugggccuuugaugauggaaaugacguguggaugggaagaacgaucagcgagaaguuacgcucaggauaugaaaccuucaaagucauugaaggcugguccaaaccuaacuccaaauugcagauaaauaggcaagucauaguugacagagguaauagguccgguuauucugguauuuucucuguugaaggcaaaagcugcaucaaucggugcuuuuauguggaguugauaaggggaaggaaacaggaaacugaagucuuguggaccucaaacaguauuguuguguuuuguggcaccucagguacauauggaacaggcucauggccugauggggcggacaucaaucucaugccuauauaa

SEQ ID NO: 54291 - RNA, 1410 nt, Artificial Sequence; identical to SEQ ID NO: 46071
  derived and/or modified CDS sequence (wt) from neuraminidase__InfluenzaA__AFJ77663

SEQ ID NO: 54292 - RNA, 1410 nt, Artificial Sequence
  derived and/or modified CDS sequence (wt) from neuraminidase__InfluenzaA__AFJ77674
augaauccaaaucaaaagauaauaacgauuggcucuguuucucucacuauugccacaauaugcuuccuuaugcaaauugccauccugguaacuacuguaacauugcauuucaagcaauaugaaugcaacucucucccaaacaaccaaguaaugcugugugaaccaacaauaauagaaagaaacauaacagagauaguguaucugaccaacaccaccauagagaaggaaauaugccccaaacuagcagaauacagaaauuggucaaagccgcaauguaaaauuacaggauuugcaccuuuuucuaaggacaauucaauucggcuuuccgcugguggggacauuugggugacaagagaaccuuaugugucaugcgauccugacaaguguuaucaauuugcccuuggacagggaacaacacuaaacaacaggcauucaaaugacacaguacaugauaggaccccuuaucgaacccuauugaugaaugaguuggguguuccauuucauuugggaaccaaacaagugugcauagcaugguccagcucaaguugucacgauggaaaagcauggcugcauguuuguguaacugggcacgaugaaaaugcaacugcuagcuucauuuacgaugggaggcuuguagauaguauugguucaugguccaaaaaaauccucaggacccaggagucggaaugcguuuguaucaauggaacuuguacaguaguaaugacugaugggagugcuucaggaagagcugauacuaaaauacuauucauugaggaggggaaaaucauucauauuagccaauugucaggaagugcucagcaugucgaggagugcucauguuauccucgauauccuggugucagaugugucugcagagacaacuggaaaggcuccaauaggcccauuguagauauaaauguaaaggauuauagcauuguuuccaguuaugugugcucaggacuuguuggagacacacccagaaaaaacgacagcuccagcaguagccauugccugaauccuaacaaugaggaagggggucauggagugaaaggcugggccuuugaugauggaaaugacguguggaugggaagaacgaucagcgagaaauuccgcucagguuaugaaaccuucaaagucauugaaggcugguccaaaccuaacuccaaauugcagauaaauaggcaagucauaguugacagagauaauagguccgguuauucugguauuuucucuguugaaggcaaaagcugcaucaaucggugcuuuuauguggaguugauaaggggaaggaaacaggaaacugaagucugguggaccucaaacaguauuguuguguuuuguggcaccucagguacauauggaacaggcucauggccugauggggcggacaucaaucucaugccuauauaa

SEQ ID NO: 54293 - RNA, 1410 nt, Artificial Sequence
  derived and/or modified CDS sequence (wt) from neuraminidase__InfluenzaA__AFJ77685
augaauccaaaucaaaagauaauaacgauuggcucuguuucucucacuauugccacaauaugcuuccuuaugcaaauugccauccugguaacuacuguaacauugcauuucaagcaauaugaaugcaacucucucccaaacaaccaaguaaugcugugugaaccaacaauaauagaaagaaacauaacagagauaguguaucugaccaacaccaccauagagaaggaaauaugccccaaacuagcagaauacagaaauuggucaaagccgcaauguaaaauuacaggauuugcaccuuuuucuaaggacaauucaauucggcuuuccgcugguggggacauuugggugacaagagaaccuuaugugucaugcgauccugacaaguguuaucaauuugcccuuggacagggaacaacacuaaacaacaggcauucaaaugacacaguacaugauaggaccccuuauagaacccuauugaugaaugaguuggguguuccauuucauuugggaaccaagcaagugugcauagcaugguccagcucaaguugucacgauggaaaagcauggcugcauguuuguguaacugggcaugaugaaaaugcaacugcuagcuucauuuacgaugggaggcuuguagauaguauugguucaugguccaaaaaaauccucaggacccaggagucggaaugcguuuguaucaauggaacuuguacaguaguaaugacugaugggagugcuucaggaagagcugauacuaaaauacuauucauugaggaggggaaaaucauucauauuagccaauugucaggaagugcucagcaugucgaggagugcucauguuauccucgauauccuggugucagaugugucugcagagacaacuggaaaggcuccaauaggcccauuguagauauaaauguaaaggauuauagcauuguuuccaguuaugugugcucaggacuuguuggagacacacccagaaaaaacgacagcuccagcaguagccauugccugaauccuaacaaugaggaagggggucauggagugaaaggcugggccuuugaugauggaaaugacguguggaugggaagaacgaucagcgagaaauuccgcucagguuaugaaaccuucaaagucauugaaggcugguccaaaccuaacuccaaauugcagauaaauaggcaagucauaguugacagagauaauagguccgguuauucugguauuuucucuguugaaggcaaaagcugcaucaaucggugcuuuuauguggaguugauaaggggaaggaaacaggaaacugaagucugguggaccucaaacaguauuguuguguuuuguggcaccucagguacauauggaacaggcucauggccugauggggcggacaucaaucucaugccuauauaa

SEQ ID NO: 54294 - RNA, 1410 nt, Artificial Sequence
  derived and/or modified CDS sequence (wt) from neuraminidase__InfluenzaA__AFJ77696
augaauccaaaucaaaagauaauaacgauuggcucuguuucucucaccauugccacaauaugcuuccuuaugcaaauugccauccugguaacuacuguaacauugcauuucaagcaauaugaaugcaacucccccccaaacaaccaagugaugcugugugaaccaacaauaauagaaagaaacauaacagagauaguguaucugaccaacaccaccauagagaaggaaauaugccccaaacuagcagaauacagaaauuggucaaagccgcaauguaacauuacuggauuugcaccuuuuucuaaggacaauucgauucggcuuuccgcugguggggacaucugggugacaagagaaccuuaugugucaugcgauccugacaaguguuaucaauuugcccuuggacagggaacaacacuaaacaacgggcauucaaaugacacaguacaugauaggaccccuuaucggacccuauugaugaaugaguuggguguuccauuucauuugggaaccaagcaaguguguauagcaugguccagcucaaguugucacgauggaaaagcauggcugcauguuuguguaacgggugaugaugaaaaugcaacugcuagcuucauuuacaaugggaggcuuguagauaguauagguucaugguccaaaaaaauccucaggacccaggagucggaaugcguuuguaucaauggaacuuguacaguaguaaugacugauggaagugcuucagaaaaagcugauacuaaaauacuauucauugaggaggggaaaaucguucauacuagccuauugucagggagugcucagcaugucgaggagugcuccuguuauccucgauauccuggugucagaugugucugcagagacaacuggaaaggcuccaauaggcccaucguagauauaaauguaaaggauuauagcauuguuuccaguuaugugugcucaggacuuguuggagacacacccagaaaaaacgacagcuccagcaguagccauugcuuggauccuaacaaugaggaagguggucauggagugaaaggcugggccuuugaugauggaaaugacguguggaugggaagaacgaucagcgagaaguuacgcucaggauaugaaaccuucaaagucauugaaggcugguccaaaccuaacuccaaacugcagauaaauaggcaagucauaguugacagagguaauagguccgguuauucugguauuuucucuguugaaggcaaaagcugcaucaaucggugcuuuuauguggaguugauaaggggaaggaaacaggaaacugaagucuuguggaccucaaacaguauuguuguguuuuguggcaccucagguacauauggaacaggcucauggccugauggggcggacaucaaucucaugccuauauaa

SEQ ID NO: 54295 - RNA, 1410 nt, Artificial Sequence; identical to SEQ ID NO: 46071
  derived and/or modified CDS sequence (wt) from neuraminidase__InfluenzaA__AFJ77707

SEQ ID NO: 54296 - RNA, 1410 nt, Artificial Sequence; identical to SEQ ID NO: 46918
  derived and/or modified CDS sequence (wt) from neuraminidase__InfluenzaA__AFJ77718

SEQ ID NO: 54297 - RNA, 1410 nt, Artificial Sequence; identical to SEQ ID NO: 46918
  derived and/or modified CDS sequence (wt) from neuraminidase__InfluenzaA__AFJ77729

SEQ ID NO: 54298 - RNA, 1410 nt, Artificial Sequence
  derived and/or modified CDS sequence (wt) from neuraminidase__InfluenzaA__AFJ77740
augaauccaaaucaaaagauaauaacgauuggcucuguuucccucaccauuuccacaauaugcuucuucaugcaaauugccauccugauaacuacuguaacauugcauuucaagcaauaugaauucaacucccccccaaacaaccaagugaugcugugugaaccaacaauaauagaaagaaacauaacagagauaguguaucugaccaacaccaccauagagaaggaaauaugccccaaacuagcagaauacagaaauuggucaaagccgcaauguaacauuacaggauuugcaccuuuuucuaaggacaauucgauucggcuuuccgcugguggggacaucugggugacaagagaaccuuaugugucaugcgauccugacaaguguuaucaauuugcccuuggacagggaacaacacuaaacaacgugcauucaaaugacacaguacaugauaggaccccuuaucggacccuauugaugaaugaguuggguguuccauuucaucuggggaccaagcaagugugcauagcaugguccagcucaaguugucacgauggaaaagcauggcugcauguuuguguaacgggggaugaugaaaaugcaacugcuagcuucauuuacaaugggaggcuuguagauaguauuguuucaugguccaaaaaaauccucaggacccaggagucagaaugcguuuguaucaauggaacuuguauaguaguaaugacugaugggagugcuucaggaaaagcugauacuaaaauacuauucauugaggaggggaaaaucguucauacuagcacauugucaggaagugcucagcaugucgaggagugcuccuguuauccucgauauccuggugucagaugugucugcagagacaacuggaaaggcuccaauaggcccaucguagauauaaacauaaaggauuauagcauuguuuccaguuaugugugcucaggacuuguuggagacacacccagaaaaaacgacagcuccagcaguagccauugcuuggauccaaacaaugaggaagguggucauggagugaaaggcugggccuuugaugauggaaaugacguguggaugggaagaacgaucagcgagaaguuacgcucaggauaugaaaccuucaaagucauagaaggcugguccaacccuaacuccaaauugcagauaaauaggcaagucauaguugacagagguaauagguccgguuauucugguauuuucucuguugaaggcaaaagcugcaucaaucggugcuuuuauguggaguugauaaggggaagaaaacaggaaacugaagucuuguggaccucaaacaguauuguuguguuuuguggcaccucagguacauauggaacaggcucauggccugauggggcggacaucaaucucaugccuauauaa

SEQ ID NO: 54299 - RNA, 1410 nt, Artificial Sequence
  derived and/or modified CDS sequence (wt) from neuraminidase__InfluenzaA__AFJ77751
augaauccaaaucaaaagauaauaacaauuggcucuguuucucucaccauugccacaauaugcuuccuuaugcaaauugccauccugguaacuacuguaacauugcauuucaagcagcaugaaugcaacucccccccaaacaaccaaguaaugcugugugaaccaacaauaauagaaagaaacauaacagagauaguguaucugaccaacaccaccauagagaaggaaauaugccccaaacuagcagaauacagaaauuggucaaagccgcaauguaacauuacaggauuugcaccuuuuucuaaggacaauucgauucggcuuuccgcugguggggacaucugggugacaagagaaccuuaugugucaugcgauccugacaaguguuaucaauuugcccuugggcagggaacaacacuaaacaacgggcauucaaaugacacaguacgugauaggaccccuuaccggacccuauugaugaaugaauuggguguuccauuucauuugggaaccaggcaagugugcauagcaugguccagcucaaguugucacgauggaaaagcauggcugcauguuuguguaacuggggaugauaaaaaugcaacugcuagcuucauuuacaaugggaggcuuguagauaguauugguucaugguccaaaaaaauacucagaacccaggagucggaaugcguuuguaucaauggaacuuguacaguaguaaugacugaugggagcgcuucaggaaaagcugauacuaaaauacuauucauugaggaggggaaaaucguucauauuagcacauugucaggaagugcucagcaugucgaggagugcuccuguuauccucgauauccuggugucagaugugucugcagagacaacuggaaaggcuccaauaggcccauuguagauauaaauguaaaggauuauagcauuuuuuccaguuaugugugcucaggacuuguuggagacacacccagaaaaaacgacagcuucagcaguagccauugccuagauccuaacaaugaggaagguggucauggagugaaaggcugggccuuugaugauggaaaugacguguggaugggaagaacgaucagcgagaaguuacgcucagguuaugaaaccuucaaagucaucgaaggcugguccaaaccuaacuccaaauuacagauaaauaggcaaguuauaguugaaagagguaacagguccgguuauucugguauuuucuccguugaaggcaaaagcugcaucaaucggugcuuuuauguggaguugauaaggggaaggaaagaggaaacugaagucugguggaccucaaacaguauuguuguauuuuguggcaccucagguacauauggaacaggcucauggccugauggggcggacaucaaucucaugccuauauaa

SEQ ID NO: 54300 - RNA, 1410 nt, Artificial Sequence
  derived and/or modified CDS sequence (wt) from neuraminidase__InfluenzaA__AFJ77762
augaauccaaaucaaaagauaauaacaauuggcucuguaucucucaccauugccacaauaugcuuccuuaugcaaauugccauccugguaacuacuguaacauugcauuucaagcagcaugaaugcaacucccccccaaacaaccaaguaaugcugugugaaccaacaauaauagaaagaaacauaacagagauaguguaucugaccaacaccaccauagagaaggaaauaugccccaaacuagcagaauacagaaauuggucaaagccgcaauguaacauuacaggauuugcaccuuuuucuaaggacaauucgauucggcuuuccgcugguggggacaucugggugacaagagaaccuuaugugucaugcgauccugacaaguguuaucaauuugcccuugggcagggaacaacacuaaacaacgggcauucaaaugacacaguacaugauaggaccccuuaccggacccuauugaugaaugaauuggguguuccauuucauuugggaaccaggcaagugugcauagcaugguccagcucaaguugucacgauggaaaagcauggcugcauguuuguguaacuggggaugauaaaaaugcaacugcuagcuucauuuacaaugggaggcuuguagauaguauugguucaugguccaaaaaaauacucagaacccaggagucggaaugcguuuguaucaauggaacuuguacaguaguaaugacugaugggagcgcuucaggaaaagcugauacuaaaauacuauucauugaggaggggaaaaucguucauauuagcacauugucaggaagugcucagcaugucgaggagugcuccuguuauccucgauauccuggugucagaugugucugcagagacaacuggaaaggcuccaauaggcccauuguagauauaaauguaaaggauuauagcauuguuuccaguuaugugugcucaggacuuguuggagacacacccagaaaaaacgacagcuucagcaguagccauugccuagauccuaacaaugaggaagguggucauggagugaaaggcugggccuuugaugauggaaaugacguguggaugggaagaacgaucagcgagaaguuacgcucagguuaugaaaccuucaaagucaucgaaggcugguccaaaccuaacuccaaauuacagauaaauaggcaaguuauaguugaaagagguaacagguccgguuauucugguauuuucuccguugaaggcaaaagcugcaucaaucggugcuuuuauguggaguugauaaggggaaggaaagaggaaacugaagucugguggaccucaaacaguauuguuguguuuuguggcaccucagguacauauggaacaggcucauggccugauggggcggauaucaaucucaugccuauauaa

SEQ ID NO: 54301 - RNA, 1410 nt, Artificial Sequence; identical to SEQ ID NO: 48711
  derived and/or modified CDS sequence (wt) from neuraminidase__InfluenzaA__AFJ77773

SEQ ID NO: 54302 - RNA, 1410 nt, Artificial Sequence; identical to SEQ ID NO: 48711
  derived and/or modified CDS sequence (wt) from neuraminidase__InfluenzaA__AFJ77784

SEQ ID NO: 54303 - RNA, 1410 nt, Artificial Sequence; identical to SEQ ID NO: 54242
  derived and/or modified CDS sequence (wt) from neuraminidase__InfluenzaA__AFJ77795

SEQ ID NO: 54304 - RNA, 1410 nt, Artificial Sequence
  derived and/or modified CDS sequence (wt) from neuraminidase__InfluenzaA__AFJ77806
augaauccaaaucaaaagauaauaacgauuggcucuguuucucucaccauuuccacaauaugcuucuucaugcaaauugccaucuugauaacuacuguaacauugcauuucaagcaauaugaauucaacucccccccaaacaaccaagugaugcugugugaaccaacaauaauagaaagaaacauaacagagauaguguaucugaccaacaccaccauagagaaggaaauaugccccaaacuagcagaauacagaaauuggucaaagccgcaaugugacauuacaggauuugcaccuuuuucuaaggacaauucgauuaggcuuuccgcugguggggacaucugggugacaagagaaccuuaugugucaugcgauccugacaaguguuaucaauuugcccuuggacagggaacaacacuaaacaacgugcauucaaaugacacaguacaugauaggaccccuuaucggacccuauugaugaaugaguuagguguuccauuucaucuggggaccaagcaagugugcauagcaugguccagcucaaguugucacgauggaaaagcauggcugcauguuuguguaacgggggaugauaaaaaugcaacugcuagcuucauuuacaaugggaggcuuguagauaguauuguuucaugguccaaaaaaauccucaggacccaggagucagaaugcguuuguaucaauggaacuuguacaguaguaaugacugaugggagugcuucaggaaaagcugauacuaaaauacuauucauugaggaggggaaaaucguucauacuagcacauugucaggaagugcucagcaugucgaggagugcuccugcuauccucgauauccuggugucagaugugucugcagagacaacuggaaaggcuccaauaggcccaucguagauauaaacauaaaggauuauagcauuguuuccaguuaugugugcucaggacuuguuggagacacacccagaaaaaacgacagcuccagcaguagccauugcuuggauccuaacaaugaagaagguggucauggagugaaaggcugggccuuugaugauggaaaugacguguggaugggaagaacgaucagcgagaaguuacgcucaggauaugaaaccuucaaagucauugaaggcugguccaacccuaauuccaaauugcagauaaauaggcaagucauaguugacagagguaauagguccgguuauucugguauuuucucuguugaaggcaaaagcugcaucaaccggugcuuuuauguggaguugauaaggggaagaaaagaggaaacugaagucuuguggaccucaaacaguauuguuguguuuuguggcaccucagguacauauggaacaggcucauggccugauggggcggacaucaaucucaugccuauauaa

SEQ ID NO: 54305 - RNA, 1410 nt, Artificial Sequence; identical to SEQ ID NO: 54242
  derived and/or modified CDS sequence (wt) from neuraminidase__InfluenzaA__AFJ77817

SEQ ID NO: 54306 - RNA, 1410 nt, Artificial Sequence
  derived and/or modified CDS sequence (wt) from neuraminidase__InfluenzaA__AFJ77828
augaauccaaaucaaaagauaauaacgauuggcucuguuucucucaccauuuccacaauaugcuucuucaugcaaauugccaucuugauaacuacuguaacauugcauuucaagcaauaugaauucaacucccccccaaacaaccaagugaugcugugugaaccaacaauaauagaaagaaacauaacagagauaguguaucugaccaacaccaccauagagaaggaaauaugccccaaacuagcagaauacagaaauuggucaaagccgcaaugugacauuacaggauuugcaccuuuuucuaaggacaauucgauuaggcuuuccgcugguggggacaucugggugacaagagaaccuuaugugucaugcgauccugacaaguguuaucaauuugcccuuggacagggaacaacacuaaacaacgugcauucaaaugacacaguacaugauaggaccccuuaucggacccuauugaugaaugaguuagguguuccauuucaucuggggaccaagcaagugugcauagcaugguccagcucaaguugucacgauggaaaagcauggcugcauguuuguguaacgggggaugauaaaaaugcaacugcuagcuucauuuacaaugggaggcuuguagauaguauuguuucaugguccaaaaaaauccucaggacccaggagucagaaugcguuuguaucaauggaacuuguacaguaguaaugacugaugggagugcuucaggaaaagcugauacuaaaauacuauucauugaggaggggaaaaucguucauacuagcacauugucaggaagugcucagcaugucgaggagugcuccugcuauccucgauauccuggugucagaugugucugcagagacaacuggaaaggcuccaauaggcccaucguagauauaaacauaaaggauuauagcauuguuuccaguuaugugugcucaggacuuguuggagacacacccagaaaaaacgacagcuccagcaguagccauugcuuggauccuaacaaugaagaagguggucauggagugaaaggcugggccuuugaugauggaaaugacguguggaugggaagaacgaucagcgagaaguuacgcucaggauaugaaaccuucaaagucauugaaggcugguccaacccuaauuccaaauugcagauaaauaggcaagucauaguugacagagguaauagguccgguuacucugguauuuucucuguugaaggcaaaagcugcaucaaucggugcuuuuauguggaguugauaaggggaagaaaagaggaaacugaaguauuguggaccucaaacaguauuguuguguuuuguggcaccucagguacauauggaacaggcucauggccugauggggcggacaucaaucucaugccuauauaa

SEQ ID NO: 54307 - RNA, 1410 nt, Artificial Sequence
  derived and/or modified CDS sequence (wt) from neuraminidase__InfluenzaA__AFJ77839
augaauccaaaucaaaagauaauaacgauuggcucuguuucucucaccauuuccacaauaugcuucuucaugcaaauugccaucuugauaacuacuguaacauugcauuucaagcaauaugaauucaacucccccccaaacaaccaagugaugcugugugaaccaacaauaauagaaagaaacauaacagagauaguguaucugaccaacaccaccauagagaaggaaauaugccccaaacuagcagaauacagaaauuggucaaagccgcaaugugacauuacaggauuugcaccuuuuucuaaggacaauucgauuaggcuuuccgcugguggggacaucugggugacaagagaaccuuaugugucaugcgauccugacaaguguuaucaauuugcccuuggacagggaacaacacuaaacaacgugcauucaaaugacacaguacaugauaggaccccuuaucggacccuauugaugaaugaguuagguguuccauuucaucuggggaccaagcaagugugcauagcaugguccagcucaaguugucacgauggaaaagcauggcugcauguuuguguaacgggggaugauaaaaaugcaacugcuagcuucauuuacaaugggaggcuuguagauaguauuguuucaugguccaaaaaaauccucaggacccaggagucagaaugcguuuguaucaauggaacuuguacaguaguaaugacugaugggagugcuucaggaaaagcugauacuaaaauacuauucauugaggaggggaaaaucauucauacuagcacauugucaggaagugcucagcaugucgaggagugcuccugcuauccucgauauccuggugucagaugugucugcagagacaacuggaaaggcuccaauaggcccaucguagauauaaacauaaaggauuauagcauuguuuccaguuaugugugcucaggacuuguuggagacacacccagaaaaaacgacagcuccagcaguagccauugcuuggauccuaacaaugaagaagguggucauggagugaaaggcugggccuuugaugauggaaaugacguguggaugggaagaacgaucagcgagaaguuacgcucaggauaugaaaccuucaaagucauugaaggcugguccaacccuaauuccaaauugcagauaaauaggcaagucauaguugacagagguaauagguccgguuauucugguauuuucucuguugaaggcaaaagcugcaucaaucggugcuuuuauguggaguugauaaggggaagaaaagaggaaacugaagucuuguggaccucaaacaguauuguuguguuuuguggcaccucagguacauauggaacaggcucauggccugauggggcggacaucaaucucaugccuauauaa

SEQ ID NO: 54308 - RNA, 1410 nt, Artificial Sequence
  derived and/or modified CDS sequence (wt) from neuraminidase__InfluenzaA__AFJ77850
augaauccaaaucaaaagauaauaacgauuggcucuguuucucucaccauuuccacaauaugcuucuucaugcaaauugccaucuugauaacuacuguaacauugcauuucaagcaauaugaauucaacucccccccaaacaaccaagugaugcugugugaaccaacaauaauagaaagaaacauaacagagauaguguaucugaccaacaccaccauagagaaggaaauaugccccaaacuagcaaaauacagaaauuggucaaagccgcaaugugacauuacaggauuugcaccuuuuucuaaggacaauucgauuaggcuuuccgcugguggggacaucugggugacaagagaaccuuaugugucaugcgauccugacaaguguuaucaauuugcccuuggacagggaacaacacuaaacaacgugcauucaaaugacacaguacaugauaggaccccuuaucggacccuauugaugaaugaguuagguguuccauuucaucuggggaccaagcaagugugcauagcaugguccagcucaaguugucacgauggaaaagcauggcugcauguuuguguaacgggggaugauaaaaaugcaacugcuagcuucauuuacaaugggaggcuuguagauaguauuguuucaugguccaaaaaaauccucaggacccaggagucagaaugcguuuguaucaauggaacuuguacaguaguaaugacugaugggagugcuucaggaaaagcugauacuaaaauacuauucauugaggaggggaaaaucguucauacuagcacauugucaggaagugcucagcaugucgaggagugcuccugcuauccucgauauccuggugucagaugugucugcagagacaacuggaaaggcuccaauaggcccaucguagauauaaacauaaaggauuauagcauuguuuccaguuaugugugcucaggacuuguuggagacacacccagaaaaaacgacagcuccagcaguagccauugcuuggauccuaacaaugaagaagguggucauggagugaaaggcugggccuuugaugauggaaaugacguguggaugggaagaacgaucagcgagaaguuacgcucaggauaugaaaccuucaaagucauugaaggcugguccaacccuaauuccaaauugcagauaaauaggcaagucauaguugacagagguaauagguccgguuauucugguauuuucucuguugaaggcaaaagcugcaucaaucggugcuuuuauguggaguugauaaggggaagaaaagaggaaacugaagucuuguggaccucaaacaguauuguuguguuuuguggcaccucagguacauauggaacaggcucauggccugauggggcggacaucaaucucaugccuauauaa

SEQ ID NO: 54309 - RNA, 1410 nt, Artificial Sequence
  derived and/or modified CDS sequence (wt) from neuraminidase__InfluenzaA__AFJ77861
augaauccaaaucaaaagauaauaacgauuggcucuguuucucucaccauuuccacaauaugcuucuucaugcaaauugccaucuugauaacuacuguaacauugcauuucaagcaauaugaauucaacucccccccaaacaaccaagugaugcugugugaaccaacaauaauagaaagaaacauaacagagauaguguaucugaccaacaccaccauagagaaggaaauaugccccaaacuagcagaauacagaaauuggucaaagccgcaaugugacauuacaggauuugcaccuuuuucuaaggacaauucgauuaggcuuuccgcugguggggacaucugggugacaagagaaccuuaugugucaugcgauccugacaaguguuaucaauuugcccuuggacagggaacaacacuaaacaacgugcauucaaaugacacaguacaugauaggaccccuuaucggacccuauugaugaaugaguuagguguuccauuucaucuggggaccaagcaagugugcauagcaugguccagcucaaguugucacgauggaaaagcauggcugcauguuuguguaacgggggaugauaaaaaugcaacugcuagcuucauuuacaaugggaggcuuguagauaguauuguuucaugguccaaaaaaauccucaggacccaggagucagaaugcguuuguaucaauggaacuuguacaguaguaaugacugaugggagugcuucaggaaaagcugauacuaaaauacuauucauugaggaggggaaaaucguucauacuagcacauugucaggaagugcucagcaugucgaggagugcuccugcuauccucgauauccuggugucagaugugucugcagagacaacuggaaaggcuccaauaggcccaucguagauauaaacauaaaggauuauagcauuguuuccaguuaugugugcucaggacuuguuggagacacacccagaaaaaacgacagcuccagcaguagccauugcuuggauccuaacaaugaggaagguggucauggagugaaaggcugggccuuugaugauggaaaugacguguggaugggaagaacgaucagcgagaaguuacgcucaggauaugaaaccuucaaagucauugaaggcugguccaacccuaauuccaaauugcagauaaauaggcaagucauaguugacagagguaauagauccgguuauucugguauuuucucuguugaaggcaaaagcugcaucaaucggugcuuuuauguggaguugauaaggggaagaaaagaggaaacugaagucuuguggaccucaaacaguauuguuguguuuuguggcaccucagguacauauggaacaggcucauggccugauggggcggacaucaaucucaugccuauauaa

SEQ ID NO: 54310 - RNA, 1410 nt, Artificial Sequence
  derived and/or modified CDS sequence (wt) from neuraminidase__InfluenzaA__AFJ77872
augaauccaaaucaaaagauaauaacgauuggcucuguuucucucaccauuuccacaauaugcuucuucaugcaaauugccaucuugauaacuacuguaacauugcauuucaagcaauaugaguucaacucccccccaaacaaccaagugaugcugugugaaccaacaauaauagaaagaaacauaacagagauaguguaucugaccaacaccaccauagagaaggaaauaugccccaaacuagcagaauacagaaauuggucaaagccgcaaugugacauuacaggauuugcaccuuuuucuaaggacaauucgauuaggcuuuccgcugguggggacaucugggugacaagagaaccuuaugugucaugcgauccugacaaguguuaucaauuugcccuuggacaggggacaacacuaaacaacgugcauucaaaugacacaguacaugauaggaccccuuaucggacccuauugaugaaugaguuagguguuccauuucaucuggggaccaagcaagugugcauagcaugguccagcucaaguugucacgauggaaaagcauggcugcauguuuguguaacgggggaugauaaaaaugcaacugcuagcuucauuuacaaugggaggcuuguagauaguauuguuucaugguccaaaaaaauccucaggacccaggagucagaaugcguuuguaucaauggaaccuguacaguaguaaugacugaugggagugcuucaggaaaagcugauacuaaaauacuauucauugaggaggggaaaauuguucauacuagcacauugucaggaagugcucagcaugucgaggaguguuccugcuauccucgauauccuggugucagaugugucugcagagacaacuggaaaggcuccaauaggcccaucguagauauaaacauaaaggauuauagcauuguuuccaguuaugugugcucaggacuuguuggagacacacccagaaaaaacgacagcuccagcaguagccauugcuuggauccuaacaaugaagaagguggucauggagugaaaggcugggccuuugaugauggaaaugacguguggaugggaagaacgaucagcgagaaguuacgcucaggauaugaaaccuucaaagucauugaaggcugguccaacccuaauuccaaauugcagauaaauaggcaagucauaguugacagagguaauagguccgguuauucugguauuuucucuguugaaggcaaaagcugcaucaaucggugcuuuuauguggaguugauaaggggaagaaaagaggaaacugaagucuuguggaccucaaacaguauuguuguguuuuguggcaccucagguacauauggaacaggcucauggccugauggggcggacaucaaucucaugccuauauaa

SEQ ID NO: 54311 - RNA, 1410 nt, Artificial Sequence
  derived and/or modified CDS sequence (wt) from neuraminidase__InfluenzaA__AFJ77883
augaauccaaaucaaaagauaauaacgauuggcucuguuucucucaccauuuccacaauaugcuucuucaugcaaauugccaucuugauaacuacuguaacauugcauuucaagcaauaugaauucaacucccccccaaacaaccaagugaugcugugugaaccaacaauaauagaaaggaacauaacagagauaguguaucugaccaacaccaccauagagaaggaaauaugccccaaacuagcagaauacagaaauuggucaaagccgcaaugugacauuacaggauuugcaccuuuuucuaaggacaauucgauuaggcuuuccgcugguggggacaucugggugacaagagaaccuuaugugucaugcgauccugacaaguguuaucaauuugcccuuggacagggaacaacacuaaacaacgugcauucaaaugacacaguacaugauaggaccccuuaucggacccuauugaugaaugaguuagguguuccauuucaucuggggaccaagcaagugugcauagcaugguccagcucaaguugucacgauggaaaagcauggcugcauguuuguguaacgggggaugauaaaaaugcaacugcuagcuucauuuacaaugggaggcuuguagauaguauuguuucaugguccaaaaaaauccucaggacccaggagucagaaugcguuuguaucaauggaacuuguacaguaguaaugacugaugggagugcuucaggaaaagcugauacuaaaauacuauucauugaggaggggaaaaucguucauacuagcacauugucaggaagugcucagcaugucgaggaguguuccugcuauccucgauauccuggugucagaugugucugcagagacaacuggaaaggcuccaauaggcccaucguagauauaaacauaaaggauuauagcauuguuuccaguuaugugugcucaggacuuguuggagacacacccagaaaaaacgacagcuccagcaguagccauugcuuggauccuaacaaugaagaagguggucauggagugaaaggcugggccuuugaugauggaaaugacguguggaugggaagaacgaucagcgagaagucacgcucaggauaugaaaccuucaaagucauugaaggcugguccaacccuaauuccaaauugcagauaaauaggcaagucauaguugacagagguaauagguccgguuauucugguauuuucucuguugaaggcaaaagcugcaucaaucggugcuuuuauguggaguugauaaggggaagaaaagaggaaacugaagucuuguggaccucaaacaguauuguuguguuuuguggcaccucagguacauauggaacaggcucauggccugauggggcggacaucaaucucaugccuauauaa

SEQ ID NO: 54312 - RNA, 1410 nt, Artificial Sequence
  derived and/or modified CDS sequence (wt) from neuraminidase__InfluenzaA__AFJ77894
augaauccaaaucaaaagauaauaacgauuggcucuguuucucucaccauuuccacaauaugcuucuucaugcaaauugccaucuugauaacuacuguaacauugcauuucaagcaauaugaauucaacucccccccaaacaaccaagugaugcugugugaaccaacaauaauagaaagaaacauaacagagauaguguaucugaccaacaccaccauagagaaggaaauaugccccaaacuagcagaauacagaaauuggucaaagccgcaaugugacauuacaggauuugcaccuuuuucuaaggacaauucgauuaggcuuuccgcugguggggacaucugggugacaagagaaccuuaugugucaugcgauccugacaaguguuaucaauuugcacuuggacagggaacaacacuaaacaacgugcauucaaaugacacaguacaugauaggaccccuuaucggacccuauugaugaaugaguuagguguuccauuucaucuggggaccaagcaagugugcauagcaugguccagcucaaguugucacgauggaaaagcauggcugcauguuuguguaacgggggaugauaaaaaugcaacugcuagcuucauuuacaaugggaggcuuguagauaguauuguuucaugguccaaaaaaauccucaggacccaggagucagaaugcguuuguaucaauggaacuuguacaguaguaaugacugaugggagugcuucaggaaaagcugauacuaaaauacuauucauugaggaggggaaaaucguucauacuagcacauugucaggaagugcucagcaugucgaggagugcuccugcuauccucgauauccuggugucagaugugucugcagagacaacuggaaaggcuccaauaggcccaucguagauauaaacauaaaggauuauagcauuguuuccaguuaugugugcucaggacuuguuggagacacacccagaaaaaacgacagcuccagcaguagccauugcuuggauccuaacaaugaggaagguggucauggagugaaaggcugggccuuugaugauggaaaugauguguggaugggaagaacgaucagcgagaaguuacgcucaggauaugaaaccuucaaagucauugaaggcugguccaacccuaauuccaaauugcagauaaauaggcaagucauaguugacagagguaauagguccgguuauucugguauuuucucuguugaaggaaaaagcugcaucaaucggugcuuuuauguggaguugauaaggggaagaaaagaggaaacugaagucuuguggaccucaaacaguauuguuguguuuuguggcaccucagguacauauggaacaggcucauggccugauggggcggacaucaaucucaugccuauauaa

SEQ ID NO: 54313 - RNA, 1410 nt, Artificial Sequence; identical to SEQ ID NO: 54312
  derived and/or modified CDS sequence (wt) from neuraminidase__InfluenzaA__AFJ77905

SEQ ID NO: 54314 - RNA, 1410 nt, Artificial Sequence
  derived and/or modified CDS sequence (wt) from neuraminidase__InfluenzaA__AFJ77916
augaauccaaaucaaaagauaauaacgauuggcucuguuucucucaccauuuccacaauaugcuucuucaugcaaauugccaucuugauaacuacuguaacauugcauuucaagcaauaugaauucaacucccccccaaacaaccaagugaugcugugugaaccaacaauaauagaaagaaacauaacagagauaguguaucugaccaacaccaccauagagaaggaaauaugccccaaacuagcagaauacagaaauuggucaaagccgcaaugugacauuacaggauuugcaccuuuuucuaaggacaauucgauuaggcuuuccgcugguggggacaucugggugacaagagaaccuuaugugucaugcgauccugacaaguguuaucaauuugcccuuggacagggaacaacacuaaacaacgugcauucaaaugacacaguacaugauaggaccccuuaucggacccuauugaugaaugaguuagguguuccauuucaucuggggaccaagcaagugugcauagcaugguccagcucaaguugucacgauggaaaagcauggcugcauguuuguguaacgggggaugauaaaaaugcaacugcuagcuucauuuacaaugggaggcuuguagauaguauuguuucaugguccaaaaaaauccucaggacccaggagucagaaugcguuuguaucaauggaacuuguacaguaguaaugacugaugggagugcuucaggaaaagcugauacuaaaauacuauucauugaggaggggaaaaucguucauacuagcacauugucaggaagugcucagcaugucgaggagugcuccugcuauccucgauauccuggugucagaugugucugcagagacaacuggaaaggcuccaauaggcccaucguagauauaaacauaaaggauuauagcauuguuuccaguuaugugugcucaggacuuguuggagacacacccagaaaaaacgacagcuccagcaguagccauugcuuggauccuaacaaugaggaagguggucauggagugaaaggcugggccuuugaugauggaaaugacguguggaugggaagaacgaucagcgagaaguuacgcucgggauaugaaaccuucaaagucauugaaggcugguccaacccuaauuccaaauugcagauaaauaggcaagucauaguugacagagguaauagguccgguuauucugguauuuucucuguugaaggcaaaagcugcaucaaucggugcuuuuauguggaguugauaaggggaagaaaagaggaaacugaagucuuguggaccucaaacaguauuauuguguuuuguggcaccucagguacauauggaacaggcucauggccugauggggcggacaucaaucucaugccuauauaa

SEQ ID NO: 54315 - RNA, 1410 nt, Artificial Sequence
  derived and/or modified CDS sequence (wt) from neuraminidase__InfluenzaA__AFJ77927
augaauccaaaucaaaagauaauaacgauuggcucuguuucucucaccauuuccacaauaugcuucuucaugcaaauugccaucuugauaacuacuguaacauugcauuucaagcaauaugaauucaacucccccccaaacaaccaggugaugcugugugaaccaacaauaauagaaagaaacauaacagagauaguguaucugaccaacaccaccauagagaaggaaauaugccccaaacuagcagaauacagaaauuggucaaagccgcaaugugacauuacaggauuugcaccuuuuucuaaggacaauucgauuaggcuuuccgcugguggggacaucugggugacaagagaaccuuaugugucaugcgauccugacaaguguuaucaauuugcccuuggacaggggacaacacuaaacaacgugcauucaaaugacacaguacaugauaggaccccuuaucggacccuauugaugaaugaguuagguguuccauuucaucuggggaccaagcaagugugcauagcaugguccagcucaaguugucacgauggaaaagcauggcugcauguuuguguaacgggggaugauaaaaaugcaacugcuagcuucauuuacaaugggaggcuuguagauaguauuguuucaugguccaaagaaauccucaggacccaggagucagaaugcguuuguaucaauggaacuuguacaguaguaaugacugaugggagugcuucaggaaaagcugauacuaaaauacuauucauugaggaggggaaaauuguucauacuagcacauugucaggaagugcucagcaugucgaggaguguuccugcuauccucgauauccuggugucagaugugucugcagagacaacuggaaaggcuccaauaggcccaucguagauauaaacauaaaggauuauagcauuguuuccaguuaugugugcucaggacuuguuggagacacacccagaaaaaacgacagcuccagcaguagccauugcuuggauccuaacaaugaagaagguggucauggagugaaaggcugggccuuugaugauggaaaugacguguggaugggaagaacgaucagcgagaaguuacgcucaggauaugaaaccuucaaagucauugaaggcugguccaacccuaauuccaaauugcagauaaauaggcaagucauaguugacagagguaauagguccgguuauucugguauuuucucuguugaaggcaaaaacugcaucaauaggugcuuuuauguggaguugauaaggggaagaaaagaggaaacugaagucuuguggaccucaaacaguauuguuguguuuuguggcaccucagguacauauggaacaggcucauggccugauggggcggacaucaaucucaugccuauauaa

SEQ ID NO: 54316 - RNA, 1410 nt, Artificial Sequence
  derived and/or modified CDS sequence (wt) from neuraminidase__InfluenzaA__AFJ77938
augaauccaaaucaaaagauaauaacgauuggcucuguuucucucaccauuuccacaauaugcuucuucaugcaaauugccaucuugauaacuacuguaacauugcauuucaagcaauaugaauucaacucccccccaaacaaccaggugaugcugugugaaccaacaauaauagaaagaaacauaacagagauaguguaucugaccaacaccaccauagagaaggaaauaugccccaaacuagcagaauacagaaauuggucaaagccgcaaugugacauuacaggauuugcaccuuuuucuaaggacaauucgauuaggcuuuccgcugguggggacaucugggugacaagagaaccuuaugugucaugcgauccugacaaguguuaucaauuugcccuuggacaggggacaacacuaaacaacgugcauucaaaugacacaguacaugauaggaccccuuaucggacccuauugaugaaugaguuagguguuccauuucaucuggggaccaagcaagugugcauagcaugguccagcucaaguugucacgauggaaaagcauggcugcauguuuguguaacgggggaugauaaaaaugcaacugcuagcuucauuuacaaugggaggcuuguagauaguauuguuucaugguccaaagaaauccucaggacccaggagucagaaugcguuuguaucaauggaacuuguacaguaguaaugacugaugggagugcuucaggaaaagcugauacuaaaauacuauucauugaggaggggaaaauuguucauacuagcacauugucaggaagugcucagcaugucgaggaguguuccugcuauccucgauauccuggugucagaugugucugcagagacaacuggaaaggcuccaauaggcccaucguagauauaaacauaaaggauuauagcauuguuuccaguuaugugugcucaggacuuguuggagacacacccagaaaaaacgacagcuccagcaguagccauugcuuggauccuaacaaugaagaagguggucauggagugaaaggcugggccuuugaugauggaaaugacguguggaugggaagaacgaucagcgagaaguuacgcucaggauaugaaaccuucaaagucauugaaggcugguccaacccuaauuccaaauugcaaauaaauaggcaagucauaguugacagagguaauagguccgguuauucugguauuuucucuguugaaggcaaaaauugcaucaaucggugcuuuuauguggaguugauaaggggaagaaaagaggaaacugaagucuuguggaccucaaacaguauuguuguguuuuguggcaccucagguacauauggaacaggcucauggccugauggggcggacaucaaucucaugccuauauaa

SEQ ID NO: 54317 - RNA, 1410 nt, Artificial Sequence; identical to SEQ ID NO: 47261
  derived and/or modified CDS sequence (wt) from neuraminidase__InfluenzaA__AFJ77949

SEQ ID NO: 54318 - RNA, 1410 nt, Artificial Sequence; identical to SEQ ID NO: 46726
  derived and/or modified CDS sequence (wt) from neuraminidase__InfluenzaA__AFJ77960

SEQ ID NO: 54319 - RNA, 1410 nt, Artificial Sequence
  derived and/or modified CDS sequence (wt) from neuraminidase__InfluenzaA__AFJ77971
augaauccaaaucaaaaaauaauaacgauuggcucuguuucucucaccauuuccacaauaugcuucuucaugcaaauugccaucuugauaacuacuguaacauugcauuucaagcaauaugaauucaacucccccccaaacaaccaagugaugcugugugaaccaacaauaauagaaagaaacauaacagagauaguguaucugaccaacaccaccauagagaaggaaauaugccccaaacuagcagaauacagaaauuggucaaagccgcaauguaacauuacaggauuugcaccuuuuucuaaggacaauucgauuaggcuuuccgcugguggggacaucugggugacaagagaaccuuaugugucaugcgauccugacaaguguuaucaauuugcccuuggacagggaacaacacuaaacaacgugcauucaaaugacacaguacaugauaggaccccuuaucggacccuauugaugaaugaguuagguguuccauuucaucuggggaccaagcaagugugcauagcaugguccagcucaaguugucacgauggaaaagcauggcugcauguuuguguaacgggggaugauaaaaaugcaacugcuagcuucauuuacaaugggaggcuuguagauaguauuguuucaugguccaaagaaauccucaggacccaggagucagaaugcguuuguaucaauggaacuuguacaguaguaaugacugaugggagugcuucaggaaaagcugauacuaaaauacuauucauugaggaggggaaaaucguucauacuagcacauugucaggaagugcucagcaugucgaggagugcuccugcuauccccgauauccuggugucagaugugucugcagagacaacuggaaaggcuccaauaggcccauaguagauauaaacauaaaggauuauagcauuguuuccaguuaugugugcucaggacuuguuggagacacacccagaaaaaacgacagcuccagcaguagccauugcuuggauccuaacaaugaagaagguggucauggagugaaaggcugggccuuugaugauggaaaugacguguggaugggaagaacgaucagcgagaaguuacgcucaggauaugaaaccuucaaagucauugaaggcugguccaacccuaauuccaaauugcagauaaauaggcaagucauaguugacagagguaauagguccgguuauucugguauuuucucuguugaaggcaaaagcugcaucaaucggugcuuuuauguggaguugauaaggggaagaaaagaugaaacugaagucuuguggaccucaaacaguauuguuguguuuuguggcaccucagguacauauggaacaggcucauggccugauggggcggacaucaaucucaugccuauauaa

SEQ ID NO: 54320 - RNA, 1410 nt, Artificial Sequence
  derived and/or modified CDS sequence (wt) from neuraminidase__InfluenzaA__AFJ77982
augaauccaaaucaaaagauaauaacgauuggcuuuguuucucucaccauuuccacaauaugcuucuucaugcaaauugccaucuugauaacuacuguaccauugcauuucaagcaauaugaauucaacucccccccaaacaaccaagugaugcugugugaaccaacaauaauagaaagaaacauaacagagauaguguaucugaccaacaccaccauagagaaggaaauaugccccaaacuagcagaauacagaaauuggucaaagccgcaauguaacauuacaggauuugcaccuuuuucuaaggacaauucgauuaggcuuuccgcugguggggacaucugggugacaagagaaccuuaugugucaugcgauccugacaaguguuaucaauuugcccuuggacagggaacaacacuaaacaacgugcauucaaaugacacaguacaugauaggaccccuuaucggacccuauugaugaaugaguuagguguuccauuucaucuggggaccaagcaagugugcauagcaugguccagcucaaguugucacgauggaaaagcauggcugcauguuuguguaacgggggaugauaaaaaugcaacugcuagcuucauuuacaaugggaggcuuguagauaguauuguuucaugguccaaagaaauccucaggacccaggagucagaaugcguuuguaucaauggaacuuguacaguaguaaugacugaugggagugcuucaggaaaagcugauacuaaaauacuauucauugaggaggggaaaaucguucauacuagcacauugucaggaagugcucagcaugucgaggagugcuccugcuauccucgauauccuggugucagaugugucugcagagacaacuggaaaggcuccaauaggcccauaguagauauaaacauaaaggauuauagcauuguuuccaguuaugugugcucaggaauuguuggagacacacccagaaaaaacgacagcuccagcaguagccauugcuuggauccuaacaaugaagaagguggucauggagugaaaggcugggccuuugaugauggaaaugacguguggaugggaagaacgaucagcgagaaguuacgcucaggauaugaaaccuucaaagucauugaaggcugguccaacccuaauuccaaauugcagauaaauaggcaagucauaguugacagagguaauagguccgguuauucugguauuuucucuguugaaggcaaaagcugcaucaaucggugcuuuuauguggaguugauaaggggaagaaaagaggaaacugaagucuuguggaccucaaacaguauuguuguguuuuguggcaccucagguacauauggaacaggcucauggccugauggggcggacaucaaucucaugccuauauaa

SEQ ID NO: 54321 - RNA, 1410 nt, Artificial Sequence
  derived and/or modified CDS sequence (wt) from neuraminidase__InfluenzaA__AFJ77993
augaauccaaaucaaaagauaauaacgauuggcucuguuucucucaccauuuccacaauaugcuucuucaugcaaauugccaucuugauaacuacuguaacauugcauuucaagcaauaugaauucaacucccccccaaacaaccaagugaugcugugugaaccaacaauaauagaaagaaacauaacagagauaguguaucugaccaacaccaccauagagaaggaaauaugccccaaacuagcagaauacagaaauuggucaaagccgcaauguaacauuacaggauuugcaccuuuuucuaaggacaauucgauuaggcuuuccgcugguggggacaucugggugacaagagaaccuuaugugucaugcgauccugacaaguguuaucaauuugcccuuggacagggaacaacacuaaacaacgugcauucaaaugacacaguacaugauaggaccccuuaucgaacccuauugaugaaugaguuagguguuccauuucaucuggggaccaagcaagugugcauagcaugguccagcucaaguugucacgauggaaaagcauggcugcauguuuguguaacgggggaugauaaaaaugcaacugcuagcuucauuuacaaugggaggcuuguggauaguauuguuucaugguccaaagaaauccucaggacccaggagucagaaugcguuuguaucaauggaacuuguacaguaguaaugacugaugggagugcuucaggaaaagcugauacuaaaauacuauucauugaggaggggaaaaucguucauacuagcacauugucaggaagugcucagcaugucgaggagugcuccugcuauccucgauauccuggugucagaugugucugcagagacaacuggaaaggcuccaauaggcccauaguagauauaaacauaaaggauuauagcauuguuuccaguuaugugugcucaggacuuguuggagacacacccagaaaaaacgacagcuccagcaguagccauugcuuggauccuaacaaugaagaagguggucauggagugaaaggcugggccuuugaugauggaaaugacguguggaugggaagaacgaucagcgagaaguuacgcucaggauaugaaaccuucaaagucauugaaggcugguccaacccuaauuccaaauugcagauaaauaggcaagucauaguugacagagguaauaggucugguuauucugguauuuucucuguugaaggcaaaagcugcaucaaucggugcuuuuauguggaguugauaaggggaagaaaagaggaaacugaagucuuguggaccucaaacaguauuguuguguuuuguggcaccucagguacauauggaacaggcucauggccugauggggcggacaucaaucucaugccuauauaa

SEQ ID NO: 54322 - RNA, 1410 nt, Artificial Sequence
  derived and/or modified CDS sequence (wt) from neuraminidase__InfluenzaA__AFJ78004
augaauccaaaucaaaagauaauaacgauuggcucuguuucucucaccauuuccacaauaugcuucuucaugcaaauugccaucuugauaacuacuguaacauugcauuucaagcaauaugaauucaacucccccccaaacaaccaagugaugcugugugaaccaacaauaauagaaaaaaacauaacagagauaguguaucugaccaacaccaccauagagaaggaaauaugccccaaacuagcagaauacagaaauuggucaaagccgcaauguaacauuacaggauuugcaccuuuuucuaaggacaauucgauuaggcuuuccgcugguggggacaucugggugacaagagaaccuuaugugucaugcgauccugacaaguguuaucaauuugcccuuggacagggaacaacacuaaacaacgugcauucaaaugacacaguacaugauaggaccccuuaucggacccuauugaugaaugaguuagguguuccauuucaucuggggaccaagcaagugugcauagcaugguccagcucaaguugucacgauggaaaagcauggcugcauguuuguguaacgggggaugauaaaaaugcaacugcuagcuucauuuacaaugggaggcuuguagauaguauuguuucaugguccaaagaaauccucaggacccaggagucagaaugcguuuguaucaauggaacuuguacaguaguaaugacugaugggagugcuucaggaaaagcugauacuaaaauacuauucauugaggaggggaaaaucguucauacuagcacauugucaggaagugcucagcaugucgaggagugcuccugcuauccucgauauccuggugucagaugugucugcagagacaacuggaaaggcuccaauaggcccauaguagauauaaacauaaaggauuauagcauuguuucuaguuaugugugcucaggacuuguuggagacacacccagaaaaaacgacagcuccagcaguagccauugcuuggauccuaacaaugaagaagguggucauggagugaaaggcugggccuuugaugauggaaaugacguguggaugggaagaacgaucagcgagaaguuacgcucaggauaugaaaccuucaaagucauugaaggcugguccaacccuaauuccaaauugcagauaaauaggcaagucauaguugacagagguaauagguccgguuauucugguauuuucucuguugaaggcaaaagcugcaucaaucggugcuuuuauguggaguugauaaggggaagaaaagaggaaacugaagucuuguggaccucaaacaguauuguuguguuuuguggcaccucagguacauauggaacaggcucauggccugauggggcggacaucaaucucaugccuauauaa

SEQ ID NO: 54323 - RNA, 1410 nt, Artificial Sequence
  derived and/or modified CDS sequence (wt) from neuraminidase__InfluenzaA__AFJ78015
augaauccaaaucaaaagauaauaacgauuggcucuguuucucucaccauuuccacaauaugcuucuucaugcaaauugccaucuugauaacuacuguaacauugcauuucaagcaauaugaauucaacucccccccaaacaaccaagugaugcugugugaaccaacaauaauagaaagaaacauaacagagauaguguaucugaccaacaccaccauagagaaggaaauaugccccaaacuagcagaauacagaaauuggucaaagccgcaauguaacauuacaggauuugcaccuuuuucuaaggacaauucgauuaggcuuuccgcugguggggacaucugggugacaagagaaccuuaugugucaugcgauccugacaaguguuaucaauuugcccuuggacagggaacaacacuaaacaacgugcauucaaaugacacaguacaugauagaaccccuuaucggacccuauugaugaaugaguuagguguuccauuucaucuggggaccaagcaagugugcauagcaugguccagcucaaguugucacgauggaaaagcauggcugcauguuuguguaacgggggaugauaaaaaugcaacugcuagcuucauuuacaaugggaggcuuguagauaguauuguuucaugguccaaagaaauccucaggacccaggagucagaaugcguuuguaucaauggaacuuguacaguaguaaugacugauggaagugcuucaggaaaagcugauacuaaaauacuauucauugaggaggggaaaaucguucauacuagcacauugucaggaagugcucagcaugucgaggagugcuccugcuauccucgauauccuggugucagaugugucugcagagacaacuggaaaggcuccaauaggcccauaguagauauaaacauaaaggauuauagcauuguuuccaguuaugugugcucaggacuuguuggagacacacccagaaaaaacgacagcuccagcaguagccauugcuuggauccuaacaaugaagaagguggucauggagugaaaggcugggccuuugaugauggaaaugacguguggaugggaagaacgaucagcgagaaguuacgcucaggauaugaaaccuucaaagucauugaaggcugguccaacccuaauuccaaauugcagauaaauaggcaagucauaguugacagagguaauagguccgguuauucugguauuuucucuguugaaggcaaaagcugcaucaaucggugcuuuuauguggaguugauaaggggaagaaaagaggaaacugaagucuuguggaccucaaacaguauuguuguguuuuguggcaccucagguacauauggaacaggcucauggccugauggggcggacaucaaucucaugccuauauaa

SEQ ID NO: 54324 - RNA, 1410 nt, Artificial Sequence
  derived and/or modified CDS sequence (wt) from neuraminidase__InfluenzaA__AFJ78026
augaauccaaaucaaaagauaauaacgauuggcucuguuucucucaccauuuccacaauaugcuucuucaugcaaauugccaucuugauaacuacuguaacauugcauuucaagcaauaugaauucaacucccccccaaacaaccaagugaugcugugugaaccaacaauaauagaaagaaacauaacagagauaguguaucugaccaacaccaccauagagaaggaaaaaugccccaaacuagcagaauacagaaauuggucaaagccgcaauguaacauuacaggauuugcaccuuuuucuaaggacaauucgauuaggcuuuccgcugguggggacaucugggugacaagagaacccuaugugucaugcgauccugacaaguguuaucaauuugcccuuggacaaggaacaacacuaaacaacgugcauucaaaugacacaguacaugauaggaccccuuaucggacccuauugaugaaugaguuagguguuccauuucaucuggggaccaagcaagugugcauagcaugguccagcucaaguugucacgauggaaaagcauggcugcauguuuguguaacgggggaugauaaaaaugcaacugcuagcuucauuuacaaugggaggcuuguagauaguauuguuucaugguccaaagaaauccucaggacccaggagucagaaugcguuuguaucaauggaacuuguacaguaguaaugacugaugggagugcuucaggaaaagcugauacuaaaauacuauucauugaggaggggaaaaucguucauacuagcacauugucaggaagugcucagcaugucgaggagugcuccugcuauccucgauauccuggugucagaugugucugcagagacaacuggaaaggcuccaauaggcccauaguagauauaaacauaaaggauuauagcauuguuuccaguuaugugugcucaggacuuguuggagacacacccagaaaaaacgacagcuccagcaguagccauugcuuggauccuaacaaugaagaagguggucauggagugaaaggcugggccuuugaugauggaaaugacguguggaugggaagaacgaucagcgagaaguuacgcucaggauaugaaaccuucaaagucauugaaggcugguccaacccuaauuccaaauugcagauaaauaggcaagucauaguugacagagguaauagguccgguuauucugguauuuucucuguugaaggcaaaagcugcaucaaucggugcuuuuauguggaguugauaaggggaagaaaagaggaaacugaagucuuguggaccucaaacaguauuguuguguuuuguggcaccucagguacauauggaacaggcucauggccugauggggcggacaucaaucucaugccuauauaa

SEQ ID NO: 54325 - RNA, 1410 nt, Artificial Sequence; identical to SEQ ID NO: 54324
  derived and/or modified CDS sequence (wt) from neuraminidase__InfluenzaA__AFJ78037

SEQ ID NO: 54326 - RNA, 1410 nt, Artificial Sequence
  derived and/or modified CDS sequence (wt) from neuraminidase__InfluenzaA__AFJ78048
augaauccaaaucaaaagauaauaacgauuggcucuguuucucucaccauuuccacaauaugcuucuucaugcaaauugccaucuugauaacuacuguaacauugcauuucaagcaauaugaauucaacucccccccaaacaaccaagugaugcugugugaaccaacaauaauagaaaggaacauaacagagauaguguaccugaccaacaccaccauagagaaggaaauaugccccaaacuagcagaauacagaaauuggucaaagccacaauguaacauuacaggauuugcaccuuuuucuaaggacaauucgauuaggcuuuccgcugguggggacaucugggugacaagagaaccuuaugugucaugcgauccugacaaguguuaucaauuugcccuuggacagggaacaacacuaaacaacgugcauucaaaugacacaguacaugauaggaccccuuaucggacccuauugaugaaugaguuagguguuccauuucaucuggggaccaagcaagugugcauagcaugguccagcucaaguugucacgauggaaaagcauggcugcauguuuguguaacgggggaugauaaaaaugcaacugcuagcuucauuuacaaugggaggcuuguagauaguauuguuucaugguccaaagaaauccucaggacccaggagucagaaugcguuuguaucaauggaacuuguacaguaguaaugacugaugggaaugcuucaggaaaagcugauacuaaaauacuauucauugaggaggggaaaaucguucauacuagcacauugucaggaagugcucagcaugucgaggagugcuccugcuauccucgauauccuggugucagaugugucugcagagacaacuggaaaggcuccaauaggcccauaguagauauaaacauaaaggauuauagcauuguuuccaguuaugugugcucaggacuuguuggagacacacccagaaaaaacgacagcuccagcaguagccauugcuuggauccuaacaaugaagaagguggucauggagugaaaggcugggccuuugaugauggaaaugacguguggaugggaagaacgaucagcgagaaguuacgcucaggauaugaaaccuucaaagucauugaaggcugguccaacccuaauuccaaauugcagauaaauaggcaagucauaguugacagagguaauagguccgguuauucugguauuuucucuguugaaggcaaaagcugcaucaaucggugcuuuuauguggaguugauaaggggaagaaaagaggaaacugaagucuuguggaccucaaacaguauuguuguguuuuguggcaccucagguacauauggaacaggcucauggccugauggggcggacaucaaucucaugccuauauaa

SEQ ID NO: 54327 - RNA, 1410 nt, Artificial Sequence
  derived and/or modified CDS sequence (wt) from neuraminidase__InfluenzaA__AFJ78059
augaauccaaaucaaaaaauaauaacgauuggcucuguuucucucaccauuuccacaauaugcuucuucaugcaaauugccaucuugauaacuacuguaacauugcauuucaagcaauaugaauucaacccccccccaaacaaccaagugaugcugugugaaccaacaauaauagaaagaaacauaacagagauaguguaucugaccaacaccaccauagagaaggaaauaugccccaaacuagcagaauacagaaauuggucaaagccgcaauguaacauuacaggauuugcaccuuuuucuaaggacaauucgauuaggcuuuccgcugguggggacaucugggugacaagagaaccuuaugugucaugcgauccugacaaguguuaucaauuugcccuuggacagggaacaacacuaaacaacgugcauucaaaugacacaguacaugauaggaccccuuaucggacccuauugaugaaugaguuagguguuccauuucaucuggggaccaagcaagugugcauagcaugguccagcucaaguugucacgauggaaaagcauggcugcauguuuguguaacgggggaugauaaaaaugcaacugcuagcuucauuuacaaugggaggcuuguagauaguauuguuucaugguccaaagaaauccucaggacccaggagucagaaugcguuuguaucaauggaacuuguacaguaguaaugacugaugggagugcuucaggaaaagcugauacuaaaauacuauucauugaggaggggaaaaucguucauacuagcacauugucaggaagugcucagcaugucgaggagugcuccugcuauccccgauauccuggugucagaugugucugcagagacaacuggaaaggcuccaauaggcccauaguagauauaaacauaaaggauuauagcauuguuuccaguuaugugugcucaggacuuguuggagacacacccagaaaaaacgacagcuccagcaguagccauugcuuggauccuaacaaugaagaagguggucauggagugaaaggcugggccuuugaugauggaaaugacguguggaugggaagaacgaucagcgagaaguuacgcucaggauaugaaaccuucaaagucauugaaggcugguccaacccuaauuccaaauugcagauaaauaggcaagucauaguugacagagguaauagguccgguuauucugguauuuucucuguugaaggcaaaagcugcaucaaucggugcuuuuauguggaguugauaaggggaagaaaagaugaaacugaagucuuguggaccucaaacaguauuguuguguuuuguggcaccucagguacauauggaacaggcucauggccugauggggcggacaucaaucucaugccuauauaa

SEQ ID NO: 54328 - RNA, 1410 nt, Artificial Sequence
  derived and/or modified CDS sequence (wt) from neuraminidase__InfluenzaA__AFJ78070
augaauccaaaucaaaagauaauaacgauuggcucuguuucucucaccauuuccacaauaugcuucuucaugcaaauugccaucuugauaacuacuguaacauugcauuucaagcaauaugaauucaacucccccccaaacaaccaagugaugcugugugaaccaacaauaauagaaagaaacauaacagagauaguguaucugaccaacaccaccauagagaaggaaauaugucccaaacuagcagaauacagaaaguggucaaagccgcaauguaacauuacaggauuugcaccuuuuucuaaggacaauucgauuaggcuuuccgcugguggggacaucugggugacaagagaaccuuaugugucaugcgauccugacaaguguuaucaauuugcccuuggacagggaacaacacuaaacaacgugcauucaaaugacacaguacgugauaggaccccuuaucggacccuauugaugaaugaguuagguguuccauuucaucuggggaccaagcaagugugcauagcaugguccagcucaaguugucacgauggaaaagcauggcugcauguuuguguaacgggggaugauaaaaaugcaacugcuagcuucauuuacaaugggaggcuuguagauaguauuguuucaugguccaaagaaauccucaggacccaggagucagaaugcguuuguaucaauggaacuuguacaguaguaaugacugaugggagugcuucaggaaaagcugauacuaaaauacuauucauugaggaggggaaaaucguucauacuagcacauugucaggaagugcucagcaugucgaggagugcuccugcuauccucgauauccuggugucagaugugucugcagagacaacuggaaaggcuccaauaggcccauaguagauauaaacauaaaggauuauagcauuguuuccaguuaugugugcucaggacuuguuggagacacacccagaaaaaacgacagcuccagcaguggccauugcuuggauccuaacaaugaagaagguggucauggggugaaaggcugggccuuugaugauggaaaugacguguggaugggaagaacgaucagcgagaagucacgcucaggauaugaaaccuucaaagucauugaaggcugguccaacccuaauuccaaauugcagauaaauaggcaagucauaguugacagagguaauagguccgguuauucugguauuuucucuguugaaggcaaaagcugcaucaaucggugcuuuuauguggaguugauaaggggaagaaaagaggaaacugaagucuuguggaccucaaacaguauuguuguguuuuguggcaccucagguacauauggaacaggcucauggccugauggggcggacaucaaucucaugccuauauaa

SEQ ID NO: 54329 - RNA, 1410 nt, Artificial Sequence
  derived and/or modified CDS sequence (wt) from neuraminidase__InfluenzaA__AFJ78081
augaauccaaaucaaaagauaauaacgauuggcucuguuucucucaccauuuccacaauaugcuucuucaugcaaauugccaucuugauaacuacuguaacauugcauuucaagcaauaugaauucaacucccccccaaacaaccaagugaugcugugugaaccaacaauaauagaaagaaacauaacagagauaguguaucugaccaacaccaccauagagaaggaaauaugccccaaacuagcagaauacagaaauuggucaaagccgcaaugugacauuacaggauuugcaccuuuuucuaaggacaauucgauuaggcuuuccgcugguggggacaucugggugacaagagaaccuuaugugucaugcgauccugacaaguguuaucaauuugcccuuggacagggaacaacacuaaacaacgugcauucaaaugacacaguacgugauaggaccccuuaucggacccuauugaugaaugaguuagguguuccuuuucaucuggggaccaagcaagugugcauagcauggucaagcucaaguugucacgauggaaaagcauggcugcauguuuguauaacgggggaugauaaaaaugcaacugcuagcuucauuuacaaugggaggcuuguagauaguauuguuucaugguccaaagaaauccucaggacccaggagucagaaugcguuuguaucaauggaacuuguacaguaguaaugacugaugggagugcuucaggaaaagcugauacuaaaauacuauucauugaggaggggaaaaucguucauacuagcacauugucaggaagugcucagcaugucgaggagugcucuugcuauccucgauauccuggugucagaugugucugcagagacaacuggaaaggcuccaauaggcccaucguagauauaaacauaaaggaucauagcauuguuuccaguuauguguguucaggacuuguuggagacacacccagaaaaaacgacaacuccagcaguagccauuguuuggauccuaacaaugaagaagguggucauggagugaaaggcugggccuuugaugauggaaaugacguguggaugggaagaacgaucagcgagaagucacgcuuaggauaugaaaccuucaaggucauugaaggcugguccaacccuaauuccaaauugcagaugaauaggcaagucauaguugacagagguaauagguccgguuauucugguauuuucucuguugaaggcaaaagcugcaucaaucggugcuuuuauguggaguugauaaggggaagaaaagaggaaacugaagucuuguggaccucaaacaguauuguuguguuuuguggcaccucagguacauauggaacaggcucauggccugauggggcggacaucaaucucaugccuauauaa

SEQ ID NO: 54330 - RNA, 1410 nt, Artificial Sequence; identical to SEQ ID NO: 54246
  derived and/or modified CDS sequence (wt) from neuraminidase__InfluenzaA__AFJ78092

SEQ ID NO: 54331 - RNA, 1410 nt, Artificial Sequence
  derived and/or modified CDS sequence (wt) from neuraminidase__InfluenzaA__AFJ78103
augaauccaaaucaaaagauaauaacgauuggcucuguuucucucaccauuuccacaauaugcuucuucaugcaaauugccaucuugauaacuacuguaacauugcauuucaagcaauaugaauucaacucccccccaaacaaccaagugaugcugugugaaccaacaauaauagaaagaaacauaacagagauaguguaucugaccaacaccaccauagagaaggaaauaugccccaaacuagcagaauacagaaauuggucaaagccgcaaugugacauuacaggauuugcaccuuuuucuaaggacaauucgauuaggcuuuccgcugguggggacaucugggugacaagagaaccuuaugugucaugcgauccugacaaguguuaucaauuugcccuuggacagggaacaacacuaaacaacgugcauucaaaugacacaguacgugauaggaccccuuaucggacccuauugaugaaugaguuagguguuccuuuucaucuggggaccaagcaagugugcauagcauggucaagcucaaguugucacgauggaaaagcauggcugcauguuuguauaacgggggaugauaaaaaugcaacugcuagcuucauuuacaaugggaggcuuguagauaguauuguuucaugguccaaagaaauccucaggacccaggagucagaaugcguuuguaucaauggaacuuguacgguaguaaugacugaugggagugcuucaggaaaagcugauacuaaaauacuauucauugaggaggggaaaaucguucauacuagcacauuguuaggaagugcucagcaugucgaggagugcucaugcuauccucgauauccuggugucagaugugucugcagagacaacuggaaaggcuccaauaggcccaucguagauauaaacauaaaggaucauagcauuguuuccaguuauguguguucaggacuuguuggagacacacccagaaaaaacgacagcuccagcaguggccauuguuuggauccuaacaaugaagaagguggucauggagugaaaggcugggccuuugaugauggaaaugacguguggaugggaagaacgaucagcgagaagucacgcuuaggauaugaaaccuucaaagucauugaaggcugguccaacccuaguuccaaauugcagauaaauaggcaagucauaguugacagagguaauagguccgguuauucugguauuuucucuguugaaggcaaaagcugcaucaaucggugcuuuuauguggaguugauaaggggaagaaaagaggaaacugaagucuuguggaccucaaacaguauuguuguguuuuguggcaccucagguacauauggaacaggcucauggccugauggggcggacaucaaucucaugccuauauaa

SEQ ID NO: 54332 - RNA, 1410 nt, Artificial Sequence
  derived and/or modified CDS sequence (wt) from neuraminidase__InfluenzaA__AFJ78114
augaauccaaaucaaaagauaauaacgauuggcucuguuucucucaccauuuccacaauaugcuucuucaugcaaauugccaucuugauaacuacuguaacauugcauuucaagcaauaugaacucaacucccccccaaacaaccaagugaugcugugugaaccaacaauaauagaaagaaacauaacagagauaguguaucugaccaacaccaccauagagaaggaaauaugccccaaacuagcagaauacagaaauuggucaaagccgcaaugugacauuacaggauuugcaccuuuuucuaaggacaauucgauuaggcuuuccgcugguggggacaucugggugacaagagaaccuuaugugucaugcgauccugacaaguguuaucaauuugcccuuggacagggaacaacacuaaacaacgugcauucaaaugacacaguacgugauaggaccccuuaucggacccuauugaugaaugaauuagguguuccuuuucaucuggggaccaagcaagugugcauagcauggucaagcucaaguugucacgauggaaaagcauggcugcauguuuguauaacgggggaugauaaaaaugcaacugcuagcuucauuuacaaugggaggcuuguagauaguauuguuucaugguccaaagaaauccucaggacccaggagucagaaugcguuuguaucaauggaacuuguacaguaguaaugacugaugggagugcuucaggaaaagcugauacuaaaauacuauucauugaggaggggaaaaucguucauacuagcacauugucaggaagugcucagcaugucgaggagugcuccugcuauccucgauauccuggugucagaugugucugcagagacaacuggaaaggcuccaauaggcccaucguagauauaaacauaaaggaucauagcauuguuuccaguuauguguguucaggacuuguuggagacacacccagaaaaaacgacagcuccagcaguagccauuguuuggauccuaacaaugaagaagguggucauggagugaaaggcugggccuuugaugauggaaaugacguguggaugggaagaacgaucagcgagaagucacgcuuaggauaugaaaccuucaaagucauugaaggcugguccaacccuaauuccaaauugcagauaaauaggcaagucauaguugacagaaguaauagguccgguuauucugguauuuucucuguugaaggcaaaagcugcaucaaucggugcuuuuauguggaguugauaaggggaagaaaagaggaaacugaagucuuguggaccucaaacaguauuguuguguuuuguggcaccucagguacauauggaacaggcucauggccugauggggcggacaucaaucucaugccuauauaa

SEQ ID NO: 54333 - RNA, 1410 nt, Artificial Sequence
  derived and/or modified CDS sequence (wt) from neuraminidase__InfluenzaA__AFJ78125
augaauccaaaucaaaagauaauaacgauuggcucuguuucucucaccauuuccacaauaugcuucuucaugcaaauugccaucuugauaacuacuguaacauugcauuucaagcaauaugaauucaacucccccccaaacaaccaagugaugcugugugaaccaacaauaauagaaagaaacauaacagagauaguguaucugaccaacaccaccauagagaaggaaaugugccccaaacuagcagaauacagaaauuggucaaagccgcaaugugacauuacaggauuugcaccuuuuucuaaggacaauucgauuaggcuuuccgcugguggggacaucugggugacaagagaaccuuaugugucaugcgauccugacaaguguuaucaauuugcccuuggacagggaacaacacuaaacaacgugcauucaaaugacacaguacgugauaggaccccuuaucggacccuauugaugaaugaguuagguguuccuuuucaucuggggaccaagcaagugugcauagcauggucaagcucaaguugucacgauggaaaagcauggcugcauguuuguauaacgggggaugauaaaaaugcaacugcuagcuucauuuacaaugggaggcuuguagauaguauuguuucaugguccaaagaaauccucaggacccaggagucagaaugcguuuguaucaauggaacuuguacaguaguaaugacugaugggagugcuucaggaaaagcugauacuaaaauacuauucauugaggaggggaaaaucguucauacuagcacauugucaggaagugcucagcaugucgaggagugcuccugcuauccucgauauccuggugucagaugugucugcagagacaacuggaaaggcuccaauaggcccaucguagauauaaacauaaaggaucauagcauuguuuccaguuauguguguucaggacuuguuggagacacacccagaaaaaacgacagcuccagcaguagccauuguuuggauccuaacaaugaagaagguggucauggagugaaaggcugggccuuugaugauggaaaugacguguggaugggaagaacgaucagcgagaagucacgcuuaggauaugaaaccuucaaagucauugaaggcugguccaacccuaauuccaaauugcagaugaauaggcaagucauaguugacagagguaauagguccgguuauucugguauuuucucuguugaaggcaaaagcugcaucaaucggugcuuuuauguggaguugauaaggggaagaaaagaggaaacugaagucuuguggaccucaaacaguauuguuguguuuuguggcaccucagguacauauggaacaggcucauggccugauggggcggacaucaaucucaugccuauauaa

SEQ ID NO: 54334 - RNA, 1410 nt, Artificial Sequence
  derived and/or modified CDS sequence (wt) from neuraminidase__InfluenzaA__AFJ78136
augaauccaaaucaaaagauaauaacgauuggcucuguuucucucaccauuucaacaauaugcuucuucaugcaaacugccaucuugauaacuacuguaacauugcauuucaagcaauaugaauucaacucccccccaaacaaccaagugaugcugugugaaccaacaauaauagaaagaaacauaacagagauaguguaucugaccaacaccaccauagagaaggaaauaugccccaaauuagcagaauacagaaauuggucaaagccgcaaugugacauuacaggauuugcaccuuuuucuaaggacaauucgauuaggcuuuccgcugguggggacaucugggugacaagagaaccuuaugugucaugcgauccugacaaguguuaucaauuugcccuuggacagggaacaacacuaaacaacgugcauucaaauaacacaguacgugauaggaccccuuaucggacccuauugaugaaugaguuagguguuccuuuucaucuggggaccaagcaagugugcauagcaugguccagcucaaguugucacgauggaaaagcauggcugcauguuuguauaacgggggaugauaaaaaugcaacugcuagcuucauuuacaaugggaggcuuguagauaguauuguuucaugguccaaagaaauccucaggacccaggagucagaaugcguuuguaucaauggaacuuguacaguaguaaugacugaugggagugcuucaggaaaagcugauacuaaaauacuauucauugaggaggggaaaaucguucauacuagcacauugucaggaagugcucagcaugucgaggagugcuccugcuauccucgauauccuggugucagaugugucugcagagacaacuggaaaggcuccaauaggcccaucguagauauaaacauaaaggaucauagcauuguuuccaguuauguguguucaggacuuguuggagacacacccagaaaaaacgacagcuccagcaguagccauuguuuggauccuaacaaugaagaagguggucauggagugaaaggcugggccuuugaugauggaaaugacguguggaugggaagaacgaucagcgagaagucacgcuuaggguaugaaaccuucaaagucauugaaggcugguccaacccuaaguccaaauugcagauaaauaggcaagucauaguugacagagguaauagguccgguuauucugguauuuucucuguugaaggcaaaagcugcaucaaucggugcuuuuauguggaguugauaaggggaagaaaagaggaaacugaagucuuguggaccucaaacaguauuguuguguuuuguggcaccucagguacauauggaacaggcucauggccugauggggcggacaucaaucucaugccuauauaa

SEQ ID NO: 54335 - RNA, 1410 nt, Artificial Sequence; identical to SEQ ID NO: 54334
  derived and/or modified CDS sequence (wt) from neuraminidase__InfluenzaA__AFJ78147

SEQ ID NO: 54336 - RNA, 1410 nt, Artificial Sequence; identical to SEQ ID NO: 54334
  derived and/or modified CDS sequence (wt) from neuraminidase__InfluenzaA__AFJ78158

SEQ ID NO: 54337 - RNA, 1410 nt, Artificial Sequence
  derived and/or modified CDS sequence (wt) from neuraminidase__InfluenzaA__AFJ78169
augaauccaaaucaaaagauaauaacgauuggcucuguuucucucaccauuuccacaauaugcuucuucaugcaaauugccaucuugauaacuacuguaacauugcauuucaagcaauaugaauucaacucccccccaaacaaccaagugaugcugugugaaccaacaauaauagaaagaaacauaacagagauaguguaucugaccaacaccaccauagagaaggaaauaugccccaaacuagcagaauacagaaauuggucaaagccgcaaugugacauuacaggauuugcaccuuuuucuaaggacaauucgauuaggcuuuccgcugguggggacaucugggugacaagagaaccuuaugugucaugcgauccugacaaguguuaucaauuugcccuuggacagggaacaacacuaaacaacgugcauucaaaugauacaguacgugauaggaccccuuaucggacccuauugaugaaugaguuagguguuccuuuucaucuggggaccaagcaagugugcauagcaugguccagcucaaguugucacgauggaaaagcauggcugcauguuuguauaacgggggaugauaaaaaugcaacugcuagcuucauuuacaaugggaggcuuguagauaguauuguuucaugguccaaagaaauccucagaacccaggagucagaaugcguuuguaucaauggaacuuguacaguaguaaugacugaugggagugcuucaggaaaagcugauacuaaaauacuauucauugaggaggggaaaaucguucauacuagcacauugucaggaagugcucagcaugucgaggagugcuccugcuauccucgauauccuggugucagaugugucugcagagacaacuggaaaggcuccaauaggcccaucguagauauaaacauaaaggaucauagcauuguuuccaguuauguguguucaggacuuguuggagacacacccagaaaaaacgacagcuccagcaguagccauuguuuggauccuaacaaugaagaagguggucauggagugaaaggcugggccuuugaugauggaaaugacguguggaugggaagaacgaucagcgagaagucacgcuuaggguaugaaaccuucaaagucauugaaggcugguccaacccuaaguccaaauugcagauaaauaggcaagucauaguugacagagguaauagguccgguuauucugguauuuucucuguugaaggcaaaagcugcaucaaucggugcuuuuauguggaguugauaaggggaagaaaagaggaaacugaaguauuguggaccucaaacaguauuguuguguuuuguggcaccucagguacauauggaacaggcucauggccugauggggcggacaucaaucucaugccuauauaa

SEQ ID NO: 54338 - RNA, 1410 nt, Artificial Sequence
  derived and/or modified CDS sequence (wt) from neuraminidase__InfluenzaA__AFJ78180
augaauccaaaucaaaagauaauaacgauuggcucuguuucucucaccauuuccacaauaugcuucuucaugcaaauugccaucuugauaacuacuguaacauugcauuucaagcaauaugaauucagcucccccccaaacaaccaagugaugcugugugaaccaacaauaauagaaagaaacauaacagagauaguguaucugaccaacaccaccauagagaaggaaauaugccccaaacuagcagaauacagaaauuggucaaagccgcaaugugacauuacaggauuugcaccuuuuucuaaggacaauucgauuaggcuuuccgcugguggggacaucugggugacaagagaaccuuaugugucaugcgauccugacaaguguuaucaauuugcccuuggacagggaacaacacuaaacaacgugcauucaaaugacacaguacaugauaggaccccuuaucggacccuauugaugaaugagcuagguguuccauuucaucuggggaccaagcaagugugcauagcaugguccagcucaaguugucacgauggaaaagcauggcugcauguuuguguaacgggggaugacaaaaaugcaacugcuagcuucauuuacaaugggaggcuuguagauaguauuguuucaugguccaaagaaauccucaggacccaggagucagaaugcguuuguaucaauggaacuuguacaguaguaaugacugaugggagugcuucaggaaaagcugacacuaaaauacuauucauugaggaggggaaaaucguucauacuagcacauugucaggaagugcucagcaugucgaggagugcuccugcuauccucgauauccuggugucagaugugucugcagagacaauuggaaaggcuccaauaggcccaucguagauauaaacauaaaggacuauagcauuguuuccagauaugugugcucaggacuuguuggagacacacccagaaaaaacgacagcuccagcaguagccauugcuuggauccuaacaaugaagaagguggucauggagugaaaggcugggccuuugaugauggaaaugacguguggaugggaagaacgaucagcgagaagucacgcucaggauaugaaaccuucaaagucauugaaggcugguccaacccuaauuccaaauugcagauaaauaggcaagucauaguugacagagguaauagguccgguuauucugguauuuucucuguugaaggcaaaagcugcaucaaucggugcuuuuauguggaguugauaaggggaagaaaagaggaaaccgaaguuuuguggaccucaaacaguauuguuguguuuuguggcaccucagguacauauggaacaggcucauggccugauggggcggacaucaaucucaugccuauauaa

SEQ ID NO: 54339 - RNA, 1410 nt, Artificial Sequence
  derived and/or modified CDS sequence (wt) from neuraminidase__InfluenzaA__AFJ78191
augaauccaaaucaaaagauaauaacgauuggcucuguuucucucaccauuuccacaauaugcuucuucaugcaaauugccaucuugauaacuacuguaacauugcauuucaagcaauaugaauucaacucccccccaaacaaccaagugaugcugugugaaccaacaauaauagaaagaaacauaacagagauaguguaucugaccaacaccaccauagagaaggaaauaugccccaaacuagcagaauacagaaauuggucaaagccgcaaugugacauuacaggauuugcaccuuuuucuaaggacaauucgauuaggcuuuccgcugguggggacaucugggugacaagagaaccuuaugugucaugugauccugacaaguguuaucaauuugcccuuggacagggaacaacacuaaacaaugugcauucaaaugacacaguacgugauaggaccccuuaucggacccuauugaugaaugaguuagguguuccuuuucaucuggggaccaagcaagugugcauagcaugguccagcucaaguugucacgauggaaaagcauggcugcauguuuguauaacgggggaugauaaaaaugcaacugcuagcuucauuuacaaugggaggcuuguagauaguauuguuucaugguccaaagaaauccucaggacccaggagucagaaugcguuuguaucaauggaacuuguacaguaguaaugacugaugggagugcuucaggaaaagcugauacuaaaauacuauucauugaggaggggaaaaucguucauacuagcacauugucaggaagugcucagcaugucgaggagugcuccugcuauccucgauauccuggugucagaugugucugcagagacaacuggaaaggcuccaauaggcccaucguagauauaaacauaaaggaucauagcauuguuuccaguuauguguguucaggacuuguuggagacacacccagaaaaaacgacagcuccagcaguagccauuguuuggauccuaacaaugaagaagguggucauggagugaaaggcugggccuuugaugauggaaaugacguguggaugggaagaacgaucagcgagaagucacgcuuaggguaugaaaccuucaaagucauugaaggcugguccaacccuaaguccaaauugcagauaaauaggcaagucauaguugacagagguaauagguccgguuauucugguauuuucucuguugaaggcaaaagcugcaucaaucggugcuuuuauguggaguugauaaggggaagaaaagaggaaacugaagucuuguggaccucaaacaguauuguuguguuuuguggcaccucagguacauauggaacaggcucauggccugauggggcggacaucaaucucaugccuauauaa

SEQ ID NO: 54340 - RNA, 1410 nt, Artificial Sequence
  derived and/or modified CDS sequence (wt) from neuraminidase__InfluenzaA__AFJ78202
augaauccaaaucaaaagauaauaacgauuggcucuguuucucucaccauuuccacaauaugcuucuucaugcaaacugccaucuugauaacuacuguaacauugcauuucaagcaauaugaauucaacucccccccaaacaaccaagugaugcugugugaaccaacaauaauagaaagaaacauaacagagauaguguaucugaucaacaccaccauagagaaggaaauaugccccaaauuagcagaauacagaaauuggucaaagccgcaaugugacauuacaggauuugcaccuuuuucuaaggacaauucgauuaggcuuuccgcugguggggacaucugggugacaagagaaccuuaugugucaugcgauccugacaaguguuaucaauuugcccuuggacagggaacaacacuaaacaacgugcauucaaauaacacaguacgugauaggaccccuuaucggacccuauugaugaaugaguuagguguuccuuuucaucuggggaccaagcaagugugcauagcaugguccagcucaaguugucacgauggaaaagcauggcugcauguuuguauaacaggggaugauaaaaaugcaacugcuagcuucauuuacaaugggaggcuuguagauaguauuguuucaugguccaaagaaauccucaggacccaggagucagaaugcguuuguaucaauggaacuuguacaguaguaaugacugaugggagugcuucaggaaaagcugauacuaaaauacuauucauugaggaggggaaaaucguucauacuagcacauugucaggaggugcucagcaugucgaggagugcuccugcuauccucgauauccuggugucagaugugucugcagagacaacuggaaaggcuccaauaggcccaucguagauauaaacauaaaggaucauagcauuguuuccaguuauguguguucaggacuuguuggagacacacccagaaaaaacgacagcuccagcaguagccauuguuuggauccuaacaaugaagaagguggucauggagugaaaggcugggccuuugaugauggaaaugacguguggaugggaagaacgaucagcgagaagucacgcuuaggguaugaaaccuucaaagucauugaaggcugguccaacccuaaguccaaauugcagauaaauaggcaagucauaguugacagagguaauagguccgguuauucugguauuuucucuguugaaggcaaaagcugcaucaaucggugcuuuuauguggaguugauaaggggaagaaaagaggaaacugaagucuuguggaccucaaacaguauuguuguguuuuguggcaccucagguacauauggaacaggcucauggccugauggggcggacaucagucucaugccuauauaa

SEQ ID NO: 54341 - RNA, 1410 nt, Artificial Sequence
  derived and/or modified CDS sequence (wt) from neuraminidase__InfluenzaA__AFJ78213
augaauccaaaucaaaagauaauaacgauuggcucuguuucucucaccauuuccacaauaugcuucuucaugcaaauugccaucuugauaacuacuguaacauugcauuucaagcaauaugaauucaacucccccccaaacaaccaagugaugcugugugaaccaacaauaauagaaagaaacauaacagagauaguguaucugaccaacaccaccauagagaaggaaauaugccccaaacuagcagaauacagaaauuggucaaagccgcaaugugacauuacaggauuugcaccuuuuucuaaggacaauucgauuaggcuuuccgcugguggggacaucugggugacaagagaaccuuaugugucaugcgauccugacaaguguuaucaauuugcccuuggacagggaacaacacuaaacaaugugcauucaaaugacacaguacgugauaggaccccuuaucggacccuauugaugaaugaguuagguguuccuuuucaucuggggaccaagcaagugugcauagcaugguccagcucaaguugucacgauggaaaagcauggcugcauguuuguauaacgggggaugauaaaaaugcaacugcuagcuucauuuacaaugggaggcuuguagauaguauuguuucaugguccaaagaaauccucaggacccaggagucagaaugcguuuguaucaauggaacuuguacaguaguaaugacugaugggagugcuucaggaaaagcugauacuaaaauacuauucauugaggaggggaaaaucguucauacuagcacauugucaggaagugcucagcaugucgaggagugcuccugcuauccucgauauccuggugucagaugugucugcagagacaacuggaaaggcuccaauaggcccaucguagauauaaacauaaaggaucauagcauuguuuccaguuauguguguucaggacuuguuggagacacacccaggaaaaacgacagcuccagcaguagccauuguuuggauccuaacaaugaagaagguggucauggagugaaaggcugggccuuugaugauggaaaugacguguggaugggaagaacgaucagcgagaagucacgcuuaggguaugaaaccuucaaagucauugaaggcugguccaacccuaaguccaaauugcagauaaauaggcaagucauaguugacagagguaauagguccgguuauucugguauuuucucuguugaaggcaaaagcugcaucaaucggugcuuuuauguggaguugauaaggggaagaaaagaggaaacugaagucuuguggaccucaaacaguauuguuguguuuuguggcaccucagguacauauggaacaggcucauggccugauggggcggacaucaaucucaugcuuauauaa

SEQ ID NO: 54342 - RNA, 1410 nt, Artificial Sequence; identical to SEQ ID NO: 54253
  derived and/or modified CDS sequence (wt) from neuraminidase__InfluenzaA__AFJ78224

SEQ ID NO: 54343 - RNA, 1410 nt, Artificial Sequence
  derived and/or modified CDS sequence (wt) from neuraminidase__InfluenzaA__AFJ78235
augaauccaaaucaaaagauaauaacgauuggcucuguuucucucaccauuuccacaauaugcuucuuuaugcaaauugccaucuugauaacuacuguaacauugcauuucaagcaauaugaauucaacucccccccaaacaaccaagugaugcugugugaaccaacaauaauagaaagaaacauaacagagauaguguaucugaccaacaccaccauagagaaggaaauaugccccaaacuagcagaauacagaaauuggucaaagccgcaaugugacauuacaggauuugcaccuuuuucuaaggacaauucgauuaggcuuuccgcugguggggacaucugggugacaagagaaccuuaugugucaugcgauccugacaaguguuaucaauucgcccuuggacaggggacaacacuaaacaaugugcauucaaaugacacaguacgugauaggaccccuuaucggacccuauugaugaaugaauuagguguuccuuuucaucuggggaccaagcaagugugcauagcaugguccagcucaaguugucacgauggaaaagcauggcugcauguuuguauaacgggggaugauaaaaaugcaacugcuagcuucauuuacaaugggaggcuuguagauaguauuguuucaugguccaaagaaauccucaggacccaggagucagaaugcguuuguaucaauggaacuuguacaguaguaaugacugaugggagugcuucaggaaaagcugauacuaaaauacuauucauugaggaagggaaaaucguucauacuagcacauugucaggaagugcucagcaugucgaggagugcuccugcuauccucgauauccuggugucagaugugucugcagagacaacuggaaaggcuccaauaggcccaucguagauauaaacauaaaggaucauagcauuguuuccaguuauguguguucaggacuuguuggagacacacccagaaaaaacgacagcuccagcaguagccauuguuuggauccuaacaaugaagaagguggucauggagugaaaggcugggccuuugaugauggaaaugacguguggaugggaagaacgaucagcgagaagucacgcuuaggguaugaaaccuucaaagucauugaaggcugguccaacccuaaguccaaauugcagauaaauaggcaagucauaguugacagagguaacagguccgguuauucugguauuuucucuguugaaggcaaaagcugcaucaaucggugcuuuuauguggaguugauaaggggaagaaaagaggaaacugaagucuuguggaccucaaacaguauuguuguguuuuguggcaccucggguacauauggaacaggcucauggccugauggggcggacaucaaucucaugccuauauaa

SEQ ID NO: 54344 - RNA, 1410 nt, Artificial Sequence
  derived and/or modified CDS sequence (wt) from neuraminidase__InfluenzaA__AFJ78246
augaauccaaaucaaaagauaauaacgauuggcucuguuucucucaccauuuccacaauaugcuucuucaugcaaauugccaucuugauaacuacuguaacauugcauuucaagcaauaugaauucaacucccccccaaacaaccaagcgaugcugugugaaccaacaauaauagaacgaaacauaacagagauaguguaucugaccaacaccaccauagagaaggaaauaugccccaaacuagcagaauacagaaauuggucaaagccgcaaugugacauuacaggauuugcaccuuuuucuaaggacaauucgauuaggcuuuccgcugguggggacaucugggugacaagagaaccuuaugugucaugcgauccugacaaguguuaucaauucgcccuuggacagggaacaacacuaaacaaugugcauucaaaugacacaguacgugauaggaccccuuaucggacccuauugaugaaugaguuagguguuccuuuucaucuggggaccaagcaagugugcauagcaugguccagcucaaguugucacgauggaaaagcauggcugcauguuuguauaacgggggaugauaaaaaugcaacugcuagcuucauuuacaaugggaggcuuguagauaguauuguuucaugguccaaagaaauccucaggacccaggagucagaaugcguuuguaucaauggaacuuguacagugguaaugacugaugggagugcuucaggaaaagcugauacuaaaauacuauucauugaggaggggaaaaucguucauacuagcacauugucaggaagugcucaacaugucgaggagugcuccugcuauccucgauauccuggugucagaugugucugcagagacaacuggaaaggcuccaauaggcccaucguagauauaaacauaaaggaucauagcauuguuuccaguuauguguguucaggacuuguuggagacacacccagaaaaaacgacagcuccagcaguagccauuguuuggauccuaacaaugaagaagguggucauggagugaaaggcugggccuuugaugauggaaaugacguguggaugggaagaacgaucagcgagaagucacgcuuaggguaugaaaccuucaaagucauugaaggcugguccaacccuaaguccaaauugcagauaaauaggcaagucauaguugacagagguaauagguccgguuauucugguauuuucucuguugaaggcaaaagcugcaucaaucggugcuuuuauguggaguugauaaggggaagaaaagaggaaacugaagucuuguggaccucaaacaguauuguuguguuuuguggcaccucagguacauauggaacaggcucauggccugauggggcggacaucaaucucaugccuauauaa

SEQ ID NO: 54345 - RNA, 1410 nt, Artificial Sequence
  derived and/or modified CDS sequence (wt) from neuraminidase__InfluenzaA__AFJ78268
augaauccaaaucaaaagauaauaacgauuggcucuguuucucucaccauuuccacaauaugcuucuucaugcaaacugccaucuugauaacuacuguaacauugcauuucaagcaauaugaauucaacucccccccaaacaaccaagugaugcugugugaaccaacaauaauagaaagaaacauaacagagauaguguaucugaccaacaccaccauagagaaggaaauaugccccaaauuagcagaauacagaaauuggucaaagccgcaaugugacauuacaggauuugcaccuuuuucuaaggacaauucgauuaggcuuuccgcugguggggacaucugggugacaagagaaccuuaugugucaugcgauccugacaaguguuaucaauuugcccuuggacagggaacaacacuaaacaacgugcauucaaauaacacaguacgugauaggaccccuuaucggacccuauugaugaaugaguuagguguuccuuuucaucuggggaccaagcaagugugcauagcaugguccagcucaagcugucacgauggaaaagcauggcugcauguuuguauaacgggggaugauaaaaaugcaacugcuagcuucauuuacaaugggaggcuuguagauaguauuguuucaugguccaaagaaauccucaggacccaggagucagaaugcguuuguaucaauggaacuuguacaguaguaaugacugaugggagugcuucaggaaaagcugauacuaaaauacuauucauugaggaggggaaaaucguucauacuagcaaauugucaggaagugcucagcaugucgaggagugcuccugcuauccucgauauccuggugucagaugugucugcagagacaacuggaaaggcuccaauaggcccaucguagauauaaacaugaaggaucauagcauuguuuccaguuauguguguucaggacuuguuggagacacacccagaaaaaacgacagcuccagcaguagccauuguuuggauccuaacaaugaagaagguggucauggagugaaaggcugggccuuugaugauggaaaugacguguggaugggaagaacgaucagcgagaagucacgcuuaggguaugaaaccuucaaagucauugaaggcugguccaacccuaaguccaaauugcagauaaauaggcaagucauaguugacagagguaauagguccgguuauucugguauuuucucuguugaaggcaaaagcugcaucaaucggugcuuuuauguggaguugauaaggggaagaaaagaggaaacugaaguuuuguggaccucaaacaguauuguuguguuuuguggcaccucagguacauauggaacaggcucauggccugauggggcggacaucaaucucaugccuauauaa

SEQ ID NO: 54346 - RNA, 1410 nt, Artificial Sequence
  derived and/or modified CDS sequence (wt) from neuraminidase__InfluenzaA__AFJ78279
augaauccaaaucaaaagauaauaacgauuggcucuguuucucucaccauuuccacaauaugcuucuucaugcaaacugccaucuugauaacuacuguaacauugcauuucaagcaauaugaauucaacucccccccaaacaaccaagugaugcugugugaaccaacaauaauagaaagaaacauaacagagauaguguaucugaucaacaccaccauagagaaggaaauaugccccaaauuagcagaauacagaaauuggucaaagccgcaaugugacauuacaggauuugcaccuuuuucuaaggacaauucgauuaggcuuuccgcugguggggacaucugggugacaagagaaccuuaugugucaugcgauccugacaaguguuaucaauuugcccuuggacagggaacaacacuaaacaacgugcauucaaauaacacaguacgugauaggaccccuuaucggacccuauugaugaaugaguuagguguuccuuuucaucuggggaccaagcaagugugcauagcaugguccagcucaaguugucacgauggaaaagcauggcugcauguuuguauaacaggggaugauaaaaaugcaacugcuagcuucauuuacaaugggaggcuuguagauaguauuguuucaugguccaaagaaauccucaggacccaggagucagaaugcguuuguaucaauggaacuuguacaguaguaaugacugaugggagugcuucaggaaaagcugauacuaaaauacuauucauugaggaggggaaaaucguucauacuagcacauugucaggaggugcucagcaugucgaggagugcuccugcuauccucgauauccuggugucagaugugucugcagagacaacuggaaaggcuccaauaggcccaucguagauauaaacauaaaggaucauagcauuguuuccaguuauguguguucaggacuuguuggagacacacccagaaaaaacgacagcuccagcaguagccauuguuuggauccuaacaaugaagaagguggucauggagugaaaggcugggccuuugaugauggaaaugacguguggaugggaagaacgaucagcgagaagucacgcuuaggguaugaaaccuucaaagucauugaaggcugguccaacccuaaguccaaauugcagauaaauaggcaagucauaguugacagagguaauagguccgguuauucugguauuuucucuguugaaggcaaaagcugcaucaaucggugcuuuuauguggaguugauaaggggaagaaaagaggaaacugaagucuuguggaccucaaacaguauuguuguguuuuguggcaccucagguacauauggaacaggcucauggccugauggggcggacaucaaucucaugccuauauaa

SEQ ID NO: 54347 - RNA, 1410 nt, Artificial Sequence
  derived and/or modified CDS sequence (wt) from neuraminidase__InfluenzaA__AFJ78290
augaauccaaaucaaaagauaauaacgauuggcucuguuucucucaccauuuccacaauaugcuucuucaugcaaauugccaucuugauaacuacuguaacauugcauuucaagcaauaugaauucaacucccccccaaacaaccaagugaugcugugugaaccaacaauaauagaaagaaacauaacagagauaguguaucugaccaacaccaccauagagaaggaaauaugccccaaacuagcagaauacagaaauuggucaaagccgcaaugugacauuacaggguuugcaccuuuuucuaaggacaauucgauuaggcuuuccgcugguggggacaucugggugacaagagaaccuuaugugucaugcgauccugacaaguguuaucaauuugcccuuggacagggaacaacacuaaacaacguacauucaaauaacacaguacgugauaggaccccuuaucggacccuauugaugaaugaguuagguguuccuuuucaucuggggaccaagcaagugugcauagcaugguccagcucaaguugucacgauggaaaagcauggcugcauguuuguauaacgggggaugauaaaaaugcaacugcuagcuucauuuacaaugggaggcuuguagauaguguuguuucaugguccaaagaaauccucaggacccaggagucagaaugcguuuguaucaauggaacuuguacaguaguaaugacugaugggagugcuucaggaaaagcugauacuaaaauacuauucauugaggaggggaaaaucguucauacuagcgcauugucgggaagugcucagcaugucgaggagugcuccugcuauccucgauauccuggugucagaugugucugcagagacaacuggaaaggauccaauaggcccaucguagauauaaacauaaaggaucauagcauugucuccaguuauguguguucaggacuuguuggagacacacccagaaaaaacgacagcuccagcaguagccauuguuuggauccuaacaaugaggaagguggucauggggugaaaggcugggccuuugaugauggaaaugacguguggaugggaagaacgaucagcgagaagucacgcuuaggguaugaaaccuucaaagucauugaaggcugguccaacccuaaguccaaauugcagauaaauaggcaagucauaguugacagagguaauagguccgguuauucugguauuuucucuguugaaggcaaaagcugcaucaaucggugcuuuuauguggaguugauaaggggaagaaaagaggaaacugaagucuuguggaccucaaacaguauuguuguguuuuguggcaccucagguacauauggaacaggcucauggccugauggggcggacaucaaucucaugccuauauaa

SEQ ID NO: 54348 - RNA, 1413 nt, Artificial Sequence
  derived and/or modified CDS sequence (wt) from neuraminidase__InfluenzaA__AFJ78312
augaauccaaaucaaaaaauaauaaccauuggaucaaucaguauagcaaucggaauaauuagucuaauguugcaaauaggaaauauuauuucaauaugggcuagucacucaauccaaacuggaagucaaaaccacacuggaauaugcaaccaaagaaucaucacauaugaaaacagcaccugggugaaucacacauauguuaauauuaacaacacuaauguuguugcuggaaaggacaaaacuucagugacauuggccggcaauucaucucuuuguucuaucaguggaugggcuauauacacaaaagacaacagcauaagaauugguuccaaaggagauguuuuugucauaagagagccuuucauaucauguucucacuuggaaugcagaaccuuuuuucugacccaaggugcucuauuaaaugacaaacauucaaaugggaccguuaaggacagaaguccuuauagggccuuaaugagcuguccucuaggugaagcuccgucuccauauaauucaaaguuugaaucaguugcuuggucagcaagcgcaugccaugauggcaugggcugguuaacaaucggaauuucugguccagacaauggagcaguggcuguacuaaaauacaacggcauaauaacugaaaccauaaaaaguugggaaaagcgaauauuaagaacacaagagucugaaugugucugugugaacgggucauguuuuaccauaaugaccgauggcccgaguaauggggccgccucguacaaaaucuucaagaucgaaaaggggaagguuacuaaaucaauagaguugaaugcacccaauucucauuaugaggaauguuccuguuacccagacacuggcacagugauguguguaugccgggacaacuggcacgguucaaaucgaccuugggugucuuuuaaucaaaaccuggauuaucaaauaggauacaucugcagugggguguucggugacaauccgcgucccaaagauggagagggcagcuguaauccagugacugcugauggagcagacggaguaaagggguuuucauacaaauaugguaaugguguuuggauaggaaggacuaaaaguaacagacuuagaaagggguucgagaugauuugggauccuaauggauggacagauaccgacagugauuucucagugaaacaggauguuguggcaauaacugauuggucaggguacagcggaaguuucguucaacauccugaguuaacaggauuggacuguauaaggccuugcuucuggguugaguuagucagaggacggccuagagaaaauacaacaaucuggacuagugggagcagcauuucuuuuuguggcguaaauagugauacugcaaacuggucuuggccagacggugcugaguugccauucaccauugacaaguag

SEQ ID NO: 54349 - RNA, 1410 nt, Artificial Sequence; identical to SEQ ID NO: 54281
  derived and/or modified CDS sequence (wt) from neuraminidase__InfluenzaA__AFJ78323

SEQ ID NO: 54350 - RNA, 1413 nt, Artificial Sequence
  derived and/or modified CDS sequence (wt) from neuraminidase__InfluenzaA__AFJ78334
augaauccaaaucaaaaaauaauaaccauuggaucaaucaguauagcaaucggaauaauuagucuaauguugcaaauaggaaauauuauuucaauaugggcuagucacucaauccaaacuggaagucaaaaccauacuggaauaugcaaccaaagaaucaucacauaugaaaacagcaccugggugaaucacacauaugucaauauuaacaacacuaauguuguugcuggaaaagacaaaacuucagugacauuggccggcaauucaucucuuuguucuaucaguggaugggcuauauacacaaaagacaacagcauaagaauugguuccaaaggagauguuuuugucauaagagagccuuucauaucauguucucacuuggaaugcagaaccuuuuuucugacccaaggugcucuauuaaaugacaaacauucaaaugggaccguuaaggacagaagucccuauagggccuuaaugagcuguccucuaggugaagcuccguccccauacaauucaaaguuugaaucaguugcuuggucagcaagcgcaugccaugauggcaugggcugguuaacaaucggaauuucugguccagacaauggagcaguggcuguacuaaaauacaacggcauaauaacugaaaccauaaaaaguuggaaaaagcaaauauuaagaacacaagagucugaaugugucugugugaacgggucauguuucaccauaaugaccgauggcccgaguaauggggccgccucguacaaaaucuucaagaucgaaaaggggaagguuacuaaaucaauagaguugaaugcacccaauuuucauuaugaggaauguuccuguuacccagacacugguacagugauguguguaugcagggacaacuggcaugguucaaaccgaccuugggugucuuuuaaucaaaaccuggauuaucaaauaggauacaucugcagugggguguucggugacaauccgcgucccaaagauggagagggcagcuguaauccagugacuguugauggagcagacggaguaaagggguuuucauacaaauaugguaaugguguuuggauaggaaggacuaaaaguaacagacuuagaaagggguuugagaugauuugggauccuaauggauggacagauaccgacagugauuucucagugaaacaggauguuguggcaauaacugauuggucaggguacagcggaaguuucguucaacauccugaguuaacaggauuggacuguauaaggccuugcuucuggguugaguuagucagaggacuuccuagagaaaauacaacaaucuggacuagugggagcagcauuucuuuuuguggcguaaauagugauacugcaaacuggucuuggccagacggugcugaguugccguucaccauugacaaguag

SEQ ID NO: 54351 - RNA, 1413 nt, Artificial Sequence
  derived and/or modified CDS sequence (wt) from neuraminidase__InfluenzaA__AFJ78345
augaauccaaaucaaaaaauaauaaccauuggaucaaucaguauagcaaucggaauaauuagucuaauguugcaaauaggaaauauuauuucaauaugggcuagucacucaauccaaacuggaagucaaaaccauacuggaauaugcaaccaaagaaucaucacauaugaaaacagcaccugggugaaucacacauaugucaauauuaacaacacuaauguuguugcuggaaaagacaaaacuucagugacauuggccggcaauucaucucuuuguucuaucaguggaugggcuauauacacaaaagacaacagcauaagaauugguuccaaaggagauguuuuugucauaagagagccuuucauaucauguucucacuuggaaugcagaaccuuuuuucugacccaaggugcucuauuaaaugacaaacauucaaauggaaccguuaaggacagaagucccuauagggccuuaaugagcuguccucuaggugaagcuccguccccauacaauucaaaguuugaaucaguugcuuggucagcaagcgcaugccaugauggcaugggcugguuaacaaucggaauuucugguccagacaauggagcaguggcuguacuaaaauacaacggcauaauaacugaaaccauaaaaaguuggaaaaagcaaauauuaagaacacaagagucugaaugugucugugugaacgggucauguuucaccauaaugaccgauggcccgaguaauggggccgccucguacaaaaucuucaagaucgaaaaggggaagguuacuaaaucaauagaguugaaugcacccaauuuucauuaugaggaauguuccuguuacccagacacugguacagugauguguguaugcagggacaacuggcaugguucaaaccgaccuugggugucuuuuaaucaaaaccuggauuaucaaauaggauacaucugcagugggguguucggugacaauccgcgucccaaagauggagagggcagcuguaauccagugacuguugauggagcagacggaguaaagggguuuucauacaaauaugguaaugguguuuggauaggaaggacuaaaaguaacagacuuagaaagggguuugagaugauuugggauccuaauggauggacagauaccgacagugauuucucagugaaacaggauguuguggcaauaacugauuggucaggguacagcggaaguuucguucaacauccugaguuaacaggauuggacuguauaaggccuugcuucuggguugaguuagucagaggacuuccuagagaaaauacaacaaucuggacuagugggagcagcauuucuuuuuguggcguaaauagugauacugcaaacuggucuuggccagacggugcugaguugccguucaccauugacaaguag

SEQ ID NO: 54352 - RNA, 1413 nt, Artificial Sequence
  derived and/or modified CDS sequence (wt) from neuraminidase__InfluenzaA__AFJ78356
augaauccaaaucaaaaaauaauaaccauuggaucaaucaguauagcaaucggaauaauuagucuaauguugcaaauaggaaauauuauuucaauaugggcuagucacucaauccaaacuggaagucaaaaccauacuggaauaugcaaccaaagaaucaucacauaugaaaacagcaccugggugaaucacacauaugucaauauuaacaacacuaauguuguuguuggaaaggacaaaacuucagugacauuggccggcaauucaucucuuuguucuaucaguggaugggcuauauacacaaaagacaacagcauaagaauugguuccaaaggagauguuuuugucauaagagagccuuucauaucauguucucacuuggaaugcagaaccuuuuuucugacccaaggugcucuauuaaaugacaaacauucaaaugggaccgucaaggacagaagucccuauagggccuuaaugagcuguccucuaggugaagcuccguccccauacaauucaaaguuugaaucaguugcuuggucagcaagcgcaugccaugauggcaugggcugguuaacaaucggaauuucugguccagacaauggagcaguggcuguacuaaaauacaacggcauaauaacugaaaccauaaaaaguuggaaaaagcaaauauuaagaacacaagagucugaaugugucugugugaacgggucauguuucaccauaaugaccgauggcccgaguaauggggccgccucguacaaaaucuucaagaucgaaaaggggaagguuacuaaaucaauagaguugaaugcacccaauuuucauuaugaggaauguuccuguuacccagacacuggcacagugauguguauaugcagggacaacuggcaugguucaaaccgaccuugggugucuuuuaaucaaaaccuggauuaucaaauaggauacaucugcagugggguguucggugacaauccgcgucccaaagauggagagggcagcuguaauccagugacuguugauggagcagacggaguaaagggguuuucauacaaauaugguaaugguguuuggauaggaaggacuaaaaguaacagacuuagaaagggguuugagaugauuugggauccuaauggauggacagauaccgacagugauuucucagugaaacaggauguuguggcaauaacugauuggucaggguacagcggaaguuucguucaacauccugaguuaacaggauuggacuguauaaggccuuguuucuggguugaguuagucagaggacugccuagagaaaauacaacaaucuggacuagugggagcagcauuuccuuuuguggcguaaauagugauacugcaaacuggucuuggccagacggugcugaguugccguucaccauugacaaguag

SEQ ID NO: 54353 - RNA, 1413 nt, Artificial Sequence
  derived and/or modified CDS sequence (wt) from neuraminidase__InfluenzaA__AFJ78367
augaauccaaaucaaaaaauaauaaccauuggaucaaucaguauagcaaucggaauaauuagucuaauguugcaaauaggaaauauuauuucaauaugggcuagucacucaauccaaacuggaagucaaaaccacacuggaauaugcaaccaaagaaucaucacauaugaaaacagcaccugggugaaucauacauauguuaauauuaacaacacuaauguuguugcuggaaaggacaaaacuucagugacauuggccggcaauucaucucuuuguucuaucaguggaugggcuauauacacaaaagacaacagcauaagaauugguuccaaaggagauguuuuugucauaagagagccuuucauaucauguucucacuuggaaugcagaaccuuuuuucugacccaaggugcucuauuaaaugacaaacauucaaaugggaccguuaaggacagaaguccuuauagggccuuaaugagcuguccucuaggugaagcuccgucuccauauaauucaaaguuugaaucaguugcuuggucagcaagcgcaugccaugauggcaugggcugguuaacaaucggaauuucugguccagacaauggagcaguggcuguacuaaaauacaacggcauaauaacugaaaccauaaaaaguuggaaaaagcgaauauuaagaacacaagaaucugaaugugucugugugaacgggucauguuuuaccauaaugaccgauggcccgaguaauggggccgccucauacaaaaucuucaagaucgaaaaggggaagguuacuaaaucaauagaguugaaugcacccaauucucauuaugaggaauguuccuguuacccagacacuggcacagugauguguguaugccgggacaacuggcacgguucaaaucggccuugggugucuuuuaaucaaaaccuggauuaucaaauaggauacaucugcagugggguguucggugacaauccgcgucccaaagauggagagggcagcuguaauccagugacugcugauggagcagacggaguaaagggguuuucauacaaauaugguaaugguguuuggauaggaaggacuaaaaguaacagacuuagaaagggguucgagaugauuugggauccuaauggauggacagauaccgacagugauuucucagugaaacaggauguuguggcaauaacugauuggucaggguacagcggaaguuucguucaacauccugaguuaacaggauuggacuguauaaggccuugcuucuggguugaguuagucagaggacggccuagagaaaauacaacaaucuggacuagugggagcagcauuucuuuuuguggcguaaauggugauacugcaaacuggucuuggccagacggugcugaguugccauucaccauugacaaguag

SEQ ID NO: 54354 - RNA, 1413 nt, Artificial Sequence
  derived and/or modified CDS sequence (wt) from neuraminidase__InfluenzaA__AFJ78378
augaauccaaaucaaaaaguaauaaccauuggaucaaucaguauagcaaucggaauaauuagucuaauguugcaaauaggaaauauuauuucaauaugggcuagucacucaauccaaacuggaagucaaaaccacacuggaauaugcaaccaaagaaucaucacauaugaaaacagcaccugggugaaucacacauauguuaauauuaacaacacuaauguuguugcuggaaaggacaaaacuucagugacauuggccggcaauucaucucuuuguucuaucaguggaugggcuauauacacaaaagacaacagcauaagaauugguuccaaaggagauguuuuugucauaagagagccuuucauaucauguucucacauggaaugcagaaccuuuuuucuaacccaaggugcucuauuaaaugacaaacauucaaaugggaccguuaaggacagaaguccuuauagggccuuaaugagcuguccucuaggugaagcuccguccccauauaauucaaaguuugaaucaguugcuuggucagcaagcgcaugccaugauggcaugggcugguuaacaaucggaauuucugguccagacaauggagcaguggcuguacuaaaauacaacggcauaauaacugaaaccauaaaaaguuggaaaaaacgaauauuaagaacacaagagucugaaugugucugugugaacgggucauguuuuaccauaaugaccgauggcccgaguaauggggccgccucguacaaaaucuucaagaucgaaaaggggaaaguuacuaaaucaauagaguugaaugcacccaauucucauuaugaggaauguuccuguuacccagacacuggcacagugauguguguaugcagggacaacuggcacgguucaaaucgaccuugggugucuuuuaaucaaaaccuggauuaucaaauaggauacaucugcagugggguguucggugacaauccgcgucccagagauggagagggcagcuguaauccagugacuguugauggagcagacggaguaaagggguuuucauacaaauaugguaaugguguuuggauaggaaggacuaaaaguaacagacuuagaaagggguuugagaugauuugggauccuaauggauggacagauaccgacagugauuucgcagugaaacaggauguuguggcaauaacugauuggucaggguacagcggaaguuucguucaacauccugaguuaacaggauuggacuguauaagaccuugcuucuggguugaguuagucagaggacugccuagagaaaauacaacaaucuggacuagugggagcagcauuucuuuuuguggcguaaauagugauacugcaaacuggucuuggccagacggugcugaguugccauucaccauugacaaguag

SEQ ID NO: 54355 - RNA, 1413 nt, Artificial Sequence
  derived and/or modified CDS sequence (wt) from neuraminidase__InfluenzaA__AFJ78389
augaauccaaaucaaaaaauaauaaccauuggaucaaucaguauagcaaucggaauaauuagucuaauguugcaaauaggaaauauuauuucaauaugggcuagucacucaauccaaacuggaagucaaaaccacacuggaauaugcaaccaaagaaucaucacauaugaaaacagcaccugggugaaucacacauauguuaauauuaacaacacuaauguuguugcuggaaaggacaaaacuucagugacauuggccggcaauucaucucuuuguucuaucaguggaugggcuauauacacaaaagacaacagcauaagaauuggcuccaaaggagauguuuuugucauaagagaaccuuucauaucauguucucacuuggaaugcagaaccuuuuuucugacccaaggugcucuauuaaaugacaaacauucaaauggaaccguuaaggacagaaguccuuauagggccuuaaugagcuguccucuaggugaagcuccguccccauacaauucaaaguuugaaucaguugcauggucagcaagcgcaugccaugauggcaugggcugguuaacaaucggaauuucugguccagacaauggagcuguggcuguacuaaaauacaacggaauaauaacugaaaccauaaaaaguuggaaaaagcgaauauugagaacacaagagucugaaugugucugugugaacgggucauguuucaccauaaugaccgauggcccgaguaauggggccgccucguacaaaaucuucaagaucgaaaaggggaagguuacuaaaucaauagaguuaaaugcacccaauuuucauuaugaggaauguuccuguuacccagacacuggcacagugauguguguaugcagggacaacuggcaugguucaaaucgaccuugggugucuuuuaaucaaaacuuggauuaucaaauaggauacaucugcaguggaguguucggugacaauccgcgucccaaagauggaaagggcagcuguaauccagugacuguugauggagcagacggaguuaagggguuuucauacaaauaugguaaugguguuuggauaggaaggacuaaaaguaacagacuuagaaagggguuugagaugauuugggauccuaauggauggacagauaccgacagugauuucucagugaaacaggauguuguggcaauaacugauuggucaggguacagcggaaguuucguucaacauccugaguuaacaggauuggacuguauaagaccuugcuucuggguugaguuagucagaggacugccuagagaaaauacaacaaucuggacuagugggagcagcauuucuuuuuguggcguugauagugauacugcaaacuggucuuggccagacggugcugaguugccguucaccauugacaaguag

SEQ ID NO: 54356 - RNA, 1413 nt, Artificial Sequence; identical to SEQ ID NO: 54355
  derived and/or modified CDS sequence (wt) from neuraminidase__InfluenzaA__AFJ78400

SEQ ID NO: 54357 - RNA, 1413 nt, Artificial Sequence
  derived and/or modified CDS sequence (wt) from neuraminidase__InfluenzaA__AFJ78411
augaauccaaaucaaaaaauaauaaccauuggaucaaucaguauagcaaucggaauaauuagucuaauguugcaaauaggaaauauuauuucaauaugggcuagucacucaauccaaacuggaagucaaaaccacacuggaauaugcaaccaaagaaucaucacauaugaaaacagcaccugggugaaucacacauauguuaauauuaacaacacuaauguuguugcuggaaaggacaaaacuucagugacauuggccggcaauucaucucuuuguucuaucaguggaugggcuauauacacaaaagacaacagcauaagaauuggcuccaaaggagauguuuuugucauaagagaaccuuucauaucauguucucacuuggaaugcagaaccuuuuuucugacccaaggugcucuauuaaaugacaaacauucaaauggaaccguuaaggacagaaguccuuauagggccuuaaugagcuguccucuaggugaagcuccguccccauacaauucaaaguuugaaucaguugcauggucagcaagcgcaugccaugauggcaugggcugguuaacaaucggaauuucugguccagacaauggagcuguggcuguacuaaaauacaacggaauaauaacugaaaccauaaaaaguuggaaaaagcgaauauugagaacacaagagucugaaugugucugugugaacgggucauguuucaccauaaugaccgauggcccgaguaauggggccgccucguacaaaaucuucaagaucgaaaaggggaagguuacuaaaucaauagaguuaaaugcacccaauuuucauuaugaggaauguuccuguuacccagacacuggcacagugauguguguaugcagggacaacuggcaugguucaaaucgaccuugggugucuuuuaaucaaaacuuggauuaucaaauaggauacaucugcaguggaguguucggugacaauccgcgucccaaagaugggaagggcagcuguaauccagugacuguugauggagcagacggaguuaagggguuuucauacaaauaugguaaugguguuuggauaggaaggacuaaaaguaacagacuuagaaagggauuugagaugauuugggauccuaauggauggacagauaccgacagugauuucucagugaaacaggauguuguggcaauaacugauuggucaggguacagcggaaguuucguucaacauccugaguuaacaggauuggacuguauaagaccuugcuucuggguugaguuagucagaggacugccuagagaaaauacaacaaucuggacuagugggagcagcauuucuuuuuguggcguugauagugauacugcaaacuggucuuggccagacggugcugaguugccguucaccauugacaaguag

SEQ ID NO: 54358 - RNA, 1413 nt, Artificial Sequence
  derived and/or modified CDS sequence (wt) from neuraminidase__InfluenzaA__AFJ78422
augaacccaaaucaaaaaauaauaaccauuggaucaaucaguauagcaaucggaauaauuagucuaauguugcaaauaggaaauauuauuucaauaugggcuagucacucaauccaaacuggaagucaaaaccacacuggaauaugcaaccaaagaaucaucacauaugaaaacagcaccugggugaaccacacauauguuaauauuaacaacacuaauguuguugcuggaaaggacaaaacuucagugacauuggccggcaauucaucucuuuguucuaucaguggaugggcuauauacacaaaagacaacagcauaagaauuggcuccaaaggagauguuuuugucauaagagaaccuuucauaucauguucucacuuggaaugcagaaccuuuuuucugacccaaggugcucuauuaaaugacaaacauucaaaugggaccguaaaggacagaaguccuuauagggccuuaaugagcuguccucuaggugaagcuccguccccauacaauucaaaguucgaaucaguugcauggucagcaagcgcaugccaugauggcacgggcugguuaacaaucggaauuucugguccagacaauggagcuguggcuguacuaaaauacaacggaauaauaacugaaaccauaaaaaguuggaaaaagcgaauauuaagaacacaagagucugaaugugucuguaugaacgggucauguuucaccauaaugaccgauggcccgaguaauggggccgccucguacaaaauuuucaagaucgaaaaggggaagguuacuaaaucaauagaguugaaugcacccaguuuucauuaugaggaauguuccuguuacccagacacuggcacagugauguguguaugcagggacaacuggcaugguucaaaucgaccuugggugucuuuuaaucaaaacuuggauuaucaaauaggauacaucugcaguggaguguucggugacaauccgcguccccaagauggagagggcagcugcaauccagugacuguugauggagcagacggaguaaaaggguuuucauacaaauaugguaaugguguuuggauaggaaggaccaaaaguaacagacuuagaaagggguuugagaugauuugggauccuaacggauggacaaauaccgacagugauuucucagugaaacaggauguuguagcaauaacugauuggucaggguacagcggaaguuucguucaacauccugaguuaacaggauuggacuguauaaggccuugcuucuggguugaguuagucagagggcugccuagagaaaauacaacaaucuggacuagugggagcagcauuucuuuuuguggcguuaauagugauacugcaaacuggucuuggccagacggugcugaguugccguucaccauugacaaguag

SEQ ID NO: 54359 - RNA, 1413 nt, Artificial Sequence
  derived and/or modified CDS sequence (wt) from neuraminidase__InfluenzaA__AFJ78433
augaacccaaaucaaaaaauaauaaccauuggaucaaucaguauagcaaucggaauaauuagucuaauguugcaaauaggaaauauuauuucaauaugggcuagucacucaauccaaacuggaagucaaaaccacacuggaauaugcaaccaaagaaucaucacauaugaaaacagcaccugggugaauaacacauauguuaauauuaacaacacuaauguuguugcugaaaaggacaaaacuucagugacauuggccggcaauucaucucuuuguucuaucaguggaugggcuauauacacaaaagacaacagcauaagaauuggcuccaaaggagauguuuuugucauaagagaaccuuucauaucauguucucacuuggaaugcagaaccuuuuuucugacccaaggugcucuauuaaaugacaaacauucaaaugggaccguaaaggacagaaguccuuauagggccuuaaugaguuguccucuaggugaagcuccguccccauacaauucaaaguucgaaucaguugcauggucagcaagcgcaugccaugauggcaugggcugguuaacaaucggaauuucugguccagacaauggagcuguggcuguacuaaaauacaacggaauaauaacugaaaccauaaaaaguuggaaaaagcgaauauuaagaacacaagagucugaaugugucuguaugaacgggucauguuucaccauaaugaccgauggcccgaguaauggggccgccucguacaaaauuuucaagaucgaaaaggggaagguuacuaaaucaauagaguugaaugcacccaauuuucauuaugaggaauguuccuguuacccagacacuggcacagugauguguguaugcagagacaacuggcaugguucaaaucgaccuugggugucuuuuaaucaaaacuuggauuaucaaauaggauacaucugcaguggaguguucggugacaauccacgucccaaagauggggagggcagcugcaauccagugacuguugauggagcagauggaguaaaaggguuuucauacaaauaugguaaugguguuuggauaggaaggaccaaaaguaacagacuuagaaagggguuugagaugauuugggauccuaauggauggacaaauaccgacagugauuucucagugaaacaggauguuguagcaauaacugauuggucaggguacagcggaaguuuuguucaacauccugaguuaacaggauuggacuguauaagaccuugcuucuggguugaguuagucagagggcugccuagggaaaauacaacaaucuggacuagugggagcagcauuucuuuuuguggcguuaauagugauacugcaaacuggucuuggccagacggugcugaguugccguucaccauugacaaguag

SEQ ID NO: 54360 - RNA, 1413 nt, Artificial Sequence
  derived and/or modified CDS sequence (wt) from neuraminidase__InfluenzaA__AFJ78444
augaacccaaaucaaaaaauaauaaccauuggaucaaucaguauagcaauuggaauaauuagucuaauguugcaaauaggaaauauuauuucaauaugggcuagucacucaauccaaacuggaagucaaaaccacacuggaauaugcaaccaaagaaucaucacauaugaaaacagcaccugggugaauaacacauauguuaauauuaacaacacuaauguuguugcugaaaaggacaaaacuucagugacauuggccggcaauucaucucuuuguucuaucaguggaugggcuauauacacaaaagacaacagcauaagaauuggcuccaaaggagauguuuuugucauaagagaaccuuucauaucauguucucacuuggaaugcagaaccuuuuuucugacccaaggugcucuauuaaaugacaaacauucaaaugggaccguaaaggacagaaguccuuauagggccuuaaugagcuguccucuaggugaagcuccguccccauacaauucaaaguucgaaucaguugcauggucagcaagcgcaugccaugauggcaugggcugguuaacaaucggaauuucugguccagacaauggagcuguggcuguacuaaaauacaacggaauaauaacugaaaccauaaaaaguuggaaaaagcgaauauuaagaacacaagagucugaaugugucuguaugaacgggucauguuucaccauaaugaccgauggcccgaguaauggggccgccucguacaaaauuuucaagaucgaaaaggggaagguuacuaaaucaauagaguugaaugcacccaauuuucauuaugaggaauguuccuguuacccagacacuggcacagugauguguguaugcagagacaacuggcaugguucaaaucgaccuugggugucuuuuaaucaaaacuuggauuaucaaauaggauacaucugcaguggaguguucggugacaauccgcgucccaaagauggggagggcagcugcaauccagugacuguugauggagcagacggaguaaaaggguuuucauacaaauaugguaaugguguuuggauaggaaggaccaaaaguaacagacuuagaaagggguuugagaugauuugggauccuaauggauggacaaauaccgacagugauuucucagugaaacaggauguuguagcaauaacugauuggucaggguacagcggaaguuuuguucaacauccugaguuaacaggauuggacuguauaagaccuugcuucuggguugaguuagucagagggcugccuagggaaaauacaacaaucuggacuagugggagcagcauuucuuuuuguggcguuaauagugauacugcaaacuggucuuggccagacggugcugaguugccguucaccauugacaaguag

SEQ ID NO: 54361 - RNA, 1413 nt, Artificial Sequence
  derived and/or modified CDS sequence (wt) from neuraminidase__InfluenzaA__AFJ78466
augaacccaaaucaaaagauaauaaccauuggaucaaucaguauagcaaucggaauaauuagucuaauguugcaaauaggaaauauuauuucaauaugggcuagucacucaauccaaacuggaagucaaaaccacacuggaauaugcaaccaaagaaucaucacauaugaaaacagcaccugggugaaucacacauauguuaauauuaacaacacuaauguuguugcuggaaaggacaaaacuucagugacauuggccggcaauucaucucuuuguucuaucaguggaugggcuauauacacaaaagacaacagcauaagaauuggcuccaaaggagauguuuuugucauaagagaaccuuucauaucauguucucacuuggaaugcagaaccuuuuuucugacccaaggcgcucuauuaaaugacaaacauucaaaugggaccguaaaggacagaaguccuuauagggccuuaaugagcuguccucuaggugaagcuccguccccauacaauucaaaauucgaaucaguugcauggucagcaagcgcaugccaugauggcauaggcugguuaacaaucggaauuucugguccagacaauggagcuguggcuguacuaaaauacaacggaauaauaacuggaaccauaaaaaguuggaaaaagcaaauauuaagaacacaagagucugaaugugucuguauaaacgggucauguuucaccauaaugaccgauggcccgaguaauggggccgccucguacaaaauuuucaagaucgaaaaggggaagguuaccaaaucaauagaguugaaugcacccaauuuucauuaugaggaauguuccuguuacccagacacuggcacagugauguguguaugcagggacaacuggcaugguucaaaucgaccuugggugucuuuuaaucaaaacuuggauuaucaaauaggauacaucugcaguggaguguucggugacaauccgcgucccaaagauggagagggcagaugcaauccagugacuguugauggagcagacggaguaaaaggguuuucauacaaauaugguaaugguguuuggauaggaaggaccaaaaguaacagacuuagaaagggguucgagaugauuugggauccuaauggauggacaaauaccgacagugauuucucagugaaacaggauguuguagcaauaacugauuggucaggguacagcggaaguuucguccaacauccugaguuaacaggauuggacuguauaagaccuugcuucuggguugaguuagucagagggcugccuagagaaaauacaacaaucuggacuagugggagcagcauuucuuuuuguggcguuaauagugauacugcaaacuggucuuggccagacggugcugaguugccguucaccauugacaaguag

SEQ ID NO: 54362 - RNA, 1413 nt, Artificial Sequence
  derived and/or modified CDS sequence (wt) from neuraminidase__InfluenzaA__AFJ78477
augaacccaaaucaaaaaauaauaaccauuggaucaaucaguauagcaaucggaauaauuggucuaauguugcaaauaggaaauauuauuucaauaugggcuagucacucaauccaaacuggaagucaaaaccacacuggaauaugcagccaaagaaucaucacauaugaaaacagcaccugggugaauaacacauauguuaauauuaacaacacuaauguuguugcugaaaaggacaaaacuucagugacauuggccggcaauucaucucuuuguucuaucaguggaugggcuauauacacaaaagacaacagcauaagaauuggcuccaaaggagauguuuuugucauaagagaaccuuucauaucauguucucacuuggaaugcagaaccuuuuuucugacccaaggugcucuauuaaaugacaaacauucaaaugggaccguaaaggacagaaguccuuauagggccuuaaugagcuguccucuaggugaagcuccguccccauacaauucaagguucgaaucaguugcauggucagcaagcgcaugccaugauggcaugggcugguuaacaaucggaauuucugguccagacaauggagcuguggcuguacuaaaauacaacggaauaauaacugaaaccauaaaaaguuggaaaaagcgaauauuaagaacacaagagucugaaugugucuguaugaacgggucauguuucaccauaaugaccgauggcccgaguaauggggccgccucguacaaaauuuucaagaucgaaaaggggaagguuacuaaaucaauagaguugaaugcacccaauuuucauuaugaggaauguuccuguuacccagacacuggcacagugauguguguaugcagagacaacuggcaugguucaaaucgaccuugggugucuuuuaaucaaaacuuggauuaucaaauaggauacaucugcaguggaguguucggugacaauccgcgucccaaagauggggagggcagcugcaauccagugacuguugauggagcagacggaguaaaaggguuuucauacaaauaugguaaugguguuuggauaggaaggaccaaaaguaacagacuuagaaagggguuugagaugauuugggauccuaauggauggacaaauaccgacagugauuucucagugaaacaggauguuguagcaauaacugauuggucaggguacagcggaaguuuuguucaacauccugaguuaacaggauuggacuguauaagaccuugcuucuggguugaguuagucagagggcugccuagggaaaauacaacaaucuggacuagugggagcagcauuucuuuuuguggcguuaauagugguacugcaaacuggucuuggccagacggugcugaguugccguucaccauugacaaguag

SEQ ID NO: 54363 - RNA, 1413 nt, Artificial Sequence
  derived and/or modified CDS sequence (wt) from neuraminidase__InfluenzaA__AFJ78488
augaacccaaaucaaaaaauaauaaccauuggaucaaucaguauagcaaucggaauaauuagucuaauauugcaaauaggaaauauuauuucaauaugggcuagucacucaauccaaacuggaagucaaaaccacacuggaauaugcaaccaaagaaucaucacauaugaaaacagcaccugggugaauaacacauauguuaauauuaacaacacuaauguuguugcugaaaaggacaaaacuucagugacauuggccggcaauucaucucuuuguucuaucaguggaugggcuauauacacaaaagacaacagcauaagaauuggcuccaaaggagauguuuuugucauaagagaaccuuucauaucauguucucacuuggaaugcagaaccuuuuuucugacccaaggugcucuauuaaaugacaaacauucaaaugggaccguaaaggacagaaguccuuauagggccuuaaugagcuguccucuaggugaagcuccguccccauacaauucaagguucgaaucaguugcauggucagcaagcgcaugccaugauggcaugggcugguuaacaaucggaauuucugguccagacaauggagcuguggcuguacuaaaauacaacggaauaauaacugaaaccauaaaaaguuggaaaaagcgaauauuaagaacacaagagucugaaugugucuguaugaacgggucauguuucaccauaaugaccgauggcccgaguaauggggccgccucguacaaaauuuucaagaucgaaaaggggaagguuaccaaaacaauagaguugaaugcacccaauuuucauuaugaggaauguuccuguuacccagacacuggcacagugauguguguaugcagagacaacuggcaugguucaaaucgaccuugggugucuuuuaaucaaaacuuggauuaucaaauaggauacaucugcaguggaguguucggugacaauccgcgucccaaagauggggagggcagcugcaauccagugacuguugauggagcagacggaguaaagggguuuucauacaaauaugguaaugguguuuggauaggaagaaccaaaaguaacagacuuagaaagggguuugagaugauuugggauccuaauggauggacaaauaccgacagugauuucucaaugaaacaggauguuguagcaauaacugauuggucaggguacagcggaaguuuuguucaacauccugaguuaacaggauuggacuguauaagaccuugcuucuggguugaguuagucagagggcugccuagggaaaauacgacaaucuggacuagugggagcagcauuucuuuuuguggcguuaauagugguacugcaaacuggucuuggccagacggugcugaguugccguucaccauugacaaguag

SEQ ID NO: 54364 - RNA, 1413 nt, Artificial Sequence
  derived and/or modified CDS sequence (wt) from neuraminidase__InfluenzaA__AFJ78510
augaacccaaaucaaaagauaauaaccauuggaucaaucaguauagcaaucggaauaauuagucuaauguugcaaauaggaaauauuauuucaauaugggcuagucacucaauccaaacuggaagucaaaaccacacuggaauaugcaaccaaagaaucaucacauaugaaaacagcaccugggugaaucacacauauguuaauauuaacaacacuaauguuguugcuggaaaggacaaaacuucagugacauuggccggcaauucaucucuuuguucuaucaguggaugggcuaucuacacaaaagacaacagcauaagaauuggcuccaaaggagauguuuuugucauaagagaaccuuucauaucauguucucacuuggaaugcagaaccuuuuuucugacccaaggcgcucuauuaaaugacaaacauucaaaugggaccguaaaggacagaaguccuuauagggccuuaaugagcuguccucuaggugaagcuccguccccauacaauucaaaguucgaaucaguugcauggucagcaagcgcaugccaugauggcaugggcugguuaacaaucggaauuucugguccagacaauggagcuguggcuguacuaaaauacaacggaauaauaacuggaaccauaaaaaguuggaaaaagcaaauauuaagaacacaagagucugaaugugucuguaugaacgggucauguuucaccauaaugaccgauggcccgaguaauggggccgccucguacaaaauuuucaagaucgaaaagggaaagguuacuaaaucaauagaguugaaugcacccaauuuucauuaugaggaauguuccuguuacccagacacuggcauagugauguguguaugcagggacaacuggcaugguucaaaucgaccuugggugucuuuuaaucaaaacuuggauuaucaaauaggauacaucugcaguggaguguucggugacaauccgcgucccaaagauggagagggaagcugcaauccagugacuguugauggagcagacggaguaaaaggguuuucauacaaauaugauaaugguguuuggauaggaaggaccaaaaguaacagacuuagaaagggguuugagaugauuugggauccuaauggauggacaaauaccgacagugauuucucagugaaacaggauguuguagcaauaacugauuggucaggguacagcggaaguuucguccaacauccugaguuaacaggauuggacuguauaagaccuugcuucuggguugaguuagucagagggcugccuagagaaaauacaacaaucuggacuagugggagcagcauuucuuucuguggcguuaauagugauacugcaaacuggucuuggccagacggugcugaguugccguucaccauugacaaguag

SEQ ID NO: 54365 - RNA, 1413 nt, Artificial Sequence
  derived and/or modified CDS sequence (wt) from neuraminidase__InfluenzaA__AFJ78521
augaacccaaaucaaaaaauaauaaccauuggaucaaucaguauagcaaucggaauaauuagucuaauauugcaaauaggaaauauuauuucaauaugggcuagucacucaauccaaacuggaagucaaaaccacacuggaauaugcaaccaaagaaucaucacauaugaaaacagcaccugggugaauaacacauauguuaauauuaacaacaccaauguuguugcugaaaaggacaaaacuucagugacauuggccggcaauucaucucuuuguucuaucagugggugggcuauauacacaaaagacaacagcauaagaauuggcuccaaaggagauguuuuugucauaagagaaccuuucauaucauguucucacuuggaaugcagaaccuuuuuucugacccaaggugcucuauuaaaugacaaacauucaaaugggaccguaaaggacagaaguccuuauagggccuuaaugagcuguccucuaggugaagcuccguccccauacaauucaagguuugaaucaguugcauggucagcaagcgcaugccaugauggcaugggcugguuaacaaucggaauuucugguccagacaauggagcuguggcuguacuaaaauacaacggaauaauaacugaaaccauaaaaaguuggaaaaagcgaauauuaagaacacaagagucugaaugugucuguaugaacgggucauguuucaccauaaugaccgauggcccgaguaauggagccgccucguacaaaauuuucaagaucgaaaaggggaagguuaccaaaacaauagaguugaaugcacccaauuuucauuaugaggaauguuccuguuacccagacacuggcacagugauguguguaugcagagacaacuggcaugguucaaaucgaccuugggugucuuuuaaucaaaacuuggauuaucaaauaggauacaucugcaguggaguguucggugacaauccgcgucccaaagauggggagggcagcugcaauccagugacuguugauggagcagacggaguaaaaggguuuucauacaaauaugguaaugguguuuggauaggaaggaccaaaaguaacagacuuagaaagggguuugagaugauuugggauccuaauggauggacaaauaccgacagugauuucucagugaaacaggauguuguagcaauaacugauuggucaggguacagcggaaguuuuguucaacauccugaguuaacaggauuggacuguauaagaccuugcuucuggguugaguuagucagagggcugccuagggaaaauacaacaaucuggacuagugggagcagcauuucuuuuuguggcguuaauagugguacugcaaacuggucuuggccagacggugcugaguugccguucaccauugacaaguag

SEQ ID NO: 54366 - RNA, 1413 nt, Artificial Sequence; identical to SEQ ID NO: 54259
  derived and/or modified CDS sequence (wt) from neuraminidase__InfluenzaA__AFJ78532

SEQ ID NO: 54367 - RNA, 1413 nt, Artificial Sequence; identical to SEQ ID NO: 54259
  derived and/or modified CDS sequence (wt) from neuraminidase__InfluenzaA__AFJ78543

SEQ ID NO: 54368 - RNA, 1413 nt, Artificial Sequence
  derived and/or modified CDS sequence (wt) from neuraminidase__InfluenzaA__AFJ78554
augaacccaaaucaaaaaauaauaaccauuggaucaaucaguauagcaaucggaauaauuagucuaauguugcaaauaggaaauauuauuucaauaugggcuagucacucaauccaaacuggaagucaaaaccacacuggaauaugcaaccaaagaaucauuacauaugaaaacagcaccugggugaaucacacauauguuaauauuaacaacacuaauguuguugcuggaaaggacaaaacuccagugacauuggccggcaacucaucucuuuguucuaucaguggaugggcuauacacacaaaagacaacagcauaagaauuggcuccaaaggagauguuuuugucauaagagaaccuuucauaucauguucucacuuggaaugcaaaaccuuuuuucugacccaaggcgcucuauuaaaugacaaacauucaaaugggaccguaaaggacagaaguccuuauagggccuuaaugagcuguccucuaggugaagcuccguccccauacaauucaaaguucgaaucaguugcauggucagcaagcgcaugccaugauggcauaggcugguuaacaaucggaauuucugguccagacaauggagcuguggcuguacuaaaauacaacggaauaauaacuggaaccauaaaaaguuggaaaaagcaaauauuaagaacacaagagucugaaugugucuguaugaacgggucauguuucaccauaaugaccgaugguccgaguaauggggccgccucauacaaaauuuucaagaucgaaaaggggaagguuacuaaaucaauggaguuaaaugcacccaauuuucauuaugaggaauguucuuguuacccagacacuggcacagugauguguguaugcagggacaacuggcaugguucaaaucgaccuugggugucuuuuaaucaaaacuuggauuaucaaauaggauacaucugcaguggaguguucggugacaauccgcgucccaaagauggagagggcagcugcaauccagugacuguugauggagcaaacggaguaaaaggguuuucauacaaauaugguaaugguguuuggauaggaaggaccaaaaguaacagaauuagaaagggguuugagaugauuugggauccuaauggauggacaaauaccgacagugauuucucagugaaacaggauauuguagcaauaacugauuggucaggguacagcggaaguuucguccaacauccugaguuaacaggauuggacuguauaagaccuugcuucuggguugaguuagucagagggcugccuagagaaaauacaacaaucuggacuaguggaagcagcauuucuuuuuguggcguuaauagugauauugcaaacuggucuuggccagacggugcugaguugccguucaccauugacaaguag

SEQ ID NO: 54369 - RNA, 1413 nt, Artificial Sequence; identical to SEQ ID NO: 54251
  derived and/or modified CDS sequence (wt) from neuraminidase__InfluenzaA__AFJ78565

SEQ ID NO: 54370 - RNA, 1413 nt, Artificial Sequence
  derived and/or modified CDS sequence (wt) from neuraminidase__InfluenzaA__AFJ78576
augaacccaaaucaaaaaauaauaaccauuggaucaaucaguauagcaaucggaauaauuagucuaauguugcaaauaggaaauauuauuucaauaugggcuagucacucaauccaaacuggaagucaaaaccacacuggaauaugcaaccaaagaaucauuacauaugaaaacagcaccugggugaaucacacauauguuaauauuaacaacacuaauguuguugcuggaaaggacaaaacuccagugacauuggccggcaacucaucucuuuguucuaucaguggaugggcuauacacacaaaagacaacagcauaagaauuggcuccaaaggagauguuuuugucauaagagaaccuuucauaucauguucucacuuggaaugcaaaaccuuuuuucugacccaaggcgcucuauuaaaugacaaacauucaaaugggaccguaaaggacagaaguccuuauagggccuuaaugagcuguccucuaggugaagcuccguccccauacaauucaaaguucgaaucaguugcauggucagcaagcgcaugccaugauggcauaggcugguuaacaaucggaauuucugguccagacaauggagcuguggcuguacuaaaauacaacggaauaauaacuggaaccauaaaaaguuggaaaaagcaaauauuaagaacacaagagucugaaugugucuguaugaacgggucauguuucaccauaaugaccgaugguccgaguaauggggccgccucguacaaaauuuucaagaucgaaaaggggaagguuacuaaaucaauggaguuaaaugcacccaauuuucauuaugaggaauguucuuguuacccagacacuggcacagugauguguguaugcagggacaacuggcaugguucaaaucgaccuugggugucuuuuaaucaaaacuuggauuaucaaauaggauacaucugcacuggaguguucggugacaauccgcgucccgaagauggagagggcagcugcaauccagugacuguugauggagcaaacggaguaaaaggguuuucauacaaauaugguaaugguguuuggauaggaaggaccaaaaguaacagaauuagaaagggguuugagaugauuugggauccuaauggauggacaaauaccgacagugauuucucagugaaacaggauauuguagcaauaacugauuggucaggguacagcggaaguuucguccaacauccugaguuaacaggauuggacuguauaagaccuugcuucuggguugaguuagucagagggcugccuagagaaaauacgacaaucuggacuaguggaagcagcauuucuuuuuguggcguuaauagugauauugcaaacuggucuuggccagacggugcugaguugccguucaccauugacaaguag

SEQ ID NO: 54371 - RNA, 1413 nt, Artificial Sequence
  derived and/or modified CDS sequence (wt) from neuraminidase__InfluenzaA__AFJ78598
augaacccaaaucaaaagauaauaaccauuggaucaaucaguauagcaaucggaauaauuagucuaauguugcaaauaggaaauauuauuucaauaugggcuagucacucaauccaaacuggaauucaaaacaacacuggaauaugcaaccaaagaaucaucacauaugaaaacagcaccugggugaaucacacauauguuaauauuaacaacacuaauguuguugcuggagaggacaaaacuucagugacauuggccggcaauucaucucuuuguucuaucaguggaugggcuauauacacaaaagacaacagcauaagaauuggcuccaaaggagauguuuuugucauaagagaaccuuucauaucauguucucacuuggaaugcagaaccuuuuuucugacccaaggcgcucuauuaaaugacaaacauucaaaugggaccguaaaggacagaaguccuuauagggccuuaaugagcuguccucuaggugaagcuccguccccauacaauucaaaguucgaaucaguugcauggucagcaagcgcaugccaugauggcaugggcugguuaacaaucggaauuucugguccagacaauggagcuguggcuguacuaaaauacaacggaauaauaacuggaaccauaaaaaguuggaaaaagcaaauauuaagaacacaagagucugaaugugucuguaugaacgggucauguuucaccauaaugaccgauggcccgaguaauaaggccgccucguacaaaauuuucaagaucgaaaaggggaagguuacuaaaucaauagaguugaaugcacccaauuuucauuaugaggaauguuccuguuacccagacacuggcauagugauguguguaugcagggacaacuggcaugguucaaaucgaccuugggugucuuuuaaucaaaacuuggauuaucaaauaggauacaucugcaguggaguguuuggugacaauccgcgucccgaagauggagagggcagcugcaauccagugacuguugauggagcaaacggaguaaaaggguuuucauacaaauaugauaaugguguuuggauaggaagaaccaaaaguaacagacuuagaaagggguuugagaugauuugggauccuaauggauggacaaauaccgacagugauuucucagugaaacaggauguuguagcaauaacugauuggucaggguacagcggaaguuucguccaacauccugaguuaacaggauuggacuguauaagaccuugcuucuggguugaguuagucagagggcugccuagagaaaauacaacaaucuggacuagugggagcagcauuucuuuuuguggcguuaauagugauacugcaaacuggucuuggccagacggugcugaguugccguucaccauugacaaguag

SEQ ID NO: 54372 - RNA, 1413 nt, Artificial Sequence
  derived and/or modified CDS sequence (wt) from neuraminidase__InfluenzaA__AFJ78609
augaacccaaaucaaaagauaauaaccauuggaucaaucaguauagcaaucggaauaauuagucuaauguugcaaauaggaaauauuauuucaauaugggcuagucacucaauccaaacuggaagucaaaacaacacuggaauaugcaaccaaagaaucaucacauaugaaaacagcaccugggugaaucacacauauguuaauauuaacaacacuaauguuguugcuggagaggacaaaacuucagugauauuggccggcaauucaucucuuuguuccaucaguggaugggcuauauacacaaaagacaacagcauaagaauuggcuccaaaggagauguuuuugucauaagagaaccuuucauaucauguucucacuuggaaugcagaaccuuuuuucugacccaaggcgcucuauuaaaugacaaacauucaaaugggaccguaaaggacagaaguccuuauagggccuuaaugagcuguccucuaggugaagcuccguccccauacaauucaaaguucgaaucaguugcauggucagcaagcgcaugccaugauggcaugggcugguuaacaaucggaauuucugguccagacaauggagcuguggcuguacuaaaauacaacggaauaauaacuggaaccauaaaaaguuggaaaaagcaaauauuaagaacacaagagucugaaugugucugcaugaacgggucauguuucaccauaaugaccgauggcccgaguaauaaggccgccucguacaaaauuuucaagaucgaaaaggggaagguuacuaaaucaauagaguugaaugcacccaauuuuuauuaugaggaaugcuccuguuacccagacacuggcauagugauguguguaugcagggacaacuggcaugguucaaaucgaccuugggugucuuuuaaucaaaacuuggauuaucaaauaggauacaucugcaguggaguguuuggugacaauccgcgucccgaagauggagagggcagcugcaauccagugacuguugauggagcaaacggagugaaaggguuuucauacaaauaugguaaugguguuuggauaggaaggaccaaaaguaacagacuuagaaagggguuugagaugauuugggauccuaauggauggacaaauaccgacagugauuucucagugaaacaggauguuguagcaauaacugauuggucaggguacagcggaaguuucguccaacauccugaguuaacaggauuggacuguauaagaccuugcuucuggguugaguuagucagagggcugccuagagaaaauacaacaaucuggacuagugggagcagcauuucuuuuuguggcguuaauagugauacugcaaacuggucuuggccagacggugcugaguugccguucaccaucgacaaguag

SEQ ID NO: 54373 - RNA, 1413 nt, Artificial Sequence
  derived and/or modified CDS sequence (wt) from neuraminidase__InfluenzaA__AFJ78620
augaacccaaaucaaaagauaauaaccauuggaucaaucaguauagcaaucggaauaauuagucuaauguugcaaauaggaaauauuauuucaauaugggcuagucacucaauccaaacuggaagucaaaacaacacuggaauaugcaaccaaagaaucaucacauaugaaaacagcaccugggugaaucacacauauguuaauauuaacaacacuaauguuguugcuggagaggacaaaacuucagugacauuggccggcaauucaucucuuuguucuaucaguggaugggcuauauacacaaaagacaacagcauaagaauuggcuccaaaggagauguuuuugucauaagagaaccuuucauaucauguucucacuuggaaugcagaaccuuuuuucugacucaaggcgcucuauuaaaugacaaacauucaaaugggaccguaaaggacagaaguccuuauagggccuuaaugagcuguccucuaggugaagcuccguccccauacaauucaaaguucgaaucaguugcauggucagcaagcgcaugccaugauggcaugggcugguuaacaaucggaauuucugguccagacaauggagcuguggcuguacuaaaauacaacggaauaauaacuggaaccauaaaaaguuggaaaaagcaaauauuaagaacacaagagucugaaugugucugcaugaacgggucauguuucaccauaaugaccgauggcccgaguaauaaggccgccucguacaaaauuuucaagaucgaaaaggggaagguuacuaaaucaauagaguugaaugcacccaauuuuuauuaugaggaaugcuccuguuacccagacacuggcauagugauguguguaugcagggacaacuggcaugguucaaaucgaccuugggugucuuuuaaucaaaacuuggauuaucaaauaggauacaucugcaguggaguguuuggugacaauccgcgucccgaagauggagagggcagcugcaauccagugacuguugauggagcaaacggaguaaaaggguuuucauacaaauaugguaaugguguuuggauaggaaggaccaaaaguaacagacuuagaaagggguuugagaugauuugggauccuaauggauggacaaauaccgacagugauuucucagugaaacaggauguuguagcaauaacugauuggucaggguacagcggaaguuucguccaacauccugaguuaacaggauuggacuguauaagaccuugcuucuggguugaguuagucagagggcugccuagagaaaauacaacaaucuggacuagugggagcagcauuucuuuuuguggcguuaauagugauacugcaaacuggucuuggccagacggugcugaguugccguucaccaucgacaaguag

SEQ ID NO: 54374 - RNA, 1413 nt, Artificial Sequence
  derived and/or modified CDS sequence (wt) from neuraminidase__InfluenzaA__AFJ78631
augaacccaaaucaaaaaauaauaaccauuggaucaaucaguauagcaaucggaauaauuagucuaauguugcaaauaggaaauauuauuucaauaugggcuagucacucaauccaaacuggaagucaaaaccacacuggaauaugcaaccaaagaaucauuacauaugaaaacagcaccugggugaaucacacauauguuaauauuaacaacacuaauguuguugcuggaaaggacaaaacuccaguuacauuggccggcaacucaucucuuuguucuaucaguggaugggcuauacacacaaaagacaacagcauaagaauuggcuccaaaggagauguuuuugucauaagagaaccuuucauaucauguucucacuuggaaugcaaaaccuuuuuucugacccaaggcgcucuauuaaaugacaaacauucaaaugggaccguaaaggacagaaguccuuauagggccuuaaugagcuguccucuaggugaagcuccguccccauacaauucaaaguucgaaucaguugcauggucagcaagcgcaugccaugauggcauaggcugguuaacaaucggaauuucugguccagacaauggagcuguggcuguacuaaaauacaacggaauaauaacuggaaccauaaaaaguuggaaaaagcaaauauuaagaacacaagagucugaaugugucuguaugaacgggucauguuucaccauaaugaccgaugguccgaguaauggggccgccucguacaaaauuuucaagaucgaaaaggggaagguuacuaaaucaauggaguuaaaugcacccaauuuucauuaugaggaauguucuuguuacccagacacuggcacagugauguguguaugcagggacaacuggcaugguucaaaucgaccuugggugucuuuuaaucaaaacuuggauuaucaaauaggauacaucugcaguggaguguucggugacaauccgcgucccgaagauggagagggcagcugcaauccagugacuguugauggagcaaacggaguaaaaggguuuucauacaaauaugguaaugguguuuggauaggaaggaccaaaaguaacagaauuagaaagggguuugaaaugauuugggauccuaauggauggacaaauaccgacagugauuucucagugaaacaggauauuguagcaauaacugauuggucaggguacagcggaaguuucguccaacauccugaguuaacaggauuggacuguauaagaccuugcuucuggguugaguuagucagagggcugccuagagaaaauacgacaaucuggacuaguggaagcagcauuucuuuuuguggcguuaauagugauauugcaaacuggucuuggccagacggugcugaguugccguucaccauugacaaguag

SEQ ID NO: 54375 - RNA, 1413 nt, Artificial Sequence
  derived and/or modified CDS sequence (wt) from neuraminidase__InfluenzaA__AFJ78642
augaacccaaaucaaaagauaauaaccauuggaucaaucaguauagcaaucggaauaauuagucuaauguugcaaauaggaaauauuauuucaauaugggcuagucacucaauccaaacuggaagucaaaacaacacuggaauaugcaaccaaagaaucaucacauaugaaaacagcaccugggugaaucacacauauguuaauauuaacaacacuaauguuguugcuggagaggacaaaacuucagugacauuggccggcaauucaucucuuuguucuaucaguggaugggcuauauacacaaaagacaacagcauaagaauuggcuccaaaggagauguuuuugucauaagagaaccuuucauaucauguucucacuuggaaugcagaaccuuuuuucugacccaaggcgcucuauuaaaugacaaacauucaaaugggaccguaaaggacagaaguccuuauagggccuuaaugagcuguccucuaggugaagcuccguccccauacaauucaaaguucgaaucaguugcauggucagcaagcgcaugccaugauggcaugggcugguuaacaaucggaauuucugguccagacaauggagcuguggcuguacuaaaauacaacggaauaauaacuggaaccauaaaaaguuggaaaaagcaaauauuaagaacacaagagucugaaugugucugcaugaacgggucauguuucaccauaaugaccgauggcccgaguaauaaggccgccucguacaaaauuuucaagaucgaaaaggggaagguuacuaaaucaauagaguugaaugcacccaauuuuuauuaugaggaaugcuccuguuacccagacacuggcauagugauguguguaugcagggacaacuggcaugguucaaaucgaccuugggugucuuuuaaucaaaacuuggauuaucaaauaggauacaucugcaguggaguguuuggugacaauccgcgucccgaagauggagagggcagcugcaauccagugacuguugauggagcaaacggaguaaaaggguuuucauacaaauaugguaaugguguuuggauaggaaggaccaaaaguaacagacuuagaaagggguuugagaugauuugggauccuaauggauggacaaauaccgacagugauuucucagugaaacaggauguuguagcaauaacugauuggucaggguacagcggaaguuucguccaacauccugaguuaacaggauuggacuguauaagaccuugcuucuggguugaguuagucagagggcugccuagagaaaauacaacaaucuggacuagugggagcagcauuucuuuuuguggcguuaauagugauacugcaaacuggucuuggccagacggugcugaguugccguucaccaucgacaaguag

SEQ ID NO: 54376 - RNA, 1413 nt, Artificial Sequence
  derived and/or modified CDS sequence (wt) from neuraminidase__InfluenzaA__AFJ78653
augaacccaaaucaaaagauaauaaccauuggaucaaucaguauagcaaucggaauaauuagucuaauguugcaaauaggaaauauuauuucaauaugggcuagucacucaauccaaacuggaagucaaaacaacacuggaauaugcaaccaaagaaucaucacauaugaaaacagcaccugggugaaucacacauauguuaauauuaacaacacuaauguuguugcuggagaggacaaaacuucagugacauuggccggcaauucaucucuuuguucuaucaguggaugggcuauauacacaaaagacaacagcauaagaauuggcuccaaaggagauguuuuugucauaagagaaccuuucauaucauguucucacuuggaaugcagaaccuuuuuucugacucaaggcgcucuauuaaaugacaaacauucaaaugggaccguaaaggacagaaguccuuauagggccuuaaugagcuguccucuaggugaagcuccguccccauacaauucaaaguucgaaucaguugcauggucagcaagcgcaugccaugauggcaugggcugguuaacaaucggaauuucugguccagacaauggagcuguggcuguacuaaaauacaacggaauaauaacuggaaccauaaaaaguuggaaaaagcaaauauuaagaacacaagagucugaaugugucugcaugaacgggucauguuucaccauaaugaccgauggcccgaguaauaaggccgccucguacaaaauuuucaagaucgaaaaggggaagguuacuaaaucaauagaguugaaugcacccaauuuuuauuaugaggaaugcuccuguuacccagacacuggcauagugaugugugugugcagggacaacuggcaugguucaaaucgaccuugggugucuuuuaaucaaaacuuggauuaucaaauaggauacaucugcaguggaguguuuggugacaauccgcgucccgaagauggagagggcagcugcaauccagugacuguugauggagcaaacggaguaaaaggguuuucauacaaauaugguaaugguguuuggauaggaaggaccaaaaguaacagacuuagaaagggguuugagaugauuugggauccuaauggauggacaaauaccgacagugauuucucagugaaacaggauguuguagcaauaacugauuggucaggguacagcggaaguuucguccaacauccugaguuaacaggauuggacuguauaagaccuugcuucuggguugaguuagucagagggcugccuagagaaaauacaacaaucuggacuagugggagcagcauuucuuuuuguggcguuaauagugauacugcaaacuggucuuggccagacggugcugaguugccguucaccaucgacaaguag

SEQ ID NO: 54377 - RNA, 1410 nt, Artificial Sequence; identical to SEQ ID NO: 49979
  derived and/or modified CDS sequence (wt) from neuraminidase__InfluenzaA__AFJ78664

SEQ ID NO: 54378 - RNA, 1410 nt, Artificial Sequence; identical to SEQ ID NO: 48750
  derived and/or modified CDS sequence (wt) from neuraminidase__InfluenzaA__AFJ78674

SEQ ID NO: 54379 - RNA, 1410 nt, Artificial Sequence; identical to SEQ ID NO: 48750
  derived and/or modified CDS sequence (wt) from neuraminidase__InfluenzaA__AFJ78684

SEQ ID NO: 54380 - RNA, 1410 nt, Artificial Sequence; identical to SEQ ID NO: 48750
  derived and/or modified CDS sequence (wt) from neuraminidase__InfluenzaA__AFJ78694

SEQ ID NO: 54381 - RNA, 1410 nt, Artificial Sequence; identical to SEQ ID NO: 50727
  derived and/or modified CDS sequence (wt) from neuraminidase__InfluenzaA__AFJ78704

SEQ ID NO: 54382 - RNA, 1410 nt, Artificial Sequence; identical to SEQ ID NO: 51000
  derived and/or modified CDS sequence (wt) from neuraminidase__InfluenzaA__AFJ78714

SEQ ID NO: 54383 - RNA, 1410 nt, Artificial Sequence
  derived and/or modified CDS sequence (wt) from neuraminidase__InfluenzaA__AFJ78724
augaauccaaaccaaaagauaauaaccauugguucggucuguaugacaauuggaauggccaacuuaauauuacaaauuggaaacauaaucucaauauggauuagccacucaauucaacuugggaaucaaaaucagauugaaacaugcaaucaaagcgucauuacuuaugaaaacaacacuuggguaaaucagacauauguuaacaucagcaacaccaacuuugcugcuggacagucagugguuuccgugaaauuagcgggcaauuccucucucugcccuguuaguggaugggcuauauacaguaaagacaacaguauaagaaucgguuccaagggggauguguuugucauaagggaaccauucauaucaugcucccccuuggaaugcagaaccuucuucuugacucaaggggccuugcuaaaugacaaacauuccaauggaaccauuaaagacaggagcccauaucgaacccuaaugagcuguccuauuggugaaguucccucuccauacaacucaagauuugagucagucgcuuggucagcaagugcuugucaugauggcaucaauuggcuaacaauuggaauuucuggcccagacaauggggcaguggcuguguuaaaguacaacggcauaauaacagacacuaucaagaguuggagaaacaauauauugagaacacaagagucugaaugugcauguguaaaugguucuugcuuuacuuuaaugaccgauggaccaagugauggacaggccucauacaagaucuucagaauagaaaagggaaagauagucaaaucagucgaaaugaaugccccuaauuaucacuaugaggaaugcuccuguuauccugauucuagugaaaucacaugugugugcagggauaacuggcauggcucgaaucgaccgugggugucuuucaaccagaaucuggaauaucagauaggauacauaugcagugggauuuucggagacaauccacgcccuaaugauaagacaggcaguugugguccaguaucgucuaauggagcaaauggaguaaaaggauuuucauucaaauacggcaaugguguuuggauagggagaacuaaaagcauuaguucaagaaacgguuuugagaugauuugggauccgaacggauggacugggacagacaauaacuucucaauaaagcaagauaucguaggaauaaaugaguggucaggauauagcgggaguuuuguucagcauccagaacuaacagggcuggauuguauaagaccuugcuucuggguugaacuaaucagagggcgacccaaagagaacacaaucuggacuagcgggagcagcauauccuuuugugguguaaacagugacacuguggguuggucuuggccagacggugcugaguugccauuuaccauugacaaguaa

SEQ ID NO: 54384 - RNA, 1410 nt, Artificial Sequence
  derived and/or modified CDS sequence (wt) from neuraminidase__InfluenzaA__AFJ78734
augaauccaaaccaaaagauaauaaccauugguucggucuguaugacaauuggaauggcuaacuuaauauuacaaauuggaaacauaaucucaauauggauuagccacucaauucaacuugggaaucaaaaucagauugaaacaugcaaucaaagcgucauuacuuaugaaaacaacacuuggguaaaucagacauauguuaacaucagcaacaccaacuuugcugcuggacagucagugguuuccgugaaauuagcgggcaauuccucucucugcccuguuaguggaugggcuauauacaguaaagacaacaguauaagaaucgguuccaagggggauguguuugucauaagggaaccauucauaucaugcucccccuuggaaugcagaaccuucuucuugacucaaggggccuugcuaaaugacaaacauuccaauggaaccauuaaagacaggagcccauaucgaacccuaaugagcuguccuauuggugaaguucccucuccauacaacucaagauuugagucagucgcuuggucagcaagugcuugucaugauggcaucaauuggcuaacaauuggaauuucuggcccagacaauggggcaguggcuguguuaaaguacaacggcauaauaacagacacuauuaagaguuggagaaacaauauauugagaacacaagagucugaaugugcauguguaaaugguucuugcuuuacuguaaugaccgauggaccaagugauggacaggccucauacaagaucuucagaauagaaaagggaaagauagucaaaucagucgaaaugaaugccccuaauuaucacuaugaggaaugcuccuguuauccugauucuagugaaaucacaugugugugcagggauaacuggcauggcucgaaucgaccgugggugucuuucaaccagaaucuggaauaucagauaggauacauaugcagugggauuuucggagacaauccacgcccuaaugauaagacaggcaguugugguccaguaucgucuaauggagcaaauggagugaaaggauuuucauucaaauacggcaaugguguuuggauagggagaacuaaaagcauuaguucaagaaacgguuuugagaugauuugggauccgaacggauggacugggacagacaauaacuucucaauaaagcaagauaucguaggaauaaaugaguggucaggauauagcgggaguuuuguucagcauccagaacuaacagggcuggauuguauaagaccuugcuucuggguugaacuaaucagagggcgacccaaagagaacacaaucuggacuagcgggagcagcauauccuuuugugguguaaacagugacacuguggguuggucuuggccagacggugcugaguugccauuuaccauugacaaguaa

SEQ ID NO: 54385 - RNA, 1410 nt, Artificial Sequence; identical to SEQ ID NO: 48750
  derived and/or modified CDS sequence (wt) from neuraminidase__InfluenzaA__AFJ78744

SEQ ID NO: 54386 - RNA, 1410 nt, Artificial Sequence; identical to SEQ ID NO: 48750
  derived and/or modified CDS sequence (wt) from neuraminidase__InfluenzaA__AFJ78754

SEQ ID NO: 54387 - RNA, 1410 nt, Artificial Sequence; identical to SEQ ID NO: 48750
  derived and/or modified CDS sequence (wt) from neuraminidase__InfluenzaA__AFJ78764

SEQ ID NO: 54388 - RNA, 1410 nt, Artificial Sequence
  derived and/or modified CDS sequence (wt) from neuraminidase__InfluenzaA__AFJ78774
augaauccaaaccaaaagauaauaaccauugguucggucuguaugacaauuggaauggcuaacuuaauauuacaaauuggaaacauaaucucaauauggauuagccacucaauucaacuugggaaucaaaaucagauugaaacaugcaaucaaagcgucauuacuuaugaaaacaacacuuggguaaaucagacauauguuaacaucagcaacaccaacuuugcugcuggacagucagugguuuccgugaaauuagcgggcaauuccucucucugcccuguuaguggaugggcuauauacaguaaagacaacaguauaagaaucgguuccaagggggauguguuugucauaagggaaccauucauaucaugcucccccuuggaaugcagaaccuucuucuugacucaaggggccuugcuaaaugacaaacauuccaauggaaccauuaaagacaggagcccauaucgaacccuaaugagcuguccuauuggugaaguucccucuccauacaacucaagauuugagucagucgcuuggucagcaagugcuugucaugauggcaucaauuggcuaacaauuggaauuucuggcccagacaauggggcaguggcuguguuaaaguacaacggcauaauaacagacacuaucaagaguuggagaaacaauauauugagaacacaagagucugaaugugcauguguaaaugguucuugcuuuacuguaaugaccgauggaccaagugauggacaggccucauacaagaucuucagaauagaaaagggaaagauagucaaaucagucgaaaugaaugccccuaauuaucacuaugaggaaugcuccuguuauccugauucuagugaaaucacaugugugugcagggauaacuggcauggcucgaaucgaccgugggugucuuucaaccagaaucuggaauaucagauaggauacauaugcagugggauuuucggagacaauccacgcccuaaugauaagaccggcaguugugguccaguaucgucuaauggagcaaauggaguaaaaggauuuucauucaaauacggcaaugguguuuggauagggagaacuaaaagcauuaguucaagaaacgguuuugagaugauuugggauccgaacggauggacugggacagacaauaacuucucaauaaagcaagauaucguaggaauaaaugaguggucaggauauagcgggaguuuuguucagcauccagaacuaacagggcuggauuguauaagaccuugcuucuggguugaacuaaucagagggcgacccaaagagaacacaaucuggacuagcgggagcagcauauccuuuugugguguaaacagugacacuguggguuggucuuggccagacggugcugaguugccauuuaccauugacaaguaa

SEQ ID NO: 54389 - RNA, 1410 nt, Artificial Sequence
  derived and/or modified CDS sequence (wt) from neuraminidase__InfluenzaA__AFJ78784
augaauccaaaccaaaagauaauaaccauugguucggucuguaugacaauuggaauggcuaacuuaauauuacaaauuggaaacauaaucucaauauggauuagccacucaauucaacuugggaaucaaaaucagauugaaacaugcaaucaaagcgucauuacuuaugaaaacaacacuuggguaaaucagacauauguuaacaucagcaacaccaacuuugcugcuggacagucagugguuuccgugaaauuagcgggcaauuccucucucugcccuguuaguggaugggcuauauacaguaaagacaacaguauaagaaucgguuccaagggggauguguuugucauaagggaaccauucauaucaugcucccccuuggaaugcagaaccuucuucuugacucaaggggccuugcuaaaugacaaacauuccaauggaaccauuaaagacaggagcccauaucgaacccuaaugagcuguccuauuggugaaguucccucuccauacaacucaagauuugagucagucgcuuggucagcaagugcuugucaugauggcaucaauuggcuaacaauuggaauuucuggcccagacaauggggcaguggcuguguuaaaguacaacggcauaauaacagacacuaucaagaguuggagaaacaauauauugagaacacaagagucugaaugugcauguguaaaugguucuugcuuuacuguaaugaccgauggaccaagugauggacaggccucauacaagaucuucagaauagaaaagggaaagauagucaaaucagucgaaaugaaugccccuaauuaucacuaugaggaaugcuccuguuauccugauucuagugaaaucacaugugugugcagggauaacuggcauggcucgaaucgaccgugggugucuuucaaccagaaucuggaauaucagauaggauacauaugcagugggauuuucggagacaauccacgcccuaaugauaagacaggcaguugugguccaguaucgucuaauggagcuaauggaguaaaaggauuuucauucaaauacggcaaugguguuuggauagggagaacuaaaagcauuaguucaagaaacgguuuugagaugauuugggauccgaacggauggacugggacagacaauaacuucucaauaaagcaagauaucguaggaauaaaugaguggucaggauauagcgggaguuuuguucagcauccagaacuaacagggcuggauuguauaagaccuugcuucuggguugaacuaaucagagggcgacccaaagagaacacaaucuggacuagcgggagcagcauauccuuuugugguguaaacagugacacuguggguuggucuuggccagacggugcugaguugccauuuaccauugacaaguaa

SEQ ID NO: 54390 - RNA, 1410 nt, Artificial Sequence
  derived and/or modified CDS sequence (wt) from neuraminidase__InfluenzaA__AFJ78794
augaauccaaaccaaaagauaauaaccauugguucggucuguaugacaauuggaauggcuaacuuaauauuacaaauuggaaacauaaucucaauauggauuagccacucaauucaacuugggaaucaaaaucagauugaaacaugcaaucaaagcgucauuacuuaugaaaacaacacuuggguaaaucagacauauguuaacaucagcaacaccaacuuugcugcuggacagucagugguuuccgugaaauuagcgggcaauuccucucucugcccuguuaguggaugggcuauauacaguaaagacaacaguauaagaaucgguuccaagggggauguguuugucauaagggaaccauucauaucaugcucccccuuggaaugcagaaccuucuucuugacucaaggggccuugcuaaaugacaaacauuccaauggaaccauuaaagacaggagcccauaucgaacccuaaugagcuguccuauuggugaaguucccucuccauacaacucaagauuugagucagucgcuuggucagcaagugcuugucaugauggcaucaauuggcuaacaauuggaauuucuggcccagacaauggggcaguggcuguguuaaaguacaacggcauaauaacagacacuaucaagaguuggagaaacaauauauugagaacacaagagucugaaugugcauguguaaaugguucuugcuuuacuguaaugaccgauggaccaagugauggacaggccucauacaagaucuucagaauagaaaagggaaagauagucaaaucagucgaaaugaaugccccuaauuaucacuaugaggaaugcuccuguuauccugauucuggugaaaucacaugugugugcagggauaacuggcauggcucgaaucgaccgugggugucuuucaaccagaaucuggaauaucagauaggauacauaugcagugggauuuucggagacaauccacgcccuaaugauaagacaggcaguugugguccaguaucgucuaauggagcaaauggaguaaaaggauuuucauucaaauacggcaaugguguuuggauagggagaacuaaaagcauuaguucaagaaacgguuuugagaugauuugggauccgaacggauggacugggacagacaauaacuucucaauaaagcaagauaucguaggaauaaaugaguggucaggauauagcgggaguuuuguucagcauccagaacuaacagggcuggauuguauaagaccuugcuucuggguugaacuaaucagagggcgacccaaagagaacacaaucuggacuagcgggagcagcauauccuuuugugguguaaacagugacacuguggguuggucuuggccagacggugcugaguugccauuuaccauugacaaguaa

SEQ ID NO: 54391 - RNA, 1410 nt, Artificial Sequence; identical to SEQ ID NO: 48750
  derived and/or modified CDS sequence (wt) from neuraminidase__InfluenzaA__AFJ78804

SEQ ID NO: 54392 - RNA, 1410 nt, Artificial Sequence; identical to SEQ ID NO: 48750
  derived and/or modified CDS sequence (wt) from neuraminidase__InfluenzaA__AFJ78814

SEQ ID NO: 54393 - RNA, 1410 nt, Artificial Sequence; identical to SEQ ID NO: 54266
  derived and/or modified CDS sequence (wt) from neuraminidase__InfluenzaA__AFJ78824

SEQ ID NO: 54394 - RNA, 1410 nt, Artificial Sequence; identical to SEQ ID NO: 49979
  derived and/or modified CDS sequence (wt) from neuraminidase__InfluenzaA__AFJ78834

SEQ ID NO: 54395 - RNA, 1410 nt, Artificial Sequence; identical to SEQ ID NO: 48814
  derived and/or modified CDS sequence (wt) from neuraminidase__InfluenzaA__AFJ78844

SEQ ID NO: 54396 - RNA, 1410 nt, Artificial Sequence
  derived and/or modified CDS sequence (wt) from neuraminidase__InfluenzaA__AFJ78854
augaauccaaaccaaaagauaauaaccauugguucggucuguaugacaauuggaauggcuaacuuaauauuacaaauuggaaacauaaucucaauauggauuagccacucaauucaacuugggaaucaaaaucagaucgaaacaugcaaucaaagcgucauuacuuaugaaaacaacacuuggguaaaucagacauauguuaacaucagcaacaccaacuuugcugcuggacagucagugguuuccgugaaauuagcgggcaauuccucucucugcccuguuaguggaugggcuauauacaguaaagacaacaguauaagaaucgguuccaagggggauguguuugucauaagggaaccauucauaucaugcucccccuuggaaugcagaaccuucuucuugacucaaggggccuugcuaaaugacaaacauuccaauggaaccauuaaagacaggagcccauaucgaacccuaaugagcuguccuauuggugaaguucccucuccauacaacucaagauuugagucagucgcuuggucagcaagugcuugucaugauggcaucaauuggcuaacaauuggaauuucuggcccagacaauggggcaguggcuguguuaaaguacaacggcauaauaacagacacuaucaagaguuggagaaacaauauauugagaacacaagagucugaaugugcauguguaaaugguucuugcuuuacuguaaugaccgauggaccaagugauggacaggccucauacaagaucuucagaauagaaaagggaaagauagucaaaucagucgaaaugaaugccccuaauuaucacuaugaggaaugcuccuguuauccugauucuagugaaaucacaugugugugcagggauaacuggcauggcucgaaucgaccgugggugucuuucaaccagaaucuggaauaucagauaggauacauaugcagugggauuuucggagacaauccacgcccuaaugauaagacaggcaguugugguccaguaucgucuaauggagcaaauggaguaaaaggauuuucauucaaauacggcaaugguguuuggauagggagaacuaaaagcauuaguucaagaaacgguuuugagaugauuugggauccgaacggauggacugggacagacaauaacuucuuaauaaagcaagauaucguaggaauaaaugaguggucaggauauagcgggaguuuuguucagcauccagaacuaacagggcuggauuguauaagaccuugcuucuggguugaacuaaucagagggcgacccaaagagaacacaaucuggacuagcgggagcagcauauccuuuugugguguaaacagugacacuguggguuggucuuggccagacggugcugaguugccauuuaccauugacaaguaa

SEQ ID NO: 54397 - RNA, 1410 nt, Artificial Sequence
  derived and/or modified CDS sequence (wt) from neuraminidase__InfluenzaA__AFJ78864
augaauccaaaccaaaagauaauaaccauugguucggucuguaugacaauuggaauggcuaacuuaauauuacaaauuggaaacauaaucucaauauggauuagccacucaauucaacuugggaaucaaaaucagauugaaacaugcaaucaaagcgucauuacuuaugaaaacaacacuuggguaaaucagacauauguuaacaucagcaacaccaacuuugcugcuggacagucagugguuucagugaaauuagcgggcaauuccucucucugcccuguuaguggaugggcuauauacaguaaagacaacaguauaagaaucgguuccaagggggauguguuugucauaagggaaccauucauaucaugcucccccuuggaaugcagaaccuucuucuugacucaaggggccuugcuaaaugacaaacauuccaauggaaccauuaaagacaggagcccauaucgaacccuaaugagcuguccuauuggugaaguucccucuccauacaacucaagauuugagucagucgcuuggucagcaagugcuugucaugauggcaucaauuggcuaacaauuggaauuucuggcccagacaauggggcaguggcuguguuaaaguacaacggcauaauaacagacacuaucaagaguuggagaaacaauauauugagaacacaagagucugaaugugcauguguaaaugguucuugcuuuacuguaaugaccgauggaccaagugauggacaggccucauacaagaucuucagaauagaaaagggaaagauagucaaaucagucgaaaugaaugccccuaauuaucacuaugaggaaugcuccuguuauccugauucuagugaaaucacaugugugugcagggauaacuggcauggcucgaaucgaccgugggugucuuucaaccagaaucuggaauaucagauaggauacauaugcagugggauuuucggagacaauccacgcccuaaugauaagacaggcaguugugguccaguaucgucuaauggagcaaauggaguaaaaggauuuucauucaaauacggcaaugguguuuggauagggagaacuaaaagcauuaguucaagaaacgguuuugagaugauuugggauccgaacggauggacugggacagacaauaacuucucaauaaagcaagauauaguaggaauaaaugaguggucaggauauagcgggaguuuuguucagcauccagaacuaacagggcuggauuguauaagaccuugcuucuggguugaacuaaucagagggcgacccaaagagaacacaaucuggacuagcgggagcagcauauccuuuugugguguaaacagugacacuguggguuggucuuggccagacggugcugaguugccauuuaccauugacaaguaa

SEQ ID NO: 54398 - RNA, 1410 nt, Artificial Sequence; identical to SEQ ID NO: 48750
  derived and/or modified CDS sequence (wt) from neuraminidase__InfluenzaA__AFJ78874

SEQ ID NO: 54399 - RNA, 1410 nt, Artificial Sequence; identical to SEQ ID NO: 48750
  derived and/or modified CDS sequence (wt) from neuraminidase__InfluenzaA__AFJ78884

SEQ ID NO: 54400 - RNA, 1410 nt, Artificial Sequence; identical to SEQ ID NO: 54389
  derived and/or modified CDS sequence (wt) from neuraminidase__InfluenzaA__AFJ78894

SEQ ID NO: 54401 - RNA, 1410 nt, Artificial Sequence; identical to SEQ ID NO: 48750
  derived and/or modified CDS sequence (wt) from neuraminidase__InfluenzaA__AFJ78904

SEQ ID NO: 54402 - RNA, 1410 nt, Artificial Sequence; identical to SEQ ID NO: 48750
  derived and/or modified CDS sequence (wt) from neuraminidase__InfluenzaA__AFJ78914

SEQ ID NO: 54403 - RNA, 1410 nt, Artificial Sequence
  derived and/or modified CDS sequence (wt) from neuraminidase__InfluenzaA__AFJ78924
augaauccaaaccaaaagauaauaaccauugguucggucuguaugacaauuggaauggcuaacuuaauauuacaaauuggaaacauaaucucaauauggauuagccacucaauucaacuugggaaucaaaaucagauugaaacaugcaaucaaagcgucauuacuuaugaaaacaacacuuggguaaaucagacauauguugacaucagcaacaccaacuuugcugcuggacagucagugguuuccgugaaauuagcgggcaauuccucucucugcccuguuaguggaugggcuauauacaguaaagacaacaguauaagaaucgguuccaagggggauguguuugucauaagggaaccauucauaucaugcucccccuuggaaugcagaaccuucuucuugacucaaggggccuugcuaaaugacaaacauuccaauggaaccauuaaagacaggagcccauaucgaacccuaaugagcuguccuauuggugaaauucccucuccauacaacucaagauuugagucagucgcuuggucagcaagugcuugucaugauggcaucaauuggcuaacaauuggaauuucuggcccagacaauggggcaguggcuguguuaaaguacaacggcauaauaacagacacuaucaagaguuggagaaacaauauauugagaacacaagagucugaaugugcauguguaaaugguucuugcuuuacuguaaugaccgauggaccaagugauggacaggccucauacaagaucuucagaauagaaaagggaaagauagucaaaucagucgaaaugaaugccccuaauuaucacuaugaggaaugcuccuguuauccugauucuagugaaaucacaugugugugcagggauaacuggcauggcucgaaucgaccgugggugucuuucaaccagaaucuggaauaucagauaggauacauaugcagugggauuuucggagacaauccacgcccuaaugauaagacaggcaguugugguccaguaucgucuaauggagcaaauggaguaaaaggauuuucauucaaauacggcaaugguguuuggauagggagaacuaaaagcauuaguucaagaaacgguuuugagaugauuugggauccgaacggauggacugggacagacaauaacuucucaauaaagcaagauaucguaggaauaaaugaguggucaggauauagcgggaguuuuguucagcauccagaacuaacagggcuggauuguauaagaccuugcuucuggguugaacuaaucagagggcgacccaaagagaacacaaucuggacuagcgggagcagcauauccuuuugugguguaaacagugacacuguggguuggucuuggccagacggugcugaguugccauuuaccauugacaaguaa

SEQ ID NO: 54404 - RNA, 1410 nt, Artificial Sequence
  derived and/or modified CDS sequence (wt) from neuraminidase__InfluenzaA__AFJ97569
augaauccaaaccaaaagauaauaaccauugguucggucuguaugacaauuggaauggcuaacuuaauauuacaaauuggaaacauaaucucaauauggauuagccacucaauucaacuugggaaucaaaaucagauugaaacaugcaaucaaagcgucauuacuuaugaaaacaacacuuggguaaaucagacauauguuaacaucagcaacaccaacuuugcugcuggacagucagugguuuccgugaaauuagcgggcaauuccucucucugcccuguuaguggaugggcuauauacaguaaagacaacaguauaagaaucgguuccaagggggauguguuugucauaagggagccauucauaucaugcucccccuuggaaugcagaaccuucuucuugacucaaggggccuugcuaaaugacaaacauuccaaugaaaccauuaaagacaggagcccauaucgaacccuaaugagcuguccuauuggugaaguucccucuccauacaacucaagauuugagucagucgcuuggucagcaagugcuugucaugauggcaucaauuggcuaacaauuggaauuucuggcccagacaauggggcaguggcuguguuaaaguacaacggcauaauaacagacacuaucaagaguuggagaaacaauauauugagaacacaagagucugaaugugcauguguaaaugguucuugcuuuacuguaaugaccgauggaccaagugauggacaggccucauacaagaucuucagaauagaaaagggaaagauagucaaaucagucgaaaugaaugccccuaauuaucacuaugaggaaugcuccuguuauccugauucuagugaaaucacaugugugugcagggauaacuggcauggcucgaaucgaccgugggugucuuucaaccagaaucuggaauaucagauaggguacauaugcagugggauuuucggagacaauccacgcccuaaugacaagacaggcaguugugguccaguaucgucuaauggagcaaauggaguaaaaggauuuucauucaaauacggcaaugguguuuggauagggagaacuaaaagcauuaguucaagaaacgguuuugagaugauuugggauccgaacggauggacugggacagacaauaacuucucaauaaagcaagauaucguaggaauaaaugaguggucaggauauagcgggaguuuuguucagcauccagaacuaacagggcuggauuguauaagaccuugcuucuggguugaacuaaucagagggcgacccaaagagaacacaaucuggacuagcgggagcagcauauccuuuugugguguaaacagugacacugugaguuggucuuggccagacggugcugaguugccauuuaccauugacaaguaa

SEQ ID NO: 54405 - RNA, 1410 nt, Artificial Sequence; identical to SEQ ID NO: 48749
  derived and/or modified CDS sequence (wt) from neuraminidase__InfluenzaA__AFK14107

SEQ ID NO: 54406 - RNA, 1410 nt, Artificial Sequence; identical to SEQ ID NO: 48750
  derived and/or modified CDS sequence (wt) from neuraminidase__InfluenzaA__AFK14117

SEQ ID NO: 54407 - RNA, 1410 nt, Artificial Sequence
  derived and/or modified CDS sequence (wt) from neuraminidase__InfluenzaA__AFK14141
augaauccaaaccaaaagauaauaaccauugguucggucuguauaacaauuggaauggcuaacuuaauauuacaaauuggaaacauaaucucaauauggauuagccacucaauucaacuugggaaucaaaaucagauugaaacaugcaaucaaagcgucauuacuuaugaaaacaacacuuggguaaaucagacauauguuaacaucagcaacaccaacuuugcugcuggacagucagugguuuccgugaaauuagcgggcaauuccucucucugcccuguuaguggaugggcuauauacaguaaagacaacaguauaagaaucgguuccaagggggauguguuugucauaagggaaccauucauaucaugcucccccuuggaaugcagaaccuucuucuugacucaaggggccuugcuaaaugacaaacauuccaauggaaccauuaaagacaggagcccauaucgaacccuaaugagcuguccuauuggugaaguucccucuccauacaacucaagauuugagucagucgcuuggucagcaagugcuugucaugauggcaucaauuggcuaacaauuggaauuucuggcccagacaauggggcaguggcuguguuaaaguacaacggcauaauaacagacacuaucaagaguuggagaaacaauauauugagaacacaagagucugaaugugcauguguaaaugguucuugcuuuacuguaaugaccgauggaccaagugauggacaggccucauacaagaucuucagaauagaaaagggaaagauagucaaaucagucgaaaugaaugccccuaauuaucacuaugaagaaugcuccuguuauccugauucuagugaaaucacaugugugugcagggauaacuggcauggcucgaaucgaccguggguaucuuucaaccagaaucuggaauaucagauaggauacauaugcagugggauuuucggagacaauccacgcccuaaugauaagacaggcaguugugguccaguaucgucuaauggagcaaauggaguaaaaggauuuucauucaaauacggcaaugguguuuggauagggagaacuaaaagcauuaguucaagaaacgguuuugagaugauuugggauccgaacggauggacugggacagacaauaacuucucaauaaagcaagauaucguaggaauaaaugaguggucaggauauagcgggaguuuuguucagcauccagaacuaacagggcuggauuguauaagaccuugcuucuggguugaacuaaucagagggcgacccaaagagaacacaaucuggacuagcgggagcagcauauccuuuugugguguaaacagugacacuguggguuggucuuggccggacggugcugaguugccauuuaccauugacaaguaa

SEQ ID NO: 54408 - RNA, 1410 nt, Artificial Sequence
  derived and/or modified CDS sequence (wt) from neuraminidase__InfluenzaA__AFK14150
augaauccaaaccaaaagauaauaaccauugguucggucuguaugacaauuggaauggcuaacuuaauauuacaaauuggaaacauaaucucaauauggauuagccacucaauucgacuugggaaucaaaaucagauugaaacaugcaaucaaagcgucauuacuuaugaaaacaacacuuggguaaaucagacauauguuaacaucagcaacaccaacuuugcugcuggacagucagugguuuccgugaaauuagcgggcaauuccucucucugcccuguuaguggaugggcuauauacaguaaagacaacaguauaagaaucgguuccaagggggauguguuugucauaagggaaccauucauaucaugcucccccuuggaaugcagaaccuucuucuugacucaaggggccuugcuaaaugacaaacauuccaauggaaccauuaaagacaggagcccauaucgaacccuaaugagcuguccuauuggugaaguucccucuccauacaacucaagauuugagucagucgcuuggucagcaagugcuugucaugauggcaucaauuggcuaacaauuggaauuucuggcccagacaauggggcaguggcuguguuaaaguacaacggcauaauaacagacacuaucaagaguuggagaaacaauauauugagaacacaagagucugaaugugcauguguaaaugguucuuguuuuacuguaaugaccgauggaccaagugaugaacaggccucauacaagaucuucagaauagaaaagggaaagauagucaaaucagucgaaaugaaugccccuaauuaucacuaugaggaaugcuccuguuauccugauucuagugaaaucacaugugugugcagggauaacuggcauggcucgaaucgaccgugggugucuuucaaccagaaucuggaauaucagauaggauacauaugcagugggauuuucggagacaauccacgcccuaaugauaagacaggcaguugugguccaguaucgucuaauggagcaaauggaguaaaaggauuuucauucaaauacggcaaugguguuuggauagggagaacuaaaagcauuaguucaagaaacgguuuugagaugauuugggauccgaacggauggacugggacagacaauaacuucucaauaaagcaagauaucguaggaauaaaugaguggucaggauauagcgggaguuuuguccagcauccagaacuaacagggcuggauuguauaagaccuugcuucuggguugaacuaaucagagggcgacccaaagagaacacaaucuggacuagcgggagcagcauauccuuuugugguguaaacagugacacuguggguuggucuuggccagacggugcugaguugccauuuaccauugacaaguaa

SEQ ID NO: 54409 - RNA, 1410 nt, Artificial Sequence
  derived and/or modified CDS sequence (wt) from neuraminidase__InfluenzaA__AFK14159
augaauccaaaccaaaagauaauaaccauugguucggucuguaugacaauuggaauggccaacuuaauauuacaaauuggaaacauaaucucaauauggauuagccacucaauucaacuugggaaucaaaaucagauugaaacaugcaaucaaagcgucauuacuuaugaaaacaacacuuggguaaaucagacauauguuaacaucagcaacaccaacuuugcugcuggacagucagugguguccgugaaauuagcgggcaauucuucucucugcccuguuaguggaugggcuauauacaguaaagacaacaguguaagaaucgguuccaagggggauguguuugucauaagggaaccauucauaucaugcucccccuuggaaugcagaaccuucuucuugacucaaggggccuugcuaaaugacaaacauuccaauggaaccauuaaagacaggagcccauaucgaacccuaaugagcuguccuauuggugaaguucccucuccauacaacucaagauuugagucagucgcuuggucagcaagugcuugucaugauggcaucaauuggcuaacaauuggaauuucuggcccagacaauggggcaguggcuguguuaaaguacaacggcauaauaacagacacuaucaagaguuggagaaacaauauauugagaacacaagagucugaaugugcauguguaaaugguucuugcuuuacuguaaugaccgauggaccaagugauggacaggccucauacaagaucuucagaauagaaaagggaaagauagucaaaucagucgaaaugaaugccccuaauuaucacuaugaggaaugcuccuguuauccugauucuagugaaaucacaugugugugcagggauaacuggcauggcucgaaucgaccguggguuucuuucaaccagaaucuggaauaucagauaggauacauaugcagugggauuuucggagacaauccacgcccuaaugauaagacaggcaguugugguccaguaucgucuaauggagcaaauggaguaaaaggauuuucauucaaauacggcaaugguguuuggauagggagaacuaaaagcauuaguucaagaaacgguuuugagaugauuugggauccgaacggauggacugggacagacaauaacuucucaauaaagcaagauaucguaggaauaaaugaguggucaggauauagcgggaguuuuguucagcauccagaacuaacagggcuggauuguauaagaccuugcuucuggguugaacuaaucagagggcgacccaaagagaacacaaucuggacuagcgggagcagcauauccuuuugugguguaaacagugacacuguggguuggucuuggccagacggugcugaguugccauuuaccauugacaaguaa

SEQ ID NO: 54410 - RNA, 1410 nt, Artificial Sequence
  derived and/or modified CDS sequence (wt) from neuraminidase__InfluenzaA__AFK14168
augaauccaaaccaaaagauaauaaccauugguucggucuguaugacaauuggaauggcuaacuuaauauuacaaauuggaaacauaaucucaauauggauuagccacucaauucaacuugggaaucaaaaucagauugaaacaugcaaucaaagcgucauuacuuaugaaaacaacacuuggguaaaucagacauauguuaacaucagcaacaccaacuuugcugcuggacagucagugguuuccgucaaauuagcgggcaauuccucucucugcccuguuaguggaugggcuauauacaguaaagacaacaguauaagaaucgguuccaagggggauguguuugucauaagggaaccauucauaucaugcucccccuuggaaugcagaaccuucuucuugacucaaggggccuugcuaaaugacaaacauuccaauggaaccauuaaagacaggagcccauaucgaacccuaaugagcuguccuauuggugaaguucccucuccauacaacucaagauuugagucagucgcuuggucagcaagugcuugucaugauggcaucaauuggcuaacaauuggaauuucuggcccagacaauggggcaguggcuguguuaaaguacaacggcauaauaacagacacuaucaagaguuggagaaacaauauauugagaacacaagagucugaaugugcauguguaaaugguucuugcuuuacuguaaugaccgauggaccaagugauggacaggccucauacaagaucuucagaauagaaaagggaaagauagucaaaucagucgaaaugaaugccccuaauuaucacuaugaggaaugcuccuguuauccugauucuagugaaaucacaugugugugcagggauaacuggcauggcucgaaucgaccguggguaucuuucaaccagaaucuggaauaucagauaggauacauaugcagugggauuuucggagacaauccacgcccuaaugauaagacaggcaguugugguccaguaucgucuaauggagcaaauggaguaaaaggauuuucauucaaauacggcaaugguguuuggauagggagaacuaaaagcauuaguucaagaaacgguuuugagaugauuugggauccgaacggauggacugggacagacaauaacuucucaauaaagcaagauauaguaggaauaaaugaguggucaggauauagcgggaguuuuguucagcauccagaacuaacagggcuggauuguauaagaccuugcuucuggguugaacuaaucagagggcgacccaaagagaacacaaucuggacuagcgggagcagcauauccuuuugugguguaaacagugacacuguggguuggucuuggccggacggugcugaguugccauuuaccauugacaaguaa

SEQ ID NO: 54411 - RNA, 1410 nt, Artificial Sequence; identical to SEQ ID NO: 48750
  derived and/or modified CDS sequence (wt) from neuraminidase__InfluenzaA__AFK14177

SEQ ID NO: 54412 - RNA, 1410 nt, Artificial Sequence
  derived and/or modified CDS sequence (wt) from neuraminidase__InfluenzaA__AFK14186
augaauccaaaccaaaagauaauaaccauugguucggucuguaugacaauuggaauggcuaacuuaauauuacaaauuggaaacauaaucucaauauggauuagccacucaauucaacuugggaaucaaaaucagauugagacaugcaaucaaagcgucauuacuuaugaaaacaacacuuggguaaaucagacauauguuaacaucagcaacaccaacuuugcugcuggacagucagugguuuccgugaaauuagcgggcaauuccucucucugcccuguuaguggaugggcuauauacaguaaagacaacaguauaagaaucgguuccaagggggauguguuugucauaagggaaccauucauaucaugcucccccuuggaaugcagaaccuucuucuugacucaaggggccuugcuaaaugacaaacauuccaauggaaccauuaaagacaggagcccauaucgaacccuaaugagcuguccuauuggugaaguucccucuccauacaacucaagauuugagucagucgcuuggucagcaagugcuugucaugauggcaucaauuggcuaacaauuggaauuucuggcccagacaauggggcaguggcuguguuaaaguacaacggcauaauaacagacacuaucaagaguuggagaaacaauauauugagaacacaagagucugaaugugcauguguaaaugguucuugcuuuacuguaaugaccgauggaccaagugauggacaggccucauacaagaucuucagaauagaaaagggaaagauagucaaaucagucgaaaugaaugccccuaauuaucacuuugaggaaugcuccuguuauccugauucuagugaaaucacaugugugugcagggauaacuggcauggcucgaaucgaccgugggugucuuucaaccagaaucuggaauaucagauaggauacauaugcagugggauuuucggagacaauccacgcccuaaugauaagacaggcaguugugguccaguaucgucuaauggagcaaauggaguaaaaggauuuucauucaaauacggcaaugguguuuggauagggagaacuaaaagcauuaguucaagaaacgguuuugagaugauuugggauccgaacggauggacugggacagacaauaacuucucaauaaagcaagauaucguaggaauaaaugaguggucaggauauagcgggaguuuuguucagcauccagaacuaacagggcuggauuguauaagaccuugcuucuggguugaacuaaucagagggcgacccaaagagaacacaaucuggacuagcgggagcagcauauccuuuugugguguaaacagugacacuguggguuggucuuggccagacggugcugaguugccauuuaccauugacaaguaa

SEQ ID NO: 54413 - RNA, 1410 nt, Artificial Sequence
  derived and/or modified CDS sequence (wt) from neuraminidase__InfluenzaA__AFK14195
augaauccaaaccaaaagauaauaaccauugguucggucuguaugacaauuggaauggcuaacuuaauauuacaaauuggaaacauaaucucaauauggauuagccacucaauucaacuugggaaucaaaaucagacugaaacaugcaaucaaagcgucauuacuuaugaaaacaacacuuggguaaaucagacauauguuaacaucagcaacaccaacuuugcugcuggacagucagugguuuccgugaaauuagcgggcaauuccucucucugcccuguuaguggaugggcuauauacaguaaagacaacaguauaagaaucgguuccaagggggauguguuugucauaagggaaccauucauaucaugcucccccuuggaaugcagaaccuucuucuugacucaaggggccuugcuaaaugacaaacauuccaauggaaccauuaaagacaggagcccauaucgaacccuaaugagcuguccuauuggugaaguucccucuccauacaacucaagauuugagucagucgcuuggucagcaagugcuugucaugauggcaucaauuggcuaacaauuggaauuucuggcccagacaauggggcaguggcuguguuaaaguacaacggcauaauaacagacacuaucaagaguuggagaaacaauauauugagaacacaagagucugaaugugcauguguaaaugguucuugcuuuacuguaaugaccgauggaccaagugauggacaggccucauacaagaucuucagaauagaaaagggaaagauagucaaaucagucgaaaugaaugccccuaauuaucacuaugaggaaugcuccuguuauccugauucuagugaaaucacaugugugugcagggauaacuggcauggcucgaaucgaccgugggugucuuucaaccagaaucuggaauaucagauaggauacauaugcagugggauuuucggagacaauccacgcccuaaugauaagacaggcaguugugguccaguaucgucuaauggagcaaauggaguaaaaggauuuucauucaaauacggcaaugguguuuggauagggagaacuaaaagcauuaguucaagaaacgguuuugagaugauuugggauccgaacggauggacugggacagacaauaacuucucaauaaagcaagauaucguaggaauaaaugaguggucaggauauagcgggaguuuuguucagcauccagaacuaacagggcuggauuguauaagaccuugcuucuggguugaacuaaucagagggcgacccaaagagaacacaaucuggacuagcgggagcagcauauccuuuugugguguaaacagugacacuguggguuggucuuggccagacggugcugaguugccauuuaccauugacaaguaa

SEQ ID NO: 54414 - RNA, 1410 nt, Artificial Sequence
  derived and/or modified CDS sequence (wt) from neuraminidase__InfluenzaA__AFK14204
augaauccaaaccaaaagauaauaaccauugguucggucuguaugacaauuggaauggcuaacuuaauauuacaaauuggaaacauaaucucaauauggauuagccacucaauucaacuugggaaucaaaaucagauugaaacaugcaaucaaagcgucauuacuuaugaaaacaacacuuggguaaaucagacauauguuaacaucagcaacaccaacuuugcugcuggacagucagugguuuccgugaaauuagcgggcaauuccucucucugcccuguuaguggaugggcuauauacaguaaagacaacaguauaagaaucgguuccaagggggauguguuugucauaagggaaccauucauaucaugcucccccuuggaaugcagaaccuucuucuugacucaaggggccuugcuaaaugacaaacauuccaauggaaccauuaaagacaggagcccauaucgaacccuaaugagcuguccuauuggugaaguucccucuccauacaacucaagauuugagucagucgcuuggucagcaagugcuugucaugauggcaucaauuggcuaacaauuggaauuucuggcccagacaauggggcaguggcuguguuaaaguacaacggcauaauaacagacacuaucaagaguuggagaaacaauauauugagaacacaagagucugaaugugcauguguaaaugguucuugcuuuacuguaaugaccgauggaccaagugauggacaggccucauacaagaucuucagaauagaaaagggaaagauagucaaaucagucgaaaugaaugccccuaauuaucacuaugaggaaugcuccuguuauccugauucuagugaaaucacaugugugugcagggauaacuggcauggcucgaaucgaccguggguaucuuucaaccagaaucuggaauaucaaauaggauacauaugcagugggauuuucggagacaauccacgcccuaaugauaagacaggcaguugugguccaguaucgucuaauggagcaaauggaguaaaaggauuuucauucaaauacggcaaugguguuuggauagggagaacuaaaagcauuaguucaagaaacgguuuugagaugauuugggauccgaacggauggacugggacagacaauaacuucucaauaaagcaagauaucguaggaauaaaugaguggucaggauauagcgggaguuuuguucagcauccagaauuaacagggcuggauuguauaagaccuugcuucuggguugaacuaaucagagggcgacccaaagagaacacaaucuggacuagcgggagcagcauauccuuuugugguguaaacagugacacuguggguuggucuuggccggacggugcugaguugccauuuaccauugacaaguaa

SEQ ID NO: 54415 - RNA, 1410 nt, Artificial Sequence
  derived and/or modified CDS sequence (wt) from neuraminidase__InfluenzaA__AFK14213
augaauccaaaccaaaagauaauaaccauugguucggucuguaugacaauuggaauggcuaacuuaauauuacaaauuggaaacauaaucucaauauggauuagccacucaauucaacuugggaaucaaaaucagacugaaacaugcaaucaaagcgucauuacuuaugaaaacaacacuuggguaaaucagacauauguuaacaucagcaacaccaacuuugcugcuggacagucagugguuuccgugaaauuagcgggcaauuccucucucugcccuguuaguggaugggcuauauacaguaaagacaacaguauaagaaucgguuccaagggggauguguuugucauaagggaaccauucauaucaugcucccccuuggaaugcagaaccuucuucuugacucaaggggccuugcuaaaugacaaacauuccaauggaaccauuaaagacaggagcccuuaucgaacccuaaugagcuguccuauuggugaaguucccucuccauacaacucaagauuugagucagucgcuuggucagcaagugcuugucaugauggcaucaauuggcuaacaauuggaauuucuggcccagacaauggggcaguggcuguguuaaaguacaacggcauaauaacagacacuaucaagaguuggagaaacaauauauugagaacacaagagucugaaugugcauguguaaaugguucuugcuuuacuguaaugaccgauggaccaagugauggacaggccucauacaagaucuucagaauagaaaagggaaagauagucaaaucagucgaaaugaaugccccuaauuaucacuaugaggaaugcuccuguuauccugauucuagugaaaucacaugugugugcagggauaacuggcauggcucgaaucgaccgugggugucuuucaaccagaaucuggaauaucagauaggauacauaugcagugggauuuucggagacaauccacgcccuaaugauaagacaggcaguugugguccaguaucgucuaauggagcaaauggaguaaaaggauuuucauucaaauacggcaaugguguuuggauagggagaacuaaaagcauuaguucaagaaacgguuuugagaugauuugggauccgaacggauggacugggacagacaauaacuucucaauaaagcaagauaucguaggaauaaaugaguggucaggauauagcgggaguuuuguucagcauccagaacuaacagggcuggauuguauaagaccuugcuucuggguugaacuaaucagagggcgacccaaagagaacacaaucuggacuagcgggagcagcauauccuuuugugguguaaacagugacacuguggguuggucuuggccagacggugcugaguugccauuuaccauugacaaguaa

SEQ ID NO: 54416 - RNA, 1410 nt, Artificial Sequence
  derived and/or modified CDS sequence (wt) from neuraminidase__InfluenzaA__AFK14222
augaauccaaaccaaaagauaauaaccauugguucggucuguaugacaauuggaauggcuaacuuaauauuacaaauuggaaacauaaucucaauauggauuagccacucaauucgacuugggaaucaaaaucagauugaaacaugcaaucaaagcgucauuacuuaugaaaacaacacuuggguaaaucagacauauguuaacaucagcaacaccaacuuugcugcuggacagucagugguuuccgugaaauuagcgggcaauuccucucucugcccuguuaguggaugggcuauauacaguaaagacaacaguauaagaaucgguuccaagggggauguguuugucauaagggaaccauucauaucaugcucccccuuggaaugcagaaccuucuucuugacucaaggggccuugcuaaaugacaaacauuccaauggaaccauuaaagacaggagcccauaucgaacccuaaugagcuguccuauuggugaaguucccucuccauacaacucaagauuugagucagucgcuuggucagcaagugcuugucaugauggcaucaauuggcuaacaauuggaauuucuggcccagacaauggggcaguggcuguguuaaaguacaacggcauaauaacagacacuaucaagaguuggagaaacaauauauugagaacacaagagucugaaugugcauguguaaaugguucuugcuuuacuguaaugaccgauggaccaagugauggacaggccucauacaagaucuucagaauagaaaagggaaagauagucaaaucagucgaaaugaaugccccuaauuaucacuaugaggaaugcuccuguuauccugauucuagugaaaucacaugugugugcagggauaacuggcauggcucgaaucgaccgugggugucuuucaaccagaaucuggaauaucagauaggauacauaugcagugggauuuucggagacaauccacgcccuaaugauaagacaggcaguugugguccaguaucgucuaauggagcaaauggaguaaaaggauuuucauucaaauacggcaaugguguuuggauagggagaacuaaaagcauuaguucaagaaacgguuuugagaugauuugggauccgaacggauggacugggacagacaauaacuucucaauaaagcaagauaucguaggaauaaaugaguggucaggauauagcgggaguuuuguccagcauccagaacuaacagggcuggauuguauaagaccuugcuucuggguugaacuaaucagagggcgacccaaagagaacacaaucuggacuagcgggagcagcauauccuuuugugguguaaacagugacacuguggguuggucuuggccagacggugcugaguugccauuuaccauugacaaguaa

SEQ ID NO: 54417 - RNA, 1410 nt, Artificial Sequence; identical to SEQ ID NO: 54409
  derived and/or modified CDS sequence (wt) from neuraminidase__InfluenzaA__AFK14231

SEQ ID NO: 54418 - RNA, 1410 nt, Artificial Sequence; identical to SEQ ID NO: 48750
  derived and/or modified CDS sequence (wt) from neuraminidase__InfluenzaA__AFK14240

SEQ ID NO: 54419 - RNA, 1410 nt, Artificial Sequence; identical to SEQ ID NO: 54407
  derived and/or modified CDS sequence (wt) from neuraminidase__InfluenzaA__AFK14249

SEQ ID NO: 54420 - RNA, 1410 nt, Artificial Sequence; identical to SEQ ID NO: 48750
  derived and/or modified CDS sequence (wt) from neuraminidase__InfluenzaA__AFK14257

SEQ ID NO: 54421 - RNA, 1410 nt, Artificial Sequence; identical to SEQ ID NO: 48750
  derived and/or modified CDS sequence (wt) from neuraminidase__InfluenzaA__AFK14266

SEQ ID NO: 54422 - RNA, 1410 nt, Artificial Sequence
  derived and/or modified CDS sequence (wt) from neuraminidase__InfluenzaA__AFK14274
augaauccaaaccaaaagauaauaaccauugguucggucuguaugacaauuggaauggcuaacuuaauauuacaaauuggaaacauaaucucaauauggauuagccacucaauucaacuugggaaucaaaaucagauugaaacaugcaaucaaagcgucauuacuuaugaaaacaacacuuggguaaaucagacauauguuaacaucagcaacaccaacuuugcugcuggacagucagugguuuccgugaaauuagcgggcaauuccucucucugcccuguuaguggaugggcuauauacaguaaagacaacaguauaagaaucgguuccaagggggauguguuugucauaagggaaccauucauaucaugcucccccuuggaaugcagaaccuucuucuugacucaaggggccuugcuaaaugacaaacauuccaauggaaccauuaaagacaggagcccauaucgaacccuaaugagcuguccuauuggugaaguucccucuccauacaacucaagauuugagucagucgcuuggucagcaagugcuugucaugauggcaucaauuggcuaacaauuggaauuucuggcccagacaauggggcaguggcuguguuaaaguacaacggcauaauaacagacacuaucaagaguuggagaaacaauauauugagaacacaagagucugaaugugcauguguaaaugguucuugcuuuacuguaaugaccgauggaccaagugauggacaggccucauacaagaucuucagaauagaaaagggaaagauagucaaaucagucgaaaugaaugccccuaauuaccacuaugaggaaugcuccuguuauccugauucuagugaaaucacaugugugugcagggauaacuggcauggcucgaaucgaccguggguaucuuucaaccagaaucuggaauaucagauaggauacauaugcagugggauuuucggagacaauccacgcccuaaugauaagacaggcaguugugguccaguaucgucuaauggagcaaauggaguaaaaggauuuucauucaaauacggcaaugguguuuggauagggagaacuaaaagcauuaguucaagaaacgguuuugagaugauuugggauccgaacggauggacugggacagacaauaacuucucaauaaagcaagauaucguaggaauaaaugaauggucaggauauagcgggaguuuuguucagcauccagaacuaacagggcuggauuguauaagaccuugcuucuggguugaacuaaucagagggcgacccaaagagaacacaaucuggacuagcgggagcagcauauccuuuugugguguaaacagugacacuguggguuggucuuggccggacggugcugaguugccauuuaccauugacaaguaa

SEQ ID NO: 54423 - RNA, 1410 nt, Artificial Sequence
  derived and/or modified CDS sequence (wt) from neuraminidase__InfluenzaA__AFK14281
augaauccaaaccaaaagauaauaaccauugguucggucugcaugacaauuggaauggcuaacuuaauauuacaaauuggaaacauaaucucaauauggauuagccacucaauucaacuugggaaucaaaaucagauugaaacaugcaaucaaagcgucauuacuuaugaaaacaacacuuggguaaaucagacagauguuaacaucagcaacaccaacuuugcugcuggacagucagugguuuccgugaaauuagcgggcaauuccucucucugcccuguuaguggaugggcuauauacaguaaagacaacaguauaagaaucgguuccaagggggauguguuugucauaagggaaccauucauaucaugcucccccuuggaaugcagaaccuucuucuugacucaaggggccuugcuaaaugacaaacauuccaauggaaccauuaaagacaggagcccguaucgaacccuaaugagcuguccuauuggugaaguucccucuccauacaacucaagauuugagucagucgcuuggucagcaagugcuugucaugauggcaucaauuggcuaacaauuggaauuucuggcccagacaauggggcaguggcuguguuaaaguacaacggcauaauaacagacacuaucaagagcuggagaaacaauauauugagaacacaagagucugaaugugcauguguaaaugguucuugcuuuacuguaaugaccgauggaccaagugauggacaggccucauacaagaucuucagaauagaaaagggaaagauagucaaaucagucgaaaugaaugccccuaauuaucacuaugaggaaugcuccuguuauccugauucuagugaaaucacaugugugugcagggauaacuggcauggcucgaaucgaccguggguaucuuucaaccagaaucuggaauaucagauaggauacauaugcagugggauuuucggagacaauccacgcccuaaugauaagacaggcaguuguggaccaguaucgucuaauggagcaaauggaguaaaaggauuuucauucaaauacggcaaugguguuuggauagggagaacuaaaagcauuaguucaagaaacgguuuugagaugauuugggauccgaacggauggacugggacagacaauaacuucucaauaaagcaagauaucguaggaauaaaugaguggucaggauauagcgggaguuuuguucagcauccagaacuaacagggcuggauuguauaagaccuugcuucuggguugaacuaaucagagggcgacccaaagagaacacaaucuggacuagcgggagcagcauauccuuuugugguguaaacagugacacuguggguuggucuuggccggacggugcugaguugccauuuaccauugacaaguaa

SEQ ID NO: 54424 - RNA, 1410 nt, Artificial Sequence; identical to SEQ ID NO: 48750
  derived and/or modified CDS sequence (wt) from neuraminidase__InfluenzaA__AFK14289

SEQ ID NO: 54425 - RNA, 1410 nt, Artificial Sequence; identical to SEQ ID NO: 54409
  derived and/or modified CDS sequence (wt) from neuraminidase__InfluenzaA__AFK14298

SEQ ID NO: 54426 - RNA, 1410 nt, Artificial Sequence; identical to SEQ ID NO: 52096
  derived and/or modified CDS sequence (wt) from neuraminidase__InfluenzaA__AFK14307

SEQ ID NO: 54427 - RNA, 1410 nt, Artificial Sequence
  derived and/or modified CDS sequence (wt) from neuraminidase__InfluenzaA__AFK14316
augaauccaaaccagaagauaauaaccauugguucggucuguaugacaauuggaauggcuaacuuaauauuacaaauuggaaacauaaucucaauauggauuagccacucaauucaacuugggaaucaaaaucagacugaaacaugcaaucaaagcgucauuacuuaugaaaacaacacuuggguaaaucagacauauguuaacaucagcaacaccaacuuugcugcuggacagucagugguuuccgugaaauuagcgggcaauuccucucucugcccuguuaguggaugggcuauauacaguaaagacaacaguauaagaaucgguuccaagggggauguguuugucauaagggaaccauucauaucaugcucccccuuggaaugcagaaccuucuucuugacucaaggggccuugcuaaaugacaaacauuccaauggaaccauuaaagacaggagcccauaucgaacccuaaugagcuguccuauuggugaaguucccucuccauacaacucaagauuugagucagucgcuuggucagcaagugcuugucaugauggcaucaauuggcuaacaauuggaauuucuggcccagacaauggggcaguggcuguguuaaaguacaacggcauaauaacagacacuaucaagaguuggagaaacaauauauugagaacacaagagucugaaugugcauguguaaaugguucuugcuuuacuguaaugaccgauggaccaagugauggacaggccucauacaagaucuucagaauagaaaagggaaagauagucaaaucagucgaaaugaaugccccuaauuaucacuaugaggaaugcuccuguuauccugauucuagugaaaucacaugugugugcagggauaacuggcauggcucgaaucgaccgugggugucuuucaaccagaaucuggaauaucagauaggauacauaugcagugggauuuucggagacaauccacgcccuaaugauaagacaggcaguugugguccaguaucgucuaauggagcaaauggaguaaaaggauuuucauucaaauacggcaaugguguuuggauagggagaacuaaaagcauuaguucaagaaacgguuuugagaugauuugggauccgaacggauggacugggacagacaauaacuucucaauaaagcaagauaucguaggaauaaaugaguggucaggauauagcgggaguuuuguucagcauccagaacuaacagggcuggauuguauaagaccuugcuucuggguugaacuaaucagagggcgacccaaagagaacacaaucuggacuagcgggagcagcauauccuuuugugguguaaacagugacacuguggguuggucuuggccagacggugcugaguugccauuuaccauugacaaguaa

SEQ ID NO: 54428 - RNA, 1410 nt, Artificial Sequence
  derived and/or modified CDS sequence (wt) from neuraminidase__InfluenzaA__AFK14325
augaauccaaaccaaaagauaauaaccauugguucggucuguaugacaauuggaauggcuaacuuaauauuacaaauuggaaacauaaucucaauauggauuagccacucaauucaacuugggaaucaaaaucagauugaaacaugcaaucaaagcgucauuacuuaugaaaacaacacuuggguaaaucagacauauguuaacaucagcaacaccaacuuugcugcuggacagucagugguuuccgugaaauuagcgggcaauuccucucucugcccuguuaguggaugggcuauauacaguaaagacaacaguauaagaaucgguuccaagggggauguguuugucauaagggaaccauucauaucaugcucccccuuggaaugcagaaccuucuucuugacucaaggggccuugcuaaaugacaaacauuccaauggaaccauuaaagacaggagcccauaucgcacccuaaugagcuguccuauuggugaaguucccucuccauacaacucaagauuugagucaguugcuuggucagcaagugcuugucaugauggcaucaauuggcuaacaauuggaauuucuggcccagacaauggggcaguggcuguguuaaaguacaacggcauaauaacagacacuaucaagaguuggagaaacaauauauugagaacacaagagucugaaugugcauguguaaaugguucuugcuuuacuguaaugaccgauggaccaagugauggacaggccucauacaagaucuucagaauagaaaggggaaagauagucaaaucagucgaaaugaaugccccuaauuaucacuaugaggaaugcuccuguuauccugauucuagugaaaucacaugugugugcagggauaacuggcauggcucgaaucgaccgugggugucuuucaaccagaaucuggaauaucagauaggauacauaugcagugggauuuucggagacaauccacgcccuaaugauaagacaggcaguugugguccaguaucgucuaauggagcaaauggaguaaaaggauuuucauucaaauacggcaaugguguuuggauagggagaacuaaaagcauuaguucaagaaacgguuuugagaugauuugggauccgaacggauggacugggacagacaauaacuucucaauaaagcaagauaucguaggaauaaaugaguggucaggauauagcgggaguuuuguucagcauccagaacuaacagggcuggauuguauaagaccuugcuucuggguugaacuaaucagagggcgacccaaagagaacacaaucuggacuagcgggagcagcauauccuuuugugguguaaacagugacacuguggguuggucuuggccagacggugcugaguugccauuuaccauugacaaguaa

SEQ ID NO: 54429 - RNA, 1410 nt, Artificial Sequence; identical to SEQ ID NO: 48750
  derived and/or modified CDS sequence (wt) from neuraminidase__InfluenzaA__AFK14334

SEQ ID NO: 54430 - RNA, 1410 nt, Artificial Sequence; identical to SEQ ID NO: 48814
  derived and/or modified CDS sequence (wt) from neuraminidase__InfluenzaA__AFK14343

SEQ ID NO: 54431 - RNA, 1410 nt, Artificial Sequence
  derived and/or modified CDS sequence (wt) from neuraminidase__InfluenzaA__AFK14352
augaauccaaaccaaaagauaauaaccauugguucggucuguaugacaauuggaauggcuaacuuaauauuacaaauuggaaacauaaucucaauauggauuagccacucaauucaacuugggaaucaaaaucagauugaaacaugcaaucaaagcgucauuacuuaugaaaacaacacuuggguaaaucagacauauguuaacaucagcaacaccaacuuugcugcuggacagucagugguguccgugaaauuagcgggcaauuccucucucugcccuguuaguggaugggcuauauacaguaaagacaacaguauaagaaucgguuccaagggggauguguuugucauaagggaaccauucauaucaugcucccccuuggaaugcagaaccuucuucuugacucaaggggccuugcuaaaugacaaacauuccaauggaaccauuaaagacaggagcccauaucgaacccuaaugagcuguccuauuggugaaguucccucuccauacaacucaagauuugagucagucgcuuggucagcaagugcuugucaugauggcaucaauuggcuaacaauuggaauuucuggcccagacaauggggcaguggcuguguuaaaguacaacggcauaauaacagacacuaucaagaguuggagaaacaauauauugagaacacaagagucugaaugugcauguguaaaugguucuugcuuuacuguaaugaccgauggaccaagugauggacaggccucauacaagaucuucagaauagaaaagggaaagauagucaaaucagucgaaaugaaugccccuaauuaucacuaugaggaaugcuccuguuauccugauucuagugaaaucacaugugugugcagggauaacuggcauggcucgaaucgaccguggguaucuuucaaccagaaucuggaauaucagauaggauacauaugcagugggauuuucggagacaauccacgcccuaaugauaagacaggcaguugugguccaguaucgucuaauggagcaaauggaguaaaaggauuuucauucaaauacggcaaugguguuuggauagggagaacuaaaagcauuaguucaagaaacgguuuugagaugauuugggauccgaacggauggacugggacagacaauaacuucucaauaaagcaagauaucguaggaauaaaugaguggucaggauauagcgggaguuuuguucagcauccagaacuaacagggcuggauuguauaagaccuugcuucuggguugaacuaaucagagggcgacccaaagagaacacaaucuggacuagcgggagcagcauauccuuuugugguguaaacagugacacuguggguuggucuuggccggacggugcugaguugccauuuaccauugacaaguaa

SEQ ID NO: 54432 - RNA, 1410 nt, Artificial Sequence; identical to SEQ ID NO: 48814
  derived and/or modified CDS sequence (wt) from neuraminidase__InfluenzaA__AFK14360

SEQ ID NO: 54433 - RNA, 1410 nt, Artificial Sequence
  derived and/or modified CDS sequence (wt) from neuraminidase__InfluenzaA__AFK14369
augaauccaaaccaaaagauaauaaccauugguucggucuguaugacaauuggaauggcuaacuuaauauuacaaauuggaaacauaaucucaauauggauuagccacucaauucaacuugggaaucaaaaucagauugaaacaugcaaucaaagcgucauuacuuaugaaaacaacacuuggguaaaucagacauauguuaacaucagcaacaccaacuuugcugcuggacagucagugguuuccgugaaauuagcgggcaauuccucucucugcccuguuaguggaugggcuauauacaguaaagacaacaguauaagaaucgguuccaagggggauguguuugucauaagggaaccauucauaucaugcucccccuuggaaugcagaaccuucuucuugacucaaggggccuugcuaaaugacaaacauuccaauggaaccauuaaagacaggagcccauaucgaacccuaaugagcuguccuauuggugaaguucccucuccauacaacucaagauuugagucagucgcuuggucagcaagugcuugucaugauggcaucaauuggcuaacaauuggaauuucuggcccagacaauggggcaguggcuguguuaaaguacaacggcauaauaacagacacuaucaagaguuggagaaacaauauauugagaacacaagagucugaaugugcauguguaaaugguucuugcuuuacuguaaugaccgauggaccaagugauggacaggccucauacaagaucuucagaauagaaaagggaaagauagucaaaucagucgaaaugaaugccccuaauuaucacuaugaggaaugcuccuguuauccugauucuagugaaaucacaugugugugcagggauaacuggcauggcucgaaucgaccguggguaucuuucaaccagaaucuggaauaucagauaggauacauaugcagugggauuuucggagacaauccacgcccuaaugauaagacaggcaguugugguccaguaucgucuaauggagcaaauggaguaaaaggauuuucauucaaauacggcaaugguguuuggauagggagaacuaaaagcauuaguucaagaaacgguuuugagaugauuugggauccgaacggauggacugggacagacaauaacuucucaauaaagcaagauaucguaggaauaaaugaguggucaggauauagcgggaguuuuguucagcauccagaacuaacagggcuggauuguauaagaccuugcuucuggguugaacuaaucagagggcgacccaaagagaacacaaucuggacuagcgggagcagcauauccuuuugugguguaaacagugacacuguagguuggucuuggccggacggugcugaguugccauuuaccauugacaaguaa

SEQ ID NO: 54434 - RNA, 1410 nt, Artificial Sequence
  derived and/or modified CDS sequence (wt) from neuraminidase__InfluenzaA__AFK14387
augaauccaaaccaaaagauaauaaccauugguucggucuguaugacaauuggaauggcuaacuuaauauuacaaauuggaaacauaaccucaauauggauuagccacucaauucaacuugggaaucaaaaucagauugacacaugcaaucaaagcgucauuacuuaugaaaacaacacuuggguaaaucagacauauguuaacaucagcaacaccaacuuugcugcuggacagucagugguuuccgugaaauuagcgggcaauuccucucucugcccuguuaguggaugggcuauauacaguaaagacaacaguauaagaaucgguuccaagggggauguguuugucauaagggaaccauucauaucaugcucccccuuggaaugcagaaccuucuucuugacucaaggggccuugcuaaaugacaaacauuccaauggaaccauuaaagacaggagcccauaucgaacccuaaugagcuguccuauuggugaaguucccucuccauacaacucaagauuugagucagucgcuuggucagcaagugcuugucaugauggcaucaauuggcuaacaauuggaauuucuggcccagacaauggggcaguggcuguguuaaaguacaacggcauaauaacagacacuaucaagaguuggagaaacaauauauugagaacacaagagucugaaugugcauguguaaaugguucuugcuuuacuguaaugaccgauggaccaagugauggacaggccucauacaagaucuucagaauagaaaagggaaagauagucaaaucagucgaaaugaaugccccuaauuaucacuaugaggaaugcuccuguuauccugauucuagugaaaucacaugugugugcagggauaacuggcauggcucgaaucgaccgugggugucuuucaaccagaaucuggaauaucagauaggauacauaugcagugggauuuucggagacaauccacgcccuaaugauaagacaggcaguugugguccaguaucgucuaauggagcaaauggaguaaaaggauuuucauucaaauacggcaaugguguuuggauagggagaacuaaaagcauuaguucaagaaacgguuuugagaugauuugggauccgaacggauggacugggacagacaauaacuucucaauaaagcaagauaucguaggaauaaaugaguggucaggauauagcgggaguuuuguucagcauccagaacuaacagggcuggauuguauaagaccuugcuucuggguugaacuaaucagagggcgacccaaagagaacacaaucuggacuagcgggagcagcauauccuuuugugguguaaacagugacacuguggguuggucuuggccagacggugcugaguugccauuuaccauugacaaguaa

SEQ ID NO: 54435 - RNA, 1410 nt, Artificial Sequence; identical to SEQ ID NO: 54409
  derived and/or modified CDS sequence (wt) from neuraminidase__InfluenzaA__AFK14397

SEQ ID NO: 54436 - RNA, 1410 nt, Artificial Sequence; identical to SEQ ID NO: 48750
  derived and/or modified CDS sequence (wt) from neuraminidase__InfluenzaA__AFK14406

SEQ ID NO: 54437 - RNA, 1410 nt, Artificial Sequence
  derived and/or modified CDS sequence (wt) from neuraminidase__InfluenzaA__AFK14415
augaauccaaaccaaaagauaauaaccauugguucggucuguaugacaauuggaauggcuaacuuaauauuacaaauuggaaacauaaucucaauauggauuagccacucaauucaacuugggaaucaaaaucagauugaaacaugcaaucaaagcgucauuacuuaugaaaacaacacuuggguaaaucagacauauguuaacaucagcaacaccaacuuugcugcuggacagucagugguauccgugaaauuagcgggcaauuccucucucugcccuguuaguggaugggcuauauacaguaaagacaacaguauaagaaucgguuccaagggggauguguuugucauaagggaaccauucauaucaugcucccccuuggaaugcagaaccuucuucuugacucaaggggccuugcuaaaugacaaacauuccaauggaaccauuaaagacaggagcccauaucgaacccuaaugagcuguccuauuggugaaguucccucuccauacaacucaagauuugagucagucgcuuggucagcaagugcuugucaugauggcaucaauuggcuaacaauuggaauuucuggcccagacaauggggcaguggcuguguuaaaguacaacggcauaauaacagacacuaucaagaguuggagaaacaauauauugagaacacaagagucugaaugugcauguguaaaugguucuugcuuuacuguaaugaccgauggaccaagugauggacaggccucauacaagaucuucagaauagaaaagggaaagauagucaaaucagucgaaaugaaugccccuaauuaucacuaugaggaaugcuccuguuauccugauucuagugaaaucacaugugugugcagggauaacuggcauggcucgaaucgaccguggguaucuuucaaccagaaucuggaauaucagauaggauacauaugcagugggauuuucggagacaauccacgcccuaaugauaagacaggcaguugugguccaguaucgucuaauggagcaaauggaguaaaaggauuuucauucaaauacggcaaugguguuuggauagggcgaacuaaaagcauuaguucaagaaacgguuuugagaugauuugggauccgaacggauggacugggacagacaauaacuucucaauaaagcaagauaucguaggaauaaaugaguggucaggauauagcgggaguuuuguucagcauccagaacuaacagggcuggauuguauaagaccuugcuucuggguugaacuaaucagagggcgacccaaagagaacacaaucuggacuagcgggagcagcauauccuuuugugguguaaacagugacacuguggguuggucuuggccggacggugcugaguugccauuuaccauugacaaguaa

SEQ ID NO: 54438 - RNA, 1410 nt, Artificial Sequence; identical to SEQ ID NO: 50544
  derived and/or modified CDS sequence (wt) from neuraminidase__InfluenzaA__AFK14424

SEQ ID NO: 54439 - RNA, 1410 nt, Artificial Sequence
  derived and/or modified CDS sequence (wt) from neuraminidase__InfluenzaA__AFK14433
augaauccaaaccaaaagauaauaaccauugguucggucuguaugauaauuggaauggcuaacuuaauauuacaaauuggaaacauaaucucaauauggauuagccacucaauucaacuugggaaucaaaaucagauugaaacaugcaaucaaagcgucauuacuuaugaaaacaacacuuggguaaaucagacauauguuaacaucagcaacaccaacuuugcugcuggacagucagugguuuccgugaaauuagcgggcaauuccucucucugcccuguuaguggaugggcuauauacaguaaagacaacaguauaagaaucgguuccaagggggauguguuugucauaagggaaccauucauaucaugcucccccuuggaaugcagaaccuucuucuugacucaaggggccuugcuaaaugacaaacauuccaauggaaccauuaaagacaggagcccauaucgaacccuaaugagcuguccuauuggugaaguucccucuccauacaacucaagauuugagucagucgcuuggucagcaagugcuugucaugauggcaucaauuggcuaacaauuggaauuucuggcccagacaauggggcaguggcuguguuaaaguacaacggcauaauaacagacacuaucaagaguuggagaaacaauauauugagaacacaagagucugaaugugcauguguaaaugguucuugcuuuacuguaaugaccgauggaccaagugauggacaggccucauacaagaucuucagaauagaaaagggaaagauagucaaaucagucgaaaugaaugccccuaauuaucacuaugaggaaugcuccuguuauccugauucuagugaaaucacaugugugugcagggauaacuggcauggcucgaaucgaccgugggugucuuucaaccagaaucuggaauaucagauaggauacauaugcagugggauuuucggagacaauccacgcccuaaugauaagacaggcaguugugguccaguaucgucuaauggagcaaauggaguaaaaggauuuucauucaaauacggcaaugguguuuggauagggagaacuaaaagcauuaguucaagaaacgguuuugagaugauuugggauccgaacggauggacugggacagacaauaacuucucaauaaagcaagauaucguaggaauaaaugaguggucaggauauagcgggaguuuuguucagcauccagaacuaacagggcuggauuguauaagaccuugcuucuggguugaacuaaucagagggcgacccaaagagaacacaaucuggacuagcgggagcagcauauccuuuugugguguaaacagugacacuguggguuggucuuggccagacggugcugaguugccauuuaccauugacaaguaa

SEQ ID NO: 54440 - RNA, 1410 nt, Artificial Sequence; identical to SEQ ID NO: 48750
  derived and/or modified CDS sequence (wt) from neuraminidase__InfluenzaA__AFK14442

SEQ ID NO: 54441 - RNA, 1410 nt, Artificial Sequence
  derived and/or modified CDS sequence (wt) from neuraminidase__InfluenzaA__AFK14451
augaauccaaaccaaaagauaauaaccauugguucggucuguaugacaauuggaauggcuaacuuaauauuacaaauuggaaacauaaucucaauauggauuagccacucaauucaacuugggaaucaaaaucagauugaaacaugcaaucaaagcgucauuacuuaugaaaacaacaccuggguaaaucagacauauguuaacaucagcaacaccaacuuugcugcuggacagucaguggccuccgcgaaauuagcgggcaauuccucucucugcccuguuaguggaugggcuauauacaguaaagacaacaguauaagaaucgguuccaagggggauguguuugucauaagggaaccauucauaucaugcucccccuuggaaugcagaaccuucuucuugacucaaggggccuugcuaaaugacaaacauuccaauggaaccauuaaagacaggagcccauaucgaacccuaaugagcuguccuauuggugaaguucccucuccauacaacucaagauuugagucagucgcuuggucagcaagugcuugucaugauggcaucaauuggcuaacaauuggaauuucuggcccagacaauggggcaguggcuguguuaaaguacaacggcauaauaacagacacuaucaagaguuggagaaacaauauauugagaacacaagagucugaaugugcauguguaaaugguucuugcuuuacuguaaugaccgauggaccaagugauggacaggccucauacaagaucuucagaauagaaaagggaaagauagucaaaucagucgaaaugaaugccccuaauuaucacuaugaggaaugcuccugcuauccugauucuagugaaaucacaugugucugcagggauaacuggcauggcucgaaucgaccguggguaucuuucaaccagaaucuggaauaucagauaggauauauaugcagugggauuuucggagacaauccacgcccuaaugauaagacaggcaguugugguccaguaucgucuaauggagcaaauggaguaaaaggauuuucauucaaauacggcaaugguguuuggauagggagaacuaaaagcauuaguucaagaaacgguuuugagaugauuugggauccgaacggauggacugggacagacaauaacuucucaauaaagcaagauaucguaggaauaaaugaguggucaggauauagcgggaguuuuguucagcauccagaacuaacagggcuggauuguauaagaccuugcuucuggguugaacuaaucagagggcgacccaaagagaacacaaucuggacuagcgggagcaucauauccuuuugugguguaaacagugacacuguggguuggucuuggccggacggugcugaguugccauuuaccauugacaaguaa

SEQ ID NO: 54442 - RNA, 1410 nt, Artificial Sequence; identical to SEQ ID NO: 49215
  derived and/or modified CDS sequence (wt) from neuraminidase__InfluenzaA__AFK14458

SEQ ID NO: 54443 - RNA, 1410 nt, Artificial Sequence
  derived and/or modified CDS sequence (wt) from neuraminidase__InfluenzaA__AFK14467
augaauccaaaccaaaagauaauaaccauugguucggucuguaugacaauuggaauggcuaacuuaauauuacaaauuggaaacauaaucucaauauggauuagccacucaauucaacuugggaaucaaaaucagauugaaacaugcaaucaaagcgucauuacuuaugaaaacaacacuuggguaaaucagacauauguuaacaucagcaacaccaacuuugcugcuggacagucagugguuuccgugaaauuagcgggcaauuccucucucugcccuguuaguggaugggcuauauacaguaaagacaacaguauaagaaucgguuccaagggggauguguuugucauaagggaaccauucauaucaugcucccccuuggaaugcagaaccuucuucuugacucaaggggccuugcuaaaugacaaacauuccaauggaaccauuaaagacaggagcccauaucgaacccuaaugagcuguccuauuggugaaguucccucuccauacaacucaagauuugagucagucgcuuggucagcaagugcuugucaugauggcaucaauuggcuaacaauuggaauuucuggcccagacaauggggcaguggcuguguuaaaguacaacggcauaauaacagacacuaucaagaguuggagaaacaauauauugagaacacaagagucugaaugugcauguguaaaugguucuugcuuuacuguaaugaccgauggaccaagugauggacaggccucauacaagaucuucagaauagaaaagggaaagauagucaaaucagucgaaaugaaugccccuaauuaucacuaugaggaaugcuccugcuauccugauucuagugaaaucacaugugugugcagggauaacuggcauggcucgaaucgaccgugggugucuuucaaccagaaucuggaauaucagauaggauacauaugcagugggauuuucggagacaauccacgcccuaaugauaagacaggcaguugugguccaguaucgucuaauggagcaaauggaguaaaaggauuuucauucaaauacggcaaugguguuuggauagggagaacuaaaagcauuaguucaagaaacgguuuugagaugauuugggauccgaacggauggacugggacagacaauaacuucucaauaaagcaagauaucguaggaauaaaugaguggucaggauauagcgggaguuuuguucagcauccagaacuaacagggcuggauuguauaagaccuugcuucuggguugaacuaaucagagggcgacccaaagagaacacaaucuggacuagcgggagcagcauauccuuuugugguguaaacagugacacuguggguuggucuuggccagacggugcugaguugccauuuaccauugacaaguaa

SEQ ID NO: 54444 - RNA, 1410 nt, Artificial Sequence; identical to SEQ ID NO: 49070
  derived and/or modified CDS sequence (wt) from neuraminidase__InfluenzaA__AFK14476

SEQ ID NO: 54445 - RNA, 1410 nt, Artificial Sequence
  derived and/or modified CDS sequence (wt) from neuraminidase__InfluenzaA__AFK14485
augaauccaaaccaaaagauaauaaccauugguucggucuguaugacaauuggaauggcuaacuuaauauuacaaauuggaaacauaaucucaauauggauuagccacucaauucaacuugggaaucaaaaucagauugaaacaugcaaucaaagcgucauuacuuaugaaaacaacacuuggguaaaucagacauauguuaacaucagcaacaccaacuuugcugcuggacagucagugguuuccgugaaauuagcgggcaauuccucucucugcccuguuaguggaugggcuauauacaguaaagacaacaguguaagaaucgguuccaagggggauguguuugucauaagggaaccauucauaucaugcucccccuuggaaugcagaaccuucuucuugacucaaggggccuugcuaaaugacaaacauuccaauggaaccauuaaagacaggagcccauaucgaacccuaaugagcuguccuauuggugaaguucccucuccauacaacucaagauuugagucagucgcuuggucagcaagugcuugucaugauggcaucaauuggcuaacaauuggaauuucugggccagacaauggggcaguggcuguguuaaaguacaacggcauaauaacagacacuaucaagaguuggagaaacaauauauugagaacacaagagucugaaugugcauguguaaaugguucuugcuuuacuguaaugaccgauggaccaaguaauggacaggccucauacaagaucuucagaauagaaaagggaaagauagucaaaucagucgaaaugaaugccccuaauuaucacuaugaggaaugcuccuguuauccugauucuagugaaaucacaugugugugcagggauaacuggcauggcucgaaucgaccgugggugucuuucaaccagaaucuggaauaucagauaggauacauaugcagugggauuuucggagacaauccacgcccuauugauaagacaggcaguugugguccaguaucgucuaauggagcaaauggaguaaaaggauuuucauucaaauacggcaaugguguuuggauagggagaacuaaaagcauuaguucaagaaacgguuuugagaugauuugggauccgaacggauggacugggacagacaauaacuucucaauaaagcaagauaucguaggaauaaaugaguggucaggauauagcgggaguuuuguucagcauccggaacuaacagggcuggauuguauaagaccuugcuucuggguugaacuaaucagagggcgacccaaagagaacacaaucuggacuagcgggagcagcauauccuuuugugguguaaacagugacacuguggguuggucuuggccagacggugcugaguugccauuuaccauugacaaguaa

SEQ ID NO: 54446 - RNA, 1410 nt, Artificial Sequence; identical to SEQ ID NO: 49215
  derived and/or modified CDS sequence (wt) from neuraminidase__InfluenzaA__AFK14504

SEQ ID NO: 54447 - RNA, 1410 nt, Artificial Sequence; identical to SEQ ID NO: 49772
  derived and/or modified CDS sequence (wt) from neuraminidase__InfluenzaA__AFK14514

SEQ ID NO: 54448 - RNA, 1410 nt, Artificial Sequence
  derived and/or modified CDS sequence (wt) from neuraminidase__InfluenzaA__AFK14522
augaauccaaaccaaaagauaauaaccauugguucggucuguaugacaauuggaauggcuaacuuaauauuacaaauuggaaacauaaucucaauauggauuagccacucaauucaacuugggaaucaaaaucagauugaaacaugcaaucaaagcgucauuacuuaugaaaacaacacuuggguaaaucagacauauguuaacaucagcaacaccaacuuugcugcuggacagucagugguuuccgugaaauuagcgggcaauuccucucucugcccuguuaguggaugggcuauauacaguaaagacaacaguauaagaaucgguuccaagggggauguguuugucauaagggaaccauucauaucaugcucccccuuggaaugcagaaccuucuucuugacucaaggggccuugcuaaaugacaaacauuccaauggaaccauuaaagacaggagcccauaucgaacccuaaugagcuguccuauuggugaaguucccucuccauacaacucaagauuugagucagucgcuuggucagcaagugcuugucaugauggcaucaauuggcuaacaauuggaauuucuggcccagacaauggggcaguggcuguguuaaaguacaacggcauaauaacagacacuaucaagaguuggagaaacaauauauugagaacacaagagucugaaugugcauguguaaaugguucuugcuuuacuguaaugaccgauggaccaagugauggacaggccucauacaagaucuucagaauagaaaagggaaagauagucaaaucagucgaaaugaaugccccuaauuaucacuaugaggaaugcuccuguuauccugauucuagugaaaucacauguguaugcagggauaacuggcauggcucgaaucgaccguggguaucuuucaaccagaaucuggaauaucagauaggauacauaugcagugggauuuucggagacaauccacgcccuaaugauaagacaggcaguugugguccaguaucgucuaauggagcaaauggaguaaaaggauuuucauucaaauacggcaaugguguuuggauagggagaacuaaaagcauuaguucaagaaacgguuuugagaugauuugggauccgaacggauggacugggacagacaauaacuucucaauaaagcaagauaucguaggaauaaaugaguggucaggauauagcgggaguuuuguucagcauccagaacuaacagggcuggauuguauaagaccuugcuucuggguugaacuaaucagagggcgacccaaagagaacacaaucuggacuagcgggagcagcauauccuuuugugguguaaacagugacacuguggguuggucuuggccggacggugcugaguugccauuuaccauugacaaguaa

SEQ ID NO: 54449 - RNA, 1410 nt, Artificial Sequence; identical to SEQ ID NO: 52165
  derived and/or modified CDS sequence (wt) from neuraminidase__InfluenzaA__AFK14529

SEQ ID NO: 54450 - RNA, 1410 nt, Artificial Sequence
  derived and/or modified CDS sequence (wt) from neuraminidase__InfluenzaA__AFK14538
augaauccaaaccaaaagauaauaaccauugguucggucuguaugacaauuggaauggcuaacuuaauauuacaaauuggaaacauaaucucaauauggauuagccacucaauucaacuugggaaucaaaaucagauugaaacaugcaaucaaagcgucauuacuuaugaaaacaacacuuggguaaaucagacauauguuaacaucagcaacaccaacuuugcugcuggacagucagugguauccgugaaauuagcgggcaauuccucucucugcccuguuaguggaugggcuauauacaguaaagacaacaguauaagaaucgguuccaagggggauguguuugucauaagggaaccauucauaucaugcucccccuuggaaugcagaaccuucuucuugacucaaggggccuugcuaaaugacaaacauuccaauggaaccauuaaagacaggagcccauaucgaacccuaaugagcuguccuauuggugaaguucccucuccauacaacucaagauuugagucagucgcuuggucagcaagugcuugucaugauggcaucaauuggcuaacaauuggaauuucuggcccagacaauggggcaguggcuguguuaaaguacaacggcauaauaacagacacuaucaagaguuggagaaacaauauauugagaacacaagagucugaaugugcauguguaaaugguucuugcuuuacuguaaugaccgauggaccaagugauggacaggccucauacaagaucuucagaauagaaaagggaaagauagucaaaucagucgaaaugaaugccccuaauuaucacuaugaggaaugcuccuguuauccugauucuagugaaaucacaugugugugcagggauaacuggcauggcucgaaucgaccguggguaucuuucaaccagaaucuggaauaucagauaggauacauaugcagugggauuuucggagacaauccacgcccuaaugauaagacaggcaguugugguccaguaucgucuaauggagcaaauggaguaaaaggauuuucauucaaauacggcaaugguguuuggauagggagaacuaaaagcauuaguucaagaaacgguuuugagaugauuugggauccgaacggauggacugggacagacaauaacuucucaauaaagcaagauaucguaggaauaaaugaguggucaggauauagcgggaguuuuguucagcauccagaacuaacagggcuggauuguauaagaccuugcuucuggguugaacuaaucagagggcgacccaaagagaacacaaucuggacuagcgggagcagcauauccuuuugugguguaaacagugacacuguggguuggucuuggccggacggugcugaguugccauuuaccauugacaaguaa

SEQ ID NO: 54451 - RNA, 1410 nt, Artificial Sequence; identical to SEQ ID NO: 51125
  derived and/or modified CDS sequence (wt) from neuraminidase__InfluenzaA__AFK14547

SEQ ID NO: 54452 - RNA, 1410 nt, Artificial Sequence
  derived and/or modified CDS sequence (wt) from neuraminidase__InfluenzaA__AFK14555
augaauccaaaccaaaagauaauaaccauugguucggucuguaugacaauuggaauggcuaacuuaauauuacaaauuggaaacauaaucucaauauggauuagccacucaauucaacuugggaaucaaaaucagauugaaacaugcaaucaaagcgucauuacuuaugaaaacaacacuuggguaaaucagacauauguuaacaucagcaacaccaacuuugcugcuggacagucagugauuuccgugaaauuagcgggcaauuccucucucugcccuguuaguggaugggcuauauacaguaaagacaacaguauaagaaucgguuccaagggggauguguuugucauaagggaaccauucauaucaugcucccccuuggaaugcagaaccuucuucuugacucaaggggccuugcuaaaugacaaacauuccaauggaaccauuaaagacaggagcccauaucgaacccuaaugagcuguccuauuggugaaguucccucuccauacaacucaagauuugagucagucgcuuggucagcaagugcuugucaugauggcaucaauuggcuaacaauuggaauuucuggcccagacaauggggcaguggcuguguuaaaguacaacggcauaauaacagacacuaucaagaguuggagaaacaauauauugagaacacaagagucugaaugugcauguguaaaugguucuugcuuuacuguaaugaccgauggaccaagugauggacaggccucauacaagaucuucagaauagaaaagggaaagauagucaaaucagucgaaaugaaugccccuaauuaucacuaugaggaaugcuccuguuauccugauucuagugaaaucacaugugugugcagggauaacuggcauggcucgaaucgaccgugggugucuuucaaccagaaucuggaauaucagauaggauacauaugcagugggauuuucggagacaauccacgcccuaaugauaagacaggcaguugugguccaguaucgucuaauggagcaaauggaguaaaaggauuuucauucaaauacggcaaugguguuuggauagggagaacuaaaagcauuaguucaagaaacgguuuugagaugauuugggauccgaacggauggacugggacagacaauaacuucucaauaaagcaagauaucguaggaauaaaugaguggucaggauauagcgggaguuuuguucagcauccagaacuaacagggcuggauuguauaagaccuugcuucuggguugaacuaaucagagggcgacccaaagagaacacaaucuggacuagcgggagcagcauauccuuuugugguguaaacagugacacuguggguuggucuuggccagacggugcugaguugccauuuaccauugacaaguaa

SEQ ID NO: 54453 - RNA, 1410 nt, Artificial Sequence
  derived and/or modified CDS sequence (wt) from neuraminidase__InfluenzaA__AFK14564
augaauccaaaccaaaagauaauaaccauugguucggucuguaugacaauuggaauggcuaacuuaauauuacaaauuggaaacauaaucucaauauggauuagccacucaauucaacuugggaaucaaaaucagauugaaacaugcaaucaaagcgucauuacuuaugaaaacaacacuuggguaaaucagacauauguuaacaucagcaacaccaacuuugcugcuggacagucagugguuuccgugaaauuagcgggcaauuccucucucugcccuguuaguggaugggcuauauacaguaaagacaacaguauaagaaucgguuccaagggggauguguuugucauaagggaaccauucauaucaugcucccccuuggaaugcagaaccuucuuuuugacucaaggggccuugcuaaaugacaaacauuccaauggaaccauuaaagacaggagcccauaucgaacccuaaugagcuguccuauuggugaaguucccucuccauacaacucaagauuugagucagucgcuuggucagcaagugcuugucaugauggcaucaauuggcuaacaauuggaauuucuggcccagacaauggggcaguggcuguguuaaaguacaacggcauaauaacagacacuaucaagaguuggagaaacaauauauugagaacacaagagucugaaugugcauguguaaaugguucuugcuuuacuguaaugaccgauggaccaagugauggacaggccucauacaagaucuucagaauagaaaagggaaagauagucaaaucagucgaaaugaaugccccuaauuaucacuaugaggaaugcuccuguuauccugauucuagugaaaucacaugugugugcagggauaacuggcauggcucgaaucgaccgugggugucuuucaaccagaaucuggaauaucaaauaggauacauaugcagugggauuuucggagacaauccacgcccuaaugauaagacaggcaguugugguccaguaucgucuaauggagcaaauggaguaaaaggauuuucauucaaauacggcaaugguguuuggauagggagaacuaaaagcauuaguucaagaaacgguuuugagaugauuugggauccgaacggauggacugggacagacaauaacuucucaauaaagcaagauaucguaggaauaaaugaguggucaggauauagcgggaguuuuguucagcauccagaacuaacagggcuggauuguauaagaccuugcuucuggguugaacuaaucagagggcgacccaaagagaacacaaucuggacuagcgggagcagcauauccuuuugugguguaaacagugacacuguggguuggucuuggccagacggugcugaguugccauuuaccauugacaaguaa

SEQ ID NO: 54454 - RNA, 1410 nt, Artificial Sequence; identical to SEQ ID NO: 48750
  derived and/or modified CDS sequence (wt) from neuraminidase__InfluenzaA__AFK14573

SEQ ID NO: 54455 - RNA, 1410 nt, Artificial Sequence
  derived and/or modified CDS sequence (wt) from neuraminidase__InfluenzaA__AFK14579
augaauccaaaccaaaagauaauaaccauugguucggucuguaugacaauuggaauggcuaacuuaauauuacaaauuggaaacauaaucucaauauggauuagccacucaauucaacuugggaaucaaaaucagauugaaacaugcaaucaaagcgucauuacuuaugaaaacaacacuuggguaaaucagacauauguuaacaucagcaacaccaacuuugcugcuggacagucagugguuuccgugaaauuagcgggcaauuccucucucugcccuguuaguggaugggcuauauacaguaaagacaacaguauaagaaucgguuccaagggggauguguuugucauaagggaaccauucauaucaugcucccccuuggaaugcagaaccuucuucuugacucaaggggccuugcuaaaugacaaacauuccaauggaaccauuaaagacaggagcccauaucgaacccuaaugagcuguccuauuggugaaguucccucuccauacaacucaagauuugagucagucgcuuggucagcaagugcuugucaugauggcaucaauuggcuaacaauuggaauuucuggcccagacaauggggcaguggcuguguuaaaguacaacggcauaauaacagacacuaucaagaguuggagaaacaauauauugagaacacaagagucugaaugugcauguguaaaugguucuugcuuuacuguaaugaccgauggaccaagugauggacaggccucauacaagaucuucagaauagaaaagggaaagauagucaaaucagucgaaaugaaugccccuaauuaucacuaugaggaaugcuccuguuauccugauucuagugaaaucacaugugugugcagggauaacuggcauggcucgaaucgaccgugggugucuuucaaccagaaucuggaauaucagauaggauacaugugcagugggauuuucggagacaauccacgcccuaaugauaagacaggcaguugugguccaguaucgucuaauggagcaaauggaguaaaaggauuuucauucaaauacggcaaugguguuuggauagggagaacuaaaagcauuaguucaagaaacgguuuugagaugauuugggauccgaacggauggacugggacagacaauaacuucucaauaaagcaagauaucguaggaauaaaugaguggucaggauauagcgggaguuuuguucagcauccagaacuaacagggcuggauuguauaagaccuugcuucuggguugaacuaaucagagggcgacccaaagagaacacaaucuggacuagcgggagcagcauauccuuuugugguguaaacagugacacuguggguuggucuuggccagacggugcugaguugccauuuaccauugacaaguaa

SEQ ID NO: 54456 - RNA, 1410 nt, Artificial Sequence; identical to SEQ ID NO: 48750
  derived and/or modified CDS sequence (wt) from neuraminidase__InfluenzaA__AFK14588

SEQ ID NO: 54457 - RNA, 1410 nt, Artificial Sequence; identical to SEQ ID NO: 48750
  derived and/or modified CDS sequence (wt) from neuraminidase__InfluenzaA__AFK14597

SEQ ID NO: 54458 - RNA, 1410 nt, Artificial Sequence; identical to SEQ ID NO: 48750
  derived and/or modified CDS sequence (wt) from neuraminidase__InfluenzaA__AFK14604

SEQ ID NO: 54459 - RNA, 1410 nt, Artificial Sequence
  derived and/or modified CDS sequence (wt) from neuraminidase__InfluenzaA__AFK14632
augaauccaaaccaaaagauaauaaccauugguucggucuguaugacaauuggaauggcuaacuuaauauuacaaauuggaaacauaaucucaauauggauuagccacucaauucaacuugggaaucaaaaucagauugaaacaugcaaucaaagcgucauuacuuaugaaaacaacacuuggguaaaucagacauauguuaacaucagcaacaccaacuuugcugcuggacagucagugguuuccgugaaauuagcgggcaauuccucucucugcccuguuaguggaugggcuauauacaguaaagauaacaguauaagaaucgguuccaagggggauguguuugucauaagggaaccauucauaucaugcucccccuuggaaugcagaaccuucuucuugacucaaggggccuugcuaaaugacaaacauuccaauggaaccauuaaagacaggagcccauaucgaacccuaaugagcuguccuauuggugaaguucccucuccauacaacucaagauuugagucagucgcuuggucagcaagugcuugucaugauggcaucaauuggcuaacaauuggaauuucuggcccagacaauggggcaguggcuguguuaaaguacaacggcauaauaacagacacuaucaagaguuggagaaacaauauauugagaacacaagagucugaaugugcauguguaaaugguucuugcuuuacuguaaugaccgauggaccaagcgauggacaggccucauacaagaucuucagaauagaaaagggaaagauagucaaaucagucgaaaugaaugccccuaauuaucacuaugaggaaugcuccuguuauccugauucuagugaaaucacaugugugugcagggauaacuggcauggcucgaaucgaccgugggugucuuucaaccagaaucuggaauaucagauaggauacauaugcagugggauuuucggagacaauccacgcccuaaugauaagacaggcaguugugguccaguaucgucuaauggagcaaauggaguaaaaggauuuucauucaaauacggcaaugguguuuggauagggagaacuaaaagcauuaguucaagaaacgguuuugagaugauuugggauccgaacggauggacugggacagacaauaacuucucaauaaagcaagauaucguaggaauaaaugaguggucaggauauagcgggaguuuuguucagcauccagaacuaacagggcuggauuguauaagaccuugcuucuggguugaacuaaucagagggcgacccaaagagaacacaaucuggacuagcgggagcagcauauccuuuugugguguaaacagugacacuguggguuggucuuggccagacggugcugaguugccauuuaccauugacaaguaa

SEQ ID NO: 54460 - RNA, 1410 nt, Artificial Sequence; identical to SEQ ID NO: 48749
  derived and/or modified CDS sequence (wt) from neuraminidase__InfluenzaA__AFK14641

SEQ ID NO: 54461 - RNA, 1410 nt, Artificial Sequence; identical to SEQ ID NO: 48750
  derived and/or modified CDS sequence (wt) from neuraminidase__InfluenzaA__AFK14651

SEQ ID NO: 54462 - RNA, 1410 nt, Artificial Sequence; identical to SEQ ID NO: 48750
  derived and/or modified CDS sequence (wt) from neuraminidase__InfluenzaA__AFK14656

SEQ ID NO: 54463 - RNA, 1410 nt, Artificial Sequence; identical to SEQ ID NO: 48750
  derived and/or modified CDS sequence (wt) from neuraminidase__InfluenzaA__AFK14663

SEQ ID NO: 54464 - RNA, 1410 nt, Artificial Sequence; identical to SEQ ID NO: 48750
  derived and/or modified CDS sequence (wt) from neuraminidase__InfluenzaA__AFK14672

SEQ ID NO: 54465 - RNA, 1410 nt, Artificial Sequence; identical to SEQ ID NO: 48750
  derived and/or modified CDS sequence (wt) from neuraminidase__InfluenzaA__AFK14680

SEQ ID NO: 54466 - RNA, 1410 nt, Artificial Sequence; identical to SEQ ID NO: 48750
  derived and/or modified CDS sequence (wt) from neuraminidase__InfluenzaA__AFK14690

SEQ ID NO: 54467 - RNA, 1410 nt, Artificial Sequence
  derived and/or modified CDS sequence (wt) from neuraminidase__InfluenzaA__AFK14707
augaauccaaaccaaaagauaauaaccauugguucggucuguaugacaauuggaauggcuaacuuaauauuacaaauuggaaacauaaucucaauauggauuagccacucaauucaacuugggaaucaaaaucagauugaaacaugcaaucaaagcgucauuacuuaugaaaacaacacuuggguaaaucagacauauguuaacaucagcaacaccaacuuugcugcuggacagucagugguuuccgugaaauuagcgggcaauuccucucucugcccuguuaguggaugggcuauauacaguaaagauaacaguauaagaaucgguuccaagggggauguguuugucauaagggaaccauucauaucaugcucccccuuggaaugcagaaccuucuucuugacucaaggggccuugcuaaaugacaaacauuccaauggaaccauuaaagacaggagcccauaucgaacccuaaugagcuguccuauuggugaaguucccucuccauacaacucaagauuugagucagucgcuuggucagcaagugcuugucaugauggcaucaauuggcuaacaauuggaauuucuggcccagacaauggggcaguggcuguguuaaaguacaacggcauaauaacagacacuaucaagaguuggagaaacaauauauugagaacacaagagucugaaugugcauguguaaaugguucuugcuuuacuguaaugaccgauggaccaagugauggacaggccucauacaagaucuucagaauagaaaagggaaagauagucaaaucagucgaaaugaaugccccuaauuaucacuaugaggaaugcuccuguuauccugauucuagugaaaucacaugugugugcagggauaacuggcauggcucgaaucgaccgugggugucuuucaaccagaaucuggaauaucagauaggauacauaugcagugggauuuucggagacaauccacgcccuaaugauaagacaggcaguugugguccaguaucgucuaauggagcaaauggaguaaaaggauuuucauucaaauacggcaaugguguuuggauagggagaacuaaaagcauuaguucaagaaacgguuuugagaugauuugggauccgaacggauggacugggacagacaauaacuucucaauaaagcaagauaucguaggaauaaaugaguggucaggauauagcgggaguuuuguucagcauccagaacuaacagggcuggauuguauaagaccuugcuucuggguugaacuaaucagagggcgacccaaagagaacacaaucuggacuagcgggagcagcauauccuuuugugguguaaacagugacacuguggguuggucuuggccagacggugcugaguugccauuuaccauugacaaguaa

SEQ ID NO: 54468 - RNA, 1410 nt, Artificial Sequence; identical to SEQ ID NO: 48750
  derived and/or modified CDS sequence (wt) from neuraminidase__InfluenzaA__AFK14715

SEQ ID NO: 54469 - RNA, 1410 nt, Artificial Sequence; identical to SEQ ID NO: 48750
  derived and/or modified CDS sequence (wt) from neuraminidase__InfluenzaA__AFK14724

SEQ ID NO: 54470 - RNA, 1410 nt, Artificial Sequence; identical to SEQ ID NO: 48750
  derived and/or modified CDS sequence (wt) from neuraminidase__InfluenzaA__AFK14733

SEQ ID NO: 54471 - RNA, 1410 nt, Artificial Sequence
  derived and/or modified CDS sequence (wt) from neuraminidase__InfluenzaA__AFK14751
augaauccaaaccaaaagauaauaaccauugguucggucuguaugacaauuggaauggcuaacuuaauauuacaaauuggaaacauaaucucaauauggauuagccacucaauucaacuugggaaucaaaaucagauugaaacaugcaaucaaagcgucauuacuuaugaaaacaacacuuggguaaaucagacauauguuaacaucagcaacaccaacuuugcugcuggacagucagugguuuccgugaaauuagcgggcaauuccucucucugcccuguuaguggaugggcuauauacaguaaagacaacaguauaagaaucgguuccaagggggauguguuugucauaagggaaccauucauaucaugcucccccuuggaaugcagaaccuucuucuugacucaaggggccuugcuaaaugacaaacauuccaauggaaccauuaaagacaggagcccauaucgaacccuaaugagcuguccuauuggugaaguucccucuccauacaacucaagauuugagucagucgcuuggucagcaagugcuugucaugauggcaucaauuggcuaacaauuggaauuucuggcccagacaauggggcaguggcuguguuaaaguacaacggcauaauaacagacacuaucaagaguuggagaaacaauauauugagaacacaagagucugaaugugcauguguaaaugguucuugcuuuacuguaaugaccgauggaccaagugauggacaggccucauacaagaucuucagaauagaaaagggaaagauagucaaaucagucgaaaugaaugccccuaauuaccacuaugaggaaugcuccuguuauccugauucuagugaaaucacaugugugugcagggauaacuggcauggcucgaaucgaccgugggugucuuucaaccagaaucuggaauaucagauaggauacauaugcagugggauuuucggagacaauccacgcccuaaugauaagacaggcaguugugguccaguaucgucuaauggagcaaauggaguaaaaggauuuucauucaaauacggcaaugguguuuggauagggagaacuaaaagcauuaguucaagaaacgguuuugagaugauuugggauccgaacggauggacugggacagacaauaacuucucaauaaagcaagauaucguaggaauaaaugaguggucaggauauagcgggaguuuuguucagcauccagaacuaacagggcuggauuguauaagaccuugcuucuggguugaacuaaucagagggcgacccaaagagaacacaaucuggacuagcgggagcagcauauccuuuugugguguaaacagugacacuguggguuggucuuggccagacggugcugaguugccauuuaccauugacaaguaa

SEQ ID NO: 54472 - RNA, 1410 nt, Artificial Sequence; identical to SEQ ID NO: 48750
  derived and/or modified CDS sequence (wt) from neuraminidase__InfluenzaA__AFK14757

SEQ ID NO: 54473 - RNA, 1410 nt, Artificial Sequence; identical to SEQ ID NO: 54471
  derived and/or modified CDS sequence (wt) from neuraminidase__InfluenzaA__AFK14766

SEQ ID NO: 54474 - RNA, 1410 nt, Artificial Sequence
  derived and/or modified CDS sequence (wt) from neuraminidase__InfluenzaA__AFK14774
augaauccaaaccaaaagauaauaaccauugguucggucuguaugacaauuggaauggccaacuugauauuacaaauuggaaacauaaucucaauauggauuagccacucaauucaacuugggaaucaaaaucagauugaaacaugcaaucaaagcgucauuacuuaugaaaacaacacuuggguaaaucagacauauguuaacaucagcaacaccaacuuugcugcuggacagucagugguuuccgugaaauuagcgggcaauucuucucucugcccuguuaguggaugggcuauauacaguaaagacaacaguguaagaaucgguuccaagggggauguguuugucauaagggaaccauucauaucaugcucccccuuggaaugcagaaccuucuucuugacucaaggggccuugcuaaaugacaaacauuccaauggaaccauuaaagacaggagcccauaucgaacccuaaugagcuguccuauuggugaaguucccucuccauacaacucaagauuugagucagucgcuuggucagcaagugcuugucaugauggcaucaauuggcuaacaauuggaauuucuggcccagacaauggggcaguggcuguguuaaaguacaacggcauaauaacagacacuaucaagaguuggagaaacaauauauugagaacacaagaguccgaaugugcauguguaaaugguucuugcuuuacuguaaugaccgauggaccaagugauggacaggccucauacaagaucuucagaauagaaaagggaaagauagucaaaucagucgaaaugaaugccccuaauuaucacuaugaggaaugcuccuguuauccugauucuagugaaaucacaugugugugcagggauaacuggcauggcucgaaucgaccguggguuucuuucaaccagaaucuggaauaucagauaggauacauaugcagugggauuuucggagacaauccacgcccuaaugauaagacaggcaguugugguccaguaucgucuaauggagcaaauggaguaaaaggauuuucauucaaauacggcaaugguguuuggauagggagaacuaaaagcauuaguucaagaaacgguuuugagaugauuugggauccgaacggauggacugggacagacaauaacuucucaauaaagcaagauaucguaggaauaaaugaguggucaggauauagcggaaguuuuguucagcauccagaacuaacagggcuggauuguauaagaccuugcuucuggguugaacuaaucagagggcgacccaaagagaacacaaucuggacuagcgggagcagcauauccuuuugugguguaaacagugacacuguggguuggucuuggccagacggugcugaguugccauuuaccauugacaaguaa

SEQ ID NO: 54475 - RNA, 1410 nt, Artificial Sequence; identical to SEQ ID NO: 54452
  derived and/or modified CDS sequence (wt) from neuraminidase__InfluenzaA__AFK14781

SEQ ID NO: 54476 - RNA, 1410 nt, Artificial Sequence; identical to SEQ ID NO: 54474
  derived and/or modified CDS sequence (wt) from neuraminidase__InfluenzaA__AFK14790

SEQ ID NO: 54477 - RNA, 1410 nt, Artificial Sequence
  derived and/or modified CDS sequence (wt) from neuraminidase__InfluenzaA__AFK14800
augaauccaaaccaaaagauaauaaccauugguucggucuguaugacaauuggaauggcuaacuuaauauuacaaauuggaaacauaaucucaauauggauuagccacucaauucaacuugggaaucaaaaucagauugaaacaugcaaucaaagcgucauuacuuaugaaaacaacacuuggguaaaucagacauauguuaacaucagcaacaccaacuuugcugcuggacagucagugguuuccgugaaauuagcgggcaauuccucucucugcccuguuaguggaugggcuauauacaguaaagacaacaguauaagaaucgguuccaagggggauguguuugucauaagggaaccauucauaucaugcucccccuuggaaugcagaaccuucuucuugacucaaggggccuugcuaaaugacaaacauuccaauggaaccauuaaagacaggagcccauaucgaacccuaaugagcuguccuauuggugaaguucccucuccauacaacucaagauuugagucagucgcuuggucagcaagugcuugucaugauggcaucaauuggcuaacaauuggaauuucuggcccagacaauggggcaguggcuguguuaaaguacaacggcauaauaacagacacuaucaagaguuggagaaacaauauauugagaacacaagagucugaaugugcauguguaaaugguucuugcuuuacuguaaugaccgauggaccaagugauggacaggccucauacaagaucuucagaauagaaaagggaaagauagucaaaucagucgaaaugaaugccccuaauuaucacuaugaggaaugcuccuguuauccugauucuagugaaaucacaugugugugcagggauaacuggcauggcucgaaucgaccgugggugucuuucaaccagaaucuggaauaucagauaggauacauaugcagugggauuuucggagacaauccacgcccuaaugauaagacaggcaguugugguccaguaucgucuaauggagcaaauggaguaaaaggauuuucauucaaauacggcaaugguguuuggauagggagaacuaaaagcauuaguucaagaaacgguuuugagaugauuugggauccgaacggauggacugggacagacaauaacuucucaauaaagcaagauaucguaggaauaaaugaguggucaggauauagcgggaguuuuguucagcauccagaacuaacagggcuggauuguauaagaccuugcuucuggguugaacuaaucagagggcgacccagagagaacacaaucuggacuagcgggagcagcauauccuuuugugguguaaacagugacacuguggguuggucuuggccagacggugcugaguugccauuuaccauugacaaguaa

SEQ ID NO: 54478 - RNA, 1410 nt, Artificial Sequence; identical to SEQ ID NO: 54413
  derived and/or modified CDS sequence (wt) from neuraminidase__InfluenzaA__AFK14809

SEQ ID NO: 54479 - RNA, 1410 nt, Artificial Sequence
  derived and/or modified CDS sequence (wt) from neuraminidase__InfluenzaA__AFK14816
augaauccaaaccaaaagauaauaaccauugguucggucuguaugacaauuggaauggcuaacuuaauauuacaaauugggaacauaaucucaauauggauuagccacucaauucaacuugggaaucaaaaucagacugaaacaugcaaucaaagcgucauuacuuaugaaaacaacacuuggguaaaucagacauauguuaacaucagcaacaccaacuuugcugcuggacagucagugguuuccgugaaauuagcgggcaauuccucucucugcccuguuaguggaugggcuauauacaguaaagacaacaguauaagaaucgguuccaagggggauguguuugucauaagggaaccauucauaucaugcucccccuuggaaugcagaaccuucuucuugacucaaggggccuugcuaaaugacaaacauuccaauggaaccauuaaagacaggagcccauaucgaacccuaaugagcuguccuauuggugaaguucccucuccauacaacucaagauuugagucagucgcuuggucagcaagugcuugucaugauggcaucaauuggcuaacaauuggaauuucugggccagacaauggggcaguggcuguguuaaaguacaacggcauaauaacagacacuaucaagaguuggagaaacaauauauugagaacacaagagucugaaugugcauguguaaaugguucuugcuuuacuguaaugaccgauggaccaagugauggacaggccucauacaagaucuucagaauagaaaagggaaagauagucaaaucagucgaaaugaaugccccuaauuaucacuaugaggaaugcuccuguuauccugauucuagugaaaucacaugugugugcagggauaacuggcauggcucgaaucgaccgugggugucuuucaaucagaaucuggaauaucagauaggauacauaugcagugggauuuucggagacaauccacgcccuaaugauaagacaggcaguugugguccaguaucgucuaauggagcaaauggaguaaaaggauuuucauucaaauacggcaaugguguuuggauagggagaacuaaaagcauuaguucaagaaacgguuuugagaugauuugggauccgaacggauggacugggacagacaauaacuucucaauaaagcaagauaucguaggaauaaaugaguggucaggauauagcgggaguuuuguucagcauccagaacuaacagggcuggauuguauaagaccuugcuucuggguugaacuaaucagagggcgacccaaagagaacacaaucuggacuagcgggagcagcauauccuuuugugguguaaacagugacacuguggguuggucuuggccagacggugcugaguugccauuuaccauugacaaguaa

SEQ ID NO: 54480 - RNA, 1410 nt, Artificial Sequence; identical to SEQ ID NO: 49070
  derived and/or modified CDS sequence (wt) from neuraminidase__InfluenzaA__AFK14824

SEQ ID NO: 54481 - RNA, 1410 nt, Artificial Sequence; identical to SEQ ID NO: 48750
  derived and/or modified CDS sequence (wt) from neuraminidase__InfluenzaA__AFK14841

SEQ ID NO: 54482 - RNA, 1410 nt, Artificial Sequence
  derived and/or modified CDS sequence (wt) from neuraminidase__InfluenzaA__AFK14849
augaauccaaaccaaaagauaauaaccauugguucggucuguaugacaauuggaauggcuaacuuaauauuacaaauuggaaacauaaucucaauauggauuagccacucaauucaacuugggaaucaaaaucagauugaaacaugcaaucaaagcgucauuacuuaugaaaacaacacuuggauaaaucaaacauauguuaacaucagcaacaccaacuuugcugcuggacagucagugguuuccgugaaauuagcgggcaauuccucucucugcccuguuaguggaugggcuauauacaguaaagacaacaguauaagaaucgguuccaagggggauguguuugucauaagggaaccauucauaucaugcucccccuuggaaugcagaaccuucuucuugacucaaggggccuugcuaaaugacaaacauuccaauggaaccauuaaagacaggagcccauaucgaacccuaaugagcuguccuauuggugaaguucccucuccauacaacucaagauuugagucagucgcuuggucagcaagugcuugucaugauggcaucaauuggcuaacaauuggaauuucuggcccagacaauggggcaguggcuguguuaaaguacaacggcauaauaacagacacuaucaagaguuggagaaacaauauauugagaacacaagagucugaaugugcauguguaaaugguucuugcuuuacuguaaugaccgauggaccaagugauggacaggccucauacaagaucuucagaauagaaaagggaaagauagucaaaucagucgaaaugaaugccccuaauuaucacuaugaggaaugcuccuguuauccugauucuagugaaaucacaugugugugcagggauaacuggcauggcucgaaucgaccgugggugucuuucaaccagaaucuggaauaucagauaggauacauaugcagugggauuuucggagacaauccacgcccuaaugauaagacaggcaguugugguccaguaucgucuaauggagcaaauggaguaaaaggauuuucauucaaauacggcaaugguguuuggauagggagaacuaaaagcauuaguucaagaaacgguuuugagaugauuugggauccgaacggauggacugggacagacaauaacuucucaauaaagcaagauaucguaggaauaaaugaguggucaggauauagcgggaguuuuguucagcauccagaacuaacagggcuggauuguauaagaccuugcuucuggguugaacuaaucagagggcgacccaaagagaacacaaucuggacuagcgggagcagcauauccuuuugugguguaaacagugacacuguggguuggucuuggccagacggugcugaguugccauuuaccauugacaaguaa

SEQ ID NO: 54483 - RNA, 1410 nt, Artificial Sequence
  derived and/or modified CDS sequence (wt) from neuraminidase__InfluenzaA__AFK14856
augaauccaaaccaaaagauaauaaccauugguucggucuguaugacaauuggaauggcuaacuuaauauuacaaauuggaaacauaaucucaauauggauuagccacucaauucaacuugggaaucaaaaucagauugaaacaugcaaucaaagcgucauuacuuaugaaaacaacacuuggguaaaucagacauauguuaacaucagcaacaccaacuuugcugcuggacagucagugguuuccgugaaauuagcgggcaauuccucucucugcccuguuaguggaugggcuauauacaguaaagacaacaguguaagaaucgguuccaagggggauguguuugucauaagggaaccauucauaucaugcucccccuuggaaugcagaaccuucuucuugacucaaggggccuugcuaaaugacaaacauuccaauggaaccauuaaagacaggagcccauaucgaacccuaaugagcuguccuauuggugaaguucccucuccauacaacucaagauuugagucagucgcuuggucagcaagugcuugucaugauggcaucaauuggcuaacaauuggaauuucuggcccagacaauggggcaguggcuguguuaaaguacaacggcauaauaacagacacuaucaagaguuggagaaacaauauauugagaacacaagagucugaaugugcauguguaaaugguucuugcuuuacuguaaugaccgauggaccaaguaauggacaggccucauacaagaucuucaaaauagaaaagggaaagauagucaaaucagucgaaaugaaugccccuaauuaucacuaugaggaaugcuccuguuauccugauucuagugaaaucacaugugugugcagggauaacuggcauggcucgaaucgaccgugggugucuuucaaccagaaucuggaauaucagauaggauacauaugcagugggauuuucggagacaauccacgcccuauugauaagacaggcaguugugguccaguaucgucuaauggagcaaauggaguaaaaggauuuucauucaaauacggcaaugguguuuggauagggagaacuaaaagcauuaguucaagaaacgguuuugagaugauuugggauccgaacggauggacugggacagacaauaacuucucaauaaagcaagauaucguaggaauaaaugaguggucaggauauagcgggaguuuuguucagcauccggaacuaacagggcuggauuguauaagaccuugcuucuggguugaacuaaucagagggcgacccaaagagaacacaaucuggacuagcgggagcagcauauccuuuugugguguaaacagugacacuguggguuggucuuggccagacggugcugaguugccauuuaccauugacaaguaa

SEQ ID NO: 54484 - RNA, 1410 nt, Artificial Sequence; identical to SEQ ID NO: 48750
  derived and/or modified CDS sequence (wt) from neuraminidase__InfluenzaA__AFK14870

SEQ ID NO: 54485 - RNA, 1410 nt, Artificial Sequence; identical to SEQ ID NO: 48750
  derived and/or modified CDS sequence (wt) from neuraminidase__InfluenzaA__AFK14879

SEQ ID NO: 54486 - RNA, 1410 nt, Artificial Sequence; identical to SEQ ID NO: 48750
  derived and/or modified CDS sequence (wt) from neuraminidase__InfluenzaA__AFK14885

SEQ ID NO: 54487 - RNA, 1410 nt, Artificial Sequence; identical to SEQ ID NO: 48750
  derived and/or modified CDS sequence (wt) from neuraminidase__InfluenzaA__AFK14894

SEQ ID NO: 54488 - RNA, 1410 nt, Artificial Sequence; identical to SEQ ID NO: 48750
  derived and/or modified CDS sequence (wt) from neuraminidase__InfluenzaA__AFK14903

SEQ ID NO: 54489 - RNA, 1410 nt, Artificial Sequence; identical to SEQ ID NO: 48750
  derived and/or modified CDS sequence (wt) from neuraminidase__InfluenzaA__AFK14912

SEQ ID NO: 54490 - RNA, 1410 nt, Artificial Sequence; identical to SEQ ID NO: 48750
  derived and/or modified CDS sequence (wt) from neuraminidase__InfluenzaA__AFK14921

SEQ ID NO: 54491 - RNA, 1410 nt, Artificial Sequence; identical to SEQ ID NO: 48750
  derived and/or modified CDS sequence (wt) from neuraminidase__InfluenzaA__AFK14931

SEQ ID NO: 54492 - RNA, 1410 nt, Artificial Sequence
  derived and/or modified CDS sequence (wt) from neuraminidase__InfluenzaA__AFK25604
augaauccaaaccaaaagauaauaaccauugguucggucuguaugacaauuggaauggcuaacuuaauauuacaaauuggaaacauaaucucaauauggauuagccacucaauucaacuuaggaaucaaagucagauugaaacaugcaaucaaagcgucauuacuuaugaaaacaacacuuggguaaaucagacauauguuaacaucagcaacaccaacuuugcugcuggacagucagugguuuccgugaaauuagcgggcaauuccucucucugcccuguuaguggaugggcuauauacaguaaagacaacaguauaagaaucgguuccaagggggauguguuugucauaagggaaccauucauaucaugcucccccuuggaaugcagaaccuucuucuugacccaaggggccuugcuaaaugacaaacauuccaauggaaccauuaaagacaggagcccauaucgaacccuaaugagcuguccuauuggugaaguucccucuccauacaacucaagauuugagucagucgcuuggucagcaagugcuugucaugauggcaucaauuggcuaacaauuggaauuucuggcccagacaauggggcaguggcuguguuaaaguacaacggcauaauaacagacacuaucaagaguuggagaaauaauauauugagaacacaagaaucugaaugugcauguguaaaugguucuugcuuuaccauaaugaccgauggaccaagugauggacaggccucauacaagaucuucagaauagaaaagggaaagauagucaaaucagucgaaaugaaugccccuaauuauuacuaugaggaaugcuccuguuauccugauucuagugaaaucacaugugugugcagggauaacuggcauggcucgaaucgaccgugggugucuuucaaccagaaucuggaauaucagauaggauacauaugcagugggauuuucggagacaauccacgcccuaaugauaagacaggcaguugugguccaguaucgucuaauggagcaaauggaguaaaaggauuuucauucaaauacggcaaugguguuuggauagggagaacuaaaagcauuaguucaagaaaagguuuugagaugauuugggauccaaacggauggacugggacagacaauaacuucucaauaaagcaagauaucguaggaauaaaugaguggucaggauacagcgggaguuuuguucagcauccagaacuaacagggcuggauuguauaagaccuugcuucuggguugaacuaaucagaggacgacccaaagagaacacaaucuggacuagcgggagcagcauauccuuuugugguguaaacagugacacuguggguuggucuuggccagacggugcugaguugccauuuaccauugacaaguaa

SEQ ID NO: 54493 - RNA, 1410 nt, Artificial Sequence
  derived and/or modified CDS sequence (wt) from neuraminidase__InfluenzaA__AFK25606
augaauccaaaccaaaagauaauaaccauugguucggucuguaugacaauuggaauggcuaacuuaauauuacaaauuggaaacauaaucucaauauggauuagccacucaauucaacuuaggaaucaaagucagauugaaacaugcaaucaaagcgucauuacuuaugaaaacaacacuuggguaaaucagacauauguuaacaucagcaacaccaacuuugcugcuggacagucagugguuuccgugaaauuagcgggcaauuccucucucugcccuguuaguggaugggcuauauacaguaaagacaacaguauaagaaucgguuccaagggggauguguuugucauaagggaaccauucauaucaugcucccccuuggaaugcagaaccuucuucuugacccaaggggccuugcuaaaugacaaacauuccaauggaaccauuaaagacaggagcccauaucgaacccuaaugagcuguccuauuggugaaguucccucuccauacaacucaagauuugagucagucgcuuggucagcaagugcuugucaugauggcaucaauuggcuaacaauuggaauuucuggcccagacaauggggcaguggcuguguuaaaguacaacggcauaauaacagacacuaucaagaguuggagaaauaauauauugagaacacaagaaucugaaugugcauguguaaaugguucuugcuuuaccauaaugaccgauggaccaagugauggacaggccucauacaagaucuucagaauagaaaagggaaagauagucaaaucagucgaaaugaaugccccuaauuauuacuaugaggaaugcuccuguuauccugauucuagugaaaucacaugugugugcagggauaacuggcauggcucgaaucgaccgugggugucuuucaaccagaaucuggaauaucagauaggauacauaugcagugggauuuucggagacaauccacgcccuaaugauaagacaggcaguugugguccaguaucaucuaauggagcaaauggaguaaaaggauuuucauucaaauacggcaaugguguuuggauagggagaacuaaaagcauuaguucaagaaaagguuuugagaugauuugggauccaaacggauggacugggacagacaauaacuucucaauaaagcaagauaucguaggaauaaaugaguggucaggauacagcgggaguuuuguucagcauccagaacuaacagggcuggauuguauaagaccuugcuucuggguugaacuaaucagaggacgacccaaagagaacacaaucuggacuagcgggagcagcauauccuuuugugguguaaacagugacacuguggguuggucuuggccagacggugcugaguugccauuuaccauugacaaguaa

SEQ ID NO: 54494 - RNA, 1410 nt, Artificial Sequence
  derived and/or modified CDS sequence (wt) from neuraminidase__InfluenzaA__AFK74537
augaauccaaaccaaaagauaauaaucauugguucggucuguaugacaauuggaauggcuaacuuaauauuacaaauuggaaacauaaucucaauauggauuagccacucaauucaacuugggaaucaaaaucagauugaaacaugcaaucaaagcgucauuacuuaugaaaacaacacuuggguaaaucagacauauguuaacaucagcaacaccaacuuugcugcuggacagucagugguuuccgugaaauuagcgggcaauuccucucucugcccuguuaguggaugggcuauauacaguaaagacaacaguauaagaaucgguuccaagggggauguguuugucauaagggaaccauucauaucaugcucccccuuggaaugcagaaccuucuucuugacucaaggggccuugcuaaaugacaaacauuccaauggaaccauuaaagacaggagcccauaucgaacccuaaugagcuguccuauuggugaaguucccucuccauacaacucaagauuugagucagucgcuuggucagcaagugcuugucaugauggcaucaauuggcuaacaauuggaauuucuggcccagacaauggggcaguggcuguguuaaaguacaacggcauaauaacagacacuaucaagaguuggagaaacaauauauugagaacacaagagucugaaugugcauguguaaaugguucuugcuuuacuguaaugaccgauggaccaagugauggacaggccucauacaagaucuucagaauagaaaagggaaagauagucaaaucagucgaaaugaaugccccuaauuaucacuaugaggaaugcuccuguuauccugauucuagugaaaucacaugugugugcagggauaauuggcauggcucgaaucgaccgugggugucuuucaaccagaaucuggaauaucagauaggauacauaugcagugggauuuucggagacaauccacgcccuaaugauaagacaggcaguugugguccaguaucgucuaauggagcaaauggaguaaaaggauuuucauucaaauacggcaaugguguuuggauagggagaacuaaaagcauuaguucaagaaacgguuuugagaugauuugggauccgaacggauggacugggacagacaauaacuucucaauaaagcaagauaucguaggaauaaaugaguggucaggauauagcgggaguuuuguucagcauccagaacuaacagggcuggauuguauaagaccuugcuucuggguugaacuaaucagagggcgacccaaagagaacacaaucuggacuagcgggagcagcauauccuuuugugguguaaacagugacacuguggguuggucuuggccagacggugcugaguugccauuuaccauugacaaguaa

SEQ ID NO: 54495 - RNA, 1410 nt, Artificial Sequence; identical to SEQ ID NO: 48750
  derived and/or modified CDS sequence (wt) from neuraminidase__InfluenzaA__AFK74547

SEQ ID NO: 54496 - RNA, 1410 nt, Artificial Sequence; identical to SEQ ID NO: 53882
  derived and/or modified CDS sequence (wt) from neuraminidase__InfluenzaA__AFK74557

SEQ ID NO: 54497 - RNA, 1410 nt, Artificial Sequence; identical to SEQ ID NO: 48750
  derived and/or modified CDS sequence (wt) from neuraminidase__InfluenzaA__AFK74567

SEQ ID NO: 54498 - RNA, 1410 nt, Artificial Sequence; identical to SEQ ID NO: 48750
  derived and/or modified CDS sequence (wt) from neuraminidase__InfluenzaA__AFK74578

SEQ ID NO: 54499 - RNA, 1410 nt, Artificial Sequence; identical to SEQ ID NO: 53865
  derived and/or modified CDS sequence (wt) from neuraminidase__InfluenzaA__AFK74588

SEQ ID NO: 54500 - RNA, 1410 nt, Artificial Sequence; identical to SEQ ID NO: 53866
  derived and/or modified CDS sequence (wt) from neuraminidase__InfluenzaA__AFK74598

SEQ ID NO: 54501 - RNA, 1410 nt, Artificial Sequence; identical to SEQ ID NO: 48750
  derived and/or modified CDS sequence (wt) from neuraminidase__InfluenzaA__AFK74608

SEQ ID NO: 54502 - RNA, 1410 nt, Artificial Sequence; identical to SEQ ID NO: 53869
  derived and/or modified CDS sequence (wt) from neuraminidase__InfluenzaA__AFK74618

SEQ ID NO: 54503 - RNA, 1410 nt, Artificial Sequence; identical to SEQ ID NO: 53869
  derived and/or modified CDS sequence (wt) from neuraminidase__InfluenzaA__AFK74628

SEQ ID NO: 54504 - RNA, 1410 nt, Artificial Sequence; identical to SEQ ID NO: 50013
  derived and/or modified CDS sequence (wt) from neuraminidase__InfluenzaA__AFK74638

SEQ ID NO: 54505 - RNA, 1410 nt, Artificial Sequence; identical to SEQ ID NO: 50013
  derived and/or modified CDS sequence (wt) from neuraminidase__InfluenzaA__AFK74648

SEQ ID NO: 54506 - RNA, 1410 nt, Artificial Sequence; identical to SEQ ID NO: 53874
  derived and/or modified CDS sequence (wt) from neuraminidase__InfluenzaA__AFK74658

SEQ ID NO: 54507 - RNA, 1410 nt, Artificial Sequence; identical to SEQ ID NO: 53874
  derived and/or modified CDS sequence (wt) from neuraminidase__InfluenzaA__AFK74668

SEQ ID NO: 54508 - RNA, 1410 nt, Artificial Sequence; identical to SEQ ID NO: 48750
  derived and/or modified CDS sequence (wt) from neuraminidase__InfluenzaA__AFK74678

SEQ ID NO: 54509 - RNA, 1410 nt, Artificial Sequence; identical to SEQ ID NO: 48750
  derived and/or modified CDS sequence (wt) from neuraminidase__InfluenzaA__AFK74688

SEQ ID NO: 54510 - RNA, 1410 nt, Artificial Sequence; identical to SEQ ID NO: 48750
  derived and/or modified CDS sequence (wt) from neuraminidase__InfluenzaA__AFK74698

SEQ ID NO: 54511 - RNA, 1410 nt, Artificial Sequence; identical to SEQ ID NO: 53881
  derived and/or modified CDS sequence (wt) from neuraminidase__InfluenzaA__AFK74708

SEQ ID NO: 54512 - RNA, 1410 nt, Artificial Sequence; identical to SEQ ID NO: 53882
  derived and/or modified CDS sequence (wt) from neuraminidase__InfluenzaA__AFK74718

SEQ ID NO: 54513 - RNA, 1410 nt, Artificial Sequence; identical to SEQ ID NO: 48750
  derived and/or modified CDS sequence (wt) from neuraminidase__InfluenzaA__AFK74728

SEQ ID NO: 54514 - RNA, 1410 nt, Artificial Sequence; identical to SEQ ID NO: 48750
  derived and/or modified CDS sequence (wt) from neuraminidase__InfluenzaA__AFK74738

SEQ ID NO: 54515 - RNA, 1410 nt, Artificial Sequence; identical to SEQ ID NO: 48750
  derived and/or modified CDS sequence (wt) from neuraminidase__InfluenzaA__AFK74748

SEQ ID NO: 54516 - RNA, 1410 nt, Artificial Sequence; identical to SEQ ID NO: 48750
  derived and/or modified CDS sequence (wt) from neuraminidase__InfluenzaA__AFK74758

SEQ ID NO: 54517 - RNA, 1410 nt, Artificial Sequence; identical to SEQ ID NO: 48750
  derived and/or modified CDS sequence (wt) from neuraminidase__InfluenzaA__AFK74768

SEQ ID NO: 54518 - RNA, 1410 nt, Artificial Sequence; identical to SEQ ID NO: 48750
  derived and/or modified CDS sequence (wt) from neuraminidase__InfluenzaA__AFK74778

SEQ ID NO: 54519 - RNA, 1410 nt, Artificial Sequence; identical to SEQ ID NO: 53882
  derived and/or modified CDS sequence (wt) from neuraminidase__InfluenzaA__AFK74788

SEQ ID NO: 54520 - RNA, 1410 nt, Artificial Sequence; identical to SEQ ID NO: 53882
  derived and/or modified CDS sequence (wt) from neuraminidase__InfluenzaA__AFK74798

SEQ ID NO: 54521 - RNA, 1410 nt, Artificial Sequence; identical to SEQ ID NO: 53882
  derived and/or modified CDS sequence (wt) from neuraminidase__InfluenzaA__AFK74808

SEQ ID NO: 54522 - RNA, 1410 nt, Artificial Sequence; identical to SEQ ID NO: 53882
  derived and/or modified CDS sequence (wt) from neuraminidase__InfluenzaA__AFK74818

SEQ ID NO: 54523 - RNA, 1410 nt, Artificial Sequence; identical to SEQ ID NO: 48750
  derived and/or modified CDS sequence (wt) from neuraminidase__InfluenzaA__AFK74828

SEQ ID NO: 54524 - RNA, 1410 nt, Artificial Sequence; identical to SEQ ID NO: 50706
  derived and/or modified CDS sequence (wt) from neuraminidase__InfluenzaA__AFK74838

SEQ ID NO: 54525 - RNA, 1410 nt, Artificial Sequence; identical to SEQ ID NO: 48750
  derived and/or modified CDS sequence (wt) from neuraminidase__InfluenzaA__AFK74848

SEQ ID NO: 54526 - RNA, 1410 nt, Artificial Sequence; identical to SEQ ID NO: 48750
  derived and/or modified CDS sequence (wt) from neuraminidase__InfluenzaA__AFK74898

SEQ ID NO: 54527 - RNA, 1410 nt, Artificial Sequence; identical to SEQ ID NO: 48750
  derived and/or modified CDS sequence (wt) from neuraminidase__InfluenzaA__AFK74908

SEQ ID NO: 54528 - RNA, 1410 nt, Artificial Sequence; identical to SEQ ID NO: 48750
  derived and/or modified CDS sequence (wt) from neuraminidase__InfluenzaA__AFK74918

SEQ ID NO: 54529 - RNA, 1410 nt, Artificial Sequence; identical to SEQ ID NO: 48750
  derived and/or modified CDS sequence (wt) from neuraminidase__InfluenzaA__AFK74928

SEQ ID NO: 54530 - RNA, 1410 nt, Artificial Sequence
  derived and/or modified CDS sequence (wt) from neuraminidase__InfluenzaA__AFK74938
augaauccaaaccaaaagauaauaaccauugguucggucuguaugacaauuggaauggcuaacuuaauauuacaaauuggaaacauaaucucaauauggauuagccauucaauucaacuugggaaucaaaaucagauugaaacaugcaaucaaagcgucauuacuuaugaaaacaacacuuggguaaaucagacauauguuaacaucagcaacaccaacuuugcugcuggacagucagugguuuccgugaaauuagcgggcaauuccucucucugcccuguuaguggaugggcuauauacaguaaagacaacaguauaagaaucgguuccaagggggauguguuugucauaagggaaccauucauaucaugcucccccuuggaaugcagaaccuucuucuugacucaaggggccuugcuaaaugacaaacauuccaauggaaccauuaaagacaggagcccauaucgaacccuaaugagcuguccuauuggugaaguucccucuccauacaacucaagauuugagucagucgcuuggucagcaagugcuugucaugauggcaucaauuggcuaacaauuggaauuucuggcccagacaauggggcaguggcuguguuaaaguacaacggcauaauaacagacacuaucaagaguuggagaaacaauauauugagaacacaagagucugaaugugcauguguaaaugguucuugcuuuacuguaaugaccgauggaccaagugauggacaggccucauacaagaucuucagaauagaaaagggaaagauagucaaaucagucgaaaugaaugccccuaauuaucacuaugaggaaugcuccuguuauccugauucuagugaaaucacaugugugugcagggauaacuggcauggcucgaaucgaccgugggugucuuucaaccagaaucuggaauaucagauaggauacauaugcagugggauuuucggagacaauccacgcccuaaugacaauacaggcaguugugguccaguaucgucuaauggagcaaauggaguaaaaggauuuucauucaaauacggcaaugguguuuggauagggagaacuaaaagcauuaguucaagaaacgguuuugagaugauuugggauccgaacggauggacugggacagacaauaacuucucaauaaagcaagauaucguaggaauaaaugaguggucaggauauagcgggaguuuuguucagcauccagaacuaacagggcuggauuguauaagaccuugcuucuggguugaacuaaucagagggcgacccaaagagaacacaaucuggacuagcgggagcagcauauccuuuugugguguaaacagugacacuguggguuggucuuggccagacggugcugaguugccauuuaccauugacaaguaa

SEQ ID NO: 54531 - RNA, 1410 nt, Artificial Sequence; identical to SEQ ID NO: 48750
  derived and/or modified CDS sequence (wt) from neuraminidase__InfluenzaA__AFK74948

SEQ ID NO: 54532 - RNA, 1410 nt, Artificial Sequence; identical to SEQ ID NO: 50706
  derived and/or modified CDS sequence (wt) from neuraminidase__InfluenzaA__AFK74958

SEQ ID NO: 54533 - RNA, 1410 nt, Artificial Sequence; identical to SEQ ID NO: 53882
  derived and/or modified CDS sequence (wt) from neuraminidase__InfluenzaA__AFK74968

SEQ ID NO: 54534 - RNA, 1410 nt, Artificial Sequence; identical to SEQ ID NO: 53908
  derived and/or modified CDS sequence (wt) from neuraminidase__InfluenzaA__AFK74978

SEQ ID NO: 54535 - RNA, 1410 nt, Artificial Sequence; identical to SEQ ID NO: 53909
  derived and/or modified CDS sequence (wt) from neuraminidase__InfluenzaA__AFK74988

SEQ ID NO: 54536 - RNA, 1410 nt, Artificial Sequence; identical to SEQ ID NO: 48750
  derived and/or modified CDS sequence (wt) from neuraminidase__InfluenzaA__AFK74998

SEQ ID NO: 54537 - RNA, 1410 nt, Artificial Sequence; identical to SEQ ID NO: 53912
  derived and/or modified CDS sequence (wt) from neuraminidase__InfluenzaA__AFK75008

SEQ ID NO: 54538 - RNA, 1410 nt, Artificial Sequence; identical to SEQ ID NO: 48750
  derived and/or modified CDS sequence (wt) from neuraminidase__InfluenzaA__AFK75018

SEQ ID NO: 54539 - RNA, 1410 nt, Artificial Sequence; identical to SEQ ID NO: 48750
  derived and/or modified CDS sequence (wt) from neuraminidase__InfluenzaA__AFK75028

SEQ ID NO: 54540 - RNA, 1410 nt, Artificial Sequence; identical to SEQ ID NO: 48750
  derived and/or modified CDS sequence (wt) from neuraminidase__InfluenzaA__AFK75038

SEQ ID NO: 54541 - RNA, 1410 nt, Artificial Sequence; identical to SEQ ID NO: 48750
  derived and/or modified CDS sequence (wt) from neuraminidase__InfluenzaA__AFK75048

SEQ ID NO: 54542 - RNA, 1410 nt, Artificial Sequence; identical to SEQ ID NO: 48750
  derived and/or modified CDS sequence (wt) from neuraminidase__InfluenzaA__AFK75058

SEQ ID NO: 54543 - RNA, 1410 nt, Artificial Sequence; identical to SEQ ID NO: 53882
  derived and/or modified CDS sequence (wt) from neuraminidase__InfluenzaA__AFK75068

SEQ ID NO: 54544 - RNA, 1410 nt, Artificial Sequence; identical to SEQ ID NO: 53920
  derived and/or modified CDS sequence (wt) from neuraminidase__InfluenzaA__AFK75078

SEQ ID NO: 54545 - RNA, 1410 nt, Artificial Sequence; identical to SEQ ID NO: 48750
  derived and/or modified CDS sequence (wt) from neuraminidase__InfluenzaA__AFK75088

SEQ ID NO: 54546 - RNA, 1410 nt, Artificial Sequence; identical to SEQ ID NO: 48750
  derived and/or modified CDS sequence (wt) from neuraminidase__InfluenzaA__AFK75098

SEQ ID NO: 54547 - RNA, 1410 nt, Artificial Sequence; identical to SEQ ID NO: 53863
  derived and/or modified CDS sequence (wt) from neuraminidase__InfluenzaA__AFK75108

SEQ ID NO: 54548 - RNA, 1410 nt, Artificial Sequence
  derived and/or modified CDS sequence (wt) from neuraminidase__InfluenzaA__AFK77860
augaauccaaaccaaaagauaauaaccauugguucggucuguaugacaauuggaauggcuaacuuaauauuacaaauuggaaacauaaucucaauauggauuagccacucaauucaacuugggaaucaaaaucagauugaaacaugcaaucaaagcgucauuacuuaugaaaacaacacuuggguaaaucagacauauguuaacaucagcaacaccaacuuugcugcuggacagucagugguuuccgugaaauuagcgggcaauuccucucucugcccuguuaguggaugggcuauauacaguaaagacaacaguauaagaaucgguuccaagggggauguguuugucauaagggaaccauucauaucaugcucccccuuggaaugcagaaccuucuucuugacucaaggggccuugcuaaaugacaaacauuccaauggaaccauuaaagacaggagcccauaucgaacccuaaugagcuguccuauuggugaaguucccucuccauacaacucaagauuugagucagucgcuuggucagcaagugcuugucaugauggcaucaauuggcuaacaauuggaauuucuggcccagacaauggggcaguggcuguguuaaaguacaacggcauaauaacagacacuaucaaaaguuggagaaacaauauauugagaacacaagagucugaaugugcauguguaaaugguucuugcuuuacuguaaugaccgauggaccaagugauggacaggccucauacaagaucuucagaauagaaaagggaaagauagucaaaucggucgaaaugaaugccccuaauuaucacuaugaggaaugcuccuguuauccugauucuagugaaaucacaugugugugcagggauaacuggcauggcucgaaucgaccgugggugucuuucaaccagaaucuggaauaucagauaggauacauaugcagugggauuuucggagacaauccacgcccuaaugauaagacaggcaguugugguccaguaucgucuaauggagcaaauggaguaaaaggauuuucauucaaauacggcaaugguguuuggauagggagaacuaaaagcauuaguucaagaaacgguuuugagaugauuugggauccgaacggauggacugggacagacaauaacuucucaauaaagcaagauaucguaggaauaaaugaauggucaggauauagcgggaguuuuguucagcauccagaacuaacagggcuggauuguauaagaccuugcuucuggguugaacuaaucagagggcgacccaaagagaacacaaucuggacuagcgggagcagcauauccuuuugugguguaaacagugacacuguggguuggucuuggccagacggugcugaguugccauuuaccauugacaaguaa

SEQ ID NO: 54549 - RNA, 1410 nt, Artificial Sequence; identical to SEQ ID NO: 49794
  derived and/or modified CDS sequence (wt) from neuraminidase__InfluenzaA__AFK77870

SEQ ID NO: 54550 - RNA, 1410 nt, Artificial Sequence; identical to SEQ ID NO: 50311
  derived and/or modified CDS sequence (wt) from neuraminidase__InfluenzaA__AFK77880

SEQ ID NO: 54551 - RNA, 1410 nt, Artificial Sequence
  derived and/or modified CDS sequence (wt) from neuraminidase__InfluenzaA__AFK77890
augaauccaaaccaaaagauaauaaccauugguucggucuguaugacaauuggaauggcuaacuuaauauuacaaauuggaaacauaaucucaauauggauuagccacucaauucaacuugggaaucaaaaucagauugaaacaugcaaucaaagcgucauuacuuaugaaaacaacacuuggguaaaucagacauauguuaacaucagcaacaccaacuuugcugcuggacagucagugguuuccgugaaauuagcgggcaauuccucucucugcccuguuaguggaugggcuauauacaguaaagacaacaguauaagaaucgguuccaagggggauguguuugucauaagggaaccauucauaucaugcucccccuuggaaugcagaaccuucuucuugacucaaggggcccugcuaaaugacaaacauuccaauggaaccauuaaagacaggagcccauaucgaacccuaaugagcuguccuauuggugaaguucccucuccguacaacucaagauuugagucagucgcuuggucagcaagugcuugucaugauggcaucaauuggcuaacaauuggaauuucuggcccagacaauggggcaguggcuguguuaaaguacaacggcauaauaacagacacuaucaagaguuggagaaacaauauauugagaacacaagagucugaaugugcauguguaaaugguucuugcuuuacuguaaugaccgauggaccaagugauggacaggccucauacaagaucuucagaauagaaaagggaaagauagucaaaucagucgaaaugaaugccccuaauuaucacuaugaggaaugcuccuguuauccugauucuagugaaaucacaugugugugcagggauaacuggcauggcucgaaucgaccgugggugucuuucaaccagaaucuggaauaucagauaggauacauaugcagugggauuuucggagacaauccacgcccuaaugauaagacaggcaguugugguccaguaucgucuaauggagcaaauggaguaaaaggauuuucauucaaauacggcaaugguguuuggauagggagaacuaaaggcauuaguucaagaaacgguuuugagaugauuugggauccgaacggauggacugggacagacaauaacuucucaauaaagcaagauaucguaggaauaaaugaguggucaggauauagcgggaguuuuguucagcauccagaacuaacagggcuggauuguauaagaccuugcuucuggguugaacuaaucagagggcgacccaaagagaacacaaucuggacuagcgggagcagcauauccuuuugugguguaaacagugacacuguggguuggucuuggccagacggugcugaguugccauuuaccauugacaaguaa

SEQ ID NO: 54552 - RNA, 1410 nt, Artificial Sequence
  derived and/or modified CDS sequence (wt) from neuraminidase__InfluenzaA__AFK77900
augaauccaaaccaaaagauaauaaccauugguucggucuguaugacaauuggaauggcuaacuuaauauuacaaauuggaaacauaaucucaauauggauuagccacucaauucaaauugggaaucaaaaucagauugaaacaugcaaucaaagcgucauuacuuaugaaaacaacacuuggguaaaucagacauauguuaacaucagcaacaccaacuuugcugcuggacagucaguggcuuccgugaaauuagcgggcaauuccucucucugcccuguuaguggaugggcuauauacaguaaagacaacaguauaagaaucgguuccaagggggauguguuugucauaagggaaccauucauaucaugcucccccuuggaaugcagaaccuucuucuugacucaaggggcuuugcuaaaugacaaacauuccaauggaaccauuaaagacaggagcccauaucgagcccuaaugagcuguccuauuggugaaguucccucuccauacaacucaagauuugagucagucgcuuggucagcaagugcuugucaugauggcaucaauuggcuaacaauuggaauuucuggcccagacaauggggcaguggcuguguuaaaauacaacggcauaauaacagacacuaucaagaguuggagaaacaauauauugagaacacaagagucugaaugugcauguguaaaugguucuugcuuuaccauaaugaccgauggaccaagugauggacaggccucauacaagaucuucagaauagaaaagggaaagauagucaaaucagucgaaaugaaugccccuaauuaucacuaugaggaaugcuccuguuauccugauucuagugaaaucacaugugugugcagggauaacuggcauggcucgaaucgaccgugggugucuuucaaccagaaucuggaauaucagauaggauacauaugcagugggauuuucggagacaauccacgcccuaaugauaagacaggcaguugugguccaguaucgucuaauggagcaaauggaguaaaaggauuuucauucaaauacggcaaugguguuuggauagggagaacuaaaagcauuaguucaagaaaagguuuugagaugauuugggauccaaacggauggacugggacagacaauaacuucucaauaaagcaagauaucguaggaaugaaugaguggucaggauauagcgggaguuuuguucagcacccagaacuaacaggacuggauuguauaagaccuugcuucuggguugaacuaaucagagggcgacccaaagagaacacaaucuggacuagcgggagcagcauauccuuuugugguguaaacagugacacuguggguuggucuuggccagacggugcugaguugccauuuaccauugacaaguaa

SEQ ID NO: 54553 - RNA, 1410 nt, Artificial Sequence
  derived and/or modified CDS sequence (wt) from neuraminidase__InfluenzaA__AFK78031
augaauccaaaccaaaagauaauaaccauugguucggucuguaugacaauuggaauggcuaacuuaauauuacaaauuggaaacauaaucucaauauggauuagccacucaauucaacuugggaaucaaaaucagauugaaacaugcaaucaaagcgucauuacuuaugaaaacaacacuuggguaaaucagacauauguuaacaucagcaacaccaacuuugcugcuggacagucaguggcuuccgugaaauuagcgggcaauuccucucucugcccuguuaguggaugggcuauauacaguaaagacaacaguauaagaaucgguuccaagggggauguguuugucauaagggaaccauucauaucaugcucccccuuggaaugcagaaccuucuucuugacucaaggggcuuugcuaaaugacaaacauuccaauggaaccauuaaagacaggagcccauaucgagcccuaaugagcuguccuauuggugaaguucccucuccauacaacucaagauuugagucagucgcuuggucagcaagugcuugucaugauggcaucaauuggcuaacaauuggaauuucuggcccagacaauggggcaguggcuguguuaaaguacaacggcauaauaacagacacuaucaagaguuggagaaacaauauauugagaacacaagagucugaaugugcauguguaaaugguucuugcuuuaccauaaugaccgauggaccaagugauggacaggccucauacaagaucuucagaauagaaaagggaaagauagucaaaucagucgaaaugaaugccccuaauuaucacuaugaggaaugcuccuguuauccugauucuagugaaaucacaugugugugcagggauaacuggcauggcucgaaucgaccgugggugucuuucaaccagaaucuggaauaucagauaggauacauaugcagugggauuuucggagacaacccacgcccuaaugauaagacaggcaguugugguccaguaucgucuaauggagcaaauggaguaaaaggauuuucauucaaauacggcaaugguguuuggauagggagaacuaaaagcauuaguucaagaaaagguuuugagaugauuugggauccaaacggauggacugggacagacaauaacuucucaauaaagcaagauaucguaggaaugaaugaguggucaggauauagcgggaguuuuguucagcauccagaacuaacaggacuggauuguauaagaccuugcuucuggguugaacuaaucagagggcgacccaaagagaacacaaucuggacuagcgggagcagcauauccuuuugugguguaaacagugacacuguggguuggucuuggccagacggugcugaguugccauuuaccauugacaaguaa

SEQ ID NO: 54554 - RNA, 1410 nt, Artificial Sequence; identical to SEQ ID NO: 49794
  derived and/or modified CDS sequence (wt) from neuraminidase__InfluenzaA__AFK78190

SEQ ID NO: 54555 - RNA, 1362 nt, Artificial Sequence
  derived and/or modified CDS sequence (wt) from neuraminidase__InfluenzaA__AFM68957
augaauccaaaccagaaaauaauaaccauuggaucaaucuguaugguagucggaauaaucagccuaauauugcaaauagggaauauaaucucaauauggauuagccauucaauucaaaccggaaaucaaaaccauacuggaauaugcaaccaaggcaucauuacccauaacguuguugcugggcaggacucaacuucagugauauuaaccggcaauucaucucuuugucccauccgugggugggcuauacacagcaaagacaauggcauaagaauugguuccaaaggagacguuuuugucauaagagagccuuuuauuucauguucucacuuggaaugcaggaccuuuuuucugacucaaggcgccuuacugaaugacaagcauucauaugggaccucuaaggacagaagcccuuauagggccuuaaugagcugcccugucggugaagcuccguccccguacaauucaagguuugaaucgguugcuuggucagcaagugcaugucaugauggcaugggcuggcuaacaaucggaauuucugguccagauaauggagcaguggcuguauuaaaauacaacggcauaauaacugaaaccauaaaaaguuggaggaagaaaauauugagaacacaagagucugaauguaccuguguaaaugguucauguuuuaccauaaugaccgauggcccaagugaugggcuggccucguacaaaauuuucaagaucgagaaggggaagguuacuaaaucaauagaguugaaugcaccuaauucucacuacgaggaauguuccuguuacccugauaccggcaaagugaugugugugugcagagacaauuggcacgguucgaaccgaccauggguguccuucgaccaaaaccuagauuaucaaauaggauacaucugcagugggguuuucggugacaacccgcgucccaaagauggaacaggcagcuguggcccagugucugcugauggagcaaacggaguaaagggauuuucauauagguaugguaaugguguuuggauaggaaggacuaaaagugacaguuccagacauggguuugagaugauuugggauccuaauggauggacagagacugauaguagguucucugugagacaagauguuguggcaaugacugaucggucaggguacagcggaaguuucguucaacauccugagcuaacagggcuagacuguaugaggccuugcuucuggguugaauuaaucagaggacaaccugaggaggaaacaaucuggacuagugggagcaucauuucuuuuuguggcgugaauagugauacuguagauuggucuuggccagacggugcugaguugccguucaccauugacaaguag

SEQ ID NO: 54556 - RNA, 1410 nt, Artificial Sequence
  derived and/or modified CDS sequence (wt) from neuraminidase__InfluenzaA__AFM68968
augaauccaaaucaaaagauaauaacaauugguucugucucucucaccauugcaacaauaugcuuccucaugcaaauugccauccugguaacuacuguaacauugcauuucaagcaauaugagugcgacucccccgcaaacaaccaaguaaugccgugugaaccaauaauaauagaaaggaacauaacagagauaguguauuugacuaacaccaccauagagaaagagauaugccccaaauuaguggaauacagaaauuggucaaagccgcaauguaaaauuacaggauuugcaccuuuuucuaaggacaauucaauucggcuuucugcugguggggacauuugggugacgagagaaccuuaugugucaugcgauccuggcaaguguuaucaauuugcacucgggcaggggaccacacuagacaacaagcauucaaaugacacaauacaugauagaaccccucaucgaacccuauugaugaaugaguuggguguuccauuucauuugggaaccaggcaaguguguauagcaugguccagcucaaguugucacgauggaaaagcauggcugcauguuugugucacuggguaugauaaaaaugcaacugcuagcuucauuuacgaugggaggcuuguagacaguauugguucauggucuaaaaauauccucaggacccaggagucggaaugcguuuguaucaaugggacuuguacaguaguaaugacugauggaagugcuucagaaagagcugauacuaaaauacuauucauugaagaggggaaaauuguucauauuagcccauugucaggaagugcucagcauguagaggaguguuccuguuauccucgauauccuggugucagaugugucugcagagacaacuggaaaggcucuaauaggcccaucguagauauaaaugugaaagauuauagcauugcuuccaguuaugugugcucagggcuuguuggcgacacacccagaaaaaacgacagaucuagcaguagcuauugccggaauccuaacaaugagaaagggaaucauggagugaaaggcugggccuuugacgauggaaaugacguguggaugggaagaacgaucagcgaggagucacgcucagguuaugaaaccuucaaagucauuggugguugguccacaccuaauuccaaauugcagauaaauaggcaagucauaguugacagcgauaauagguccgguuauucugguauuuucucuguugagggcaaaagcugcaucaauaggugcuuuuauguggaguugauaaggggaagggaacaggaaacuagagucugguggaccucaaacaguauuguuguguuuuguggcacuucagguaccuaugggacaggcucauggccugauggagcggacaucaaucucaugccuauauaa

SEQ ID NO: 54557 - RNA, 1410 nt, Artificial Sequence
  derived and/or modified CDS sequence (wt) from neuraminidase__InfluenzaA__AFM68979
augaauccaaaucaaaagauaauaacaauuggcucugucucucucaccauugcaacaauaugcuuccuuaugcaaauugccauccugguaacuacuguaacauugcauuucaagcaauaugagugcagcucccccccaaacaaccaaguaaugccgugugaaccaauaauaauagaaagaaacauaacagagauaguguauuugacuaacaccaccauagagaaagagauaugccccaaauuaguggaauacagaaauuggucaaagccgcaauguaaaauuacaggauuugcaccuuuuucuaaggacaauucaauucggcuuucugcuggugggggcauuugggugacgagagaaccuuaugugucaugcgauccuggcaaguguuaucaauuugcacucgggcaggggaccacacuagacaacaagcauucaaaugacacaauacaugauaggaccccuuaucgaacccuauugaugaaugaguuggguguuccauuucauuugggaaccaggcaaguguguauagcaugguccagcucaaguugucacgauggaaaagcauggcugcauguuugugucacuggguaugauaaaaaugcaacugcuagcuucauuuacgaugggaggcuuguagacaguauugguucaugguccaaaaauauccucaggacccaggagucggaaugcguuuguaucaaugggacuuguacaguaguaaugacugauggaagugcuucagaaagagcugauacuaaaauacuauucauugaagaggggaaaaucguucauauuagcccauugucaggaagugcucagcauguagaggaguguuccuguuauccucgauauccuggugucagaugugucugcagagacaacuggaaaggcuccaauaggcccgucguagauauaaaugugaaagauuauagcauuguuuccaguuaugugugcucagggcuuguuggcgacacacccagaaaaaacgacagaucuagcaguagcuauugccggaauccuaacaaugagaaagggaaucauggagugaaaggcugggccuuugacgauggaaaugacguguggaugggaagaacgaucagcgaggagucacgaucagguuaugaaaccuucaaagucauuggugguugguccacaccuaauuccaaauugcagauaaauaggcaagucauaguugacagcgauaauagguccgguuauucugguauuuucucuguugagggcaaaagcugcaucaauaggugcuuuuauguggaguugauaaggggaagggaacaggaaacuagagucugguggaccucaaacaguauuguuguguuuuguggcacuucagguaccuauggaacaggcucauggccugauggagcggacaucaaucucaugccuauauaa

SEQ ID NO: 54558 - RNA, 1410 nt, Artificial Sequence; identical to SEQ ID NO: 54557
  derived and/or modified CDS sequence (wt) from neuraminidase__InfluenzaA__AFM68990

SEQ ID NO: 54559 - RNA, 1410 nt, Artificial Sequence; identical to SEQ ID NO: 54021
  derived and/or modified CDS sequence (wt) from neuraminidase__InfluenzaA__AFM71723

SEQ ID NO: 54560 - RNA, 1410 nt, Artificial Sequence; identical to SEQ ID NO: 54147
  derived and/or modified CDS sequence (wt) from neuraminidase__InfluenzaA__AFM71734

SEQ ID NO: 54561 - RNA, 1410 nt, Artificial Sequence; identical to SEQ ID NO: 53961
  derived and/or modified CDS sequence (wt) from neuraminidase__InfluenzaA__AFM71745

SEQ ID NO: 54562 - RNA, 1410 nt, Artificial Sequence
  derived and/or modified CDS sequence (wt) from neuraminidase__InfluenzaA__AFM71771
augaauccaaaucaaaagauaauaacgauuggcucuguuucucucaccauuuccacaauaugcuucuuuaugcaaauugccaucuugauaacuacuguaacauugcauuucaagcaauaugaauucaacucccccccaaacaaccaagugaugcugugugaaccaacaauaauagaaaaaaauauaacagagauaguguaucugaccaacaccaccauagagaaggaaauaugccccaaacuagcagaauacagaaauuggucaaagccgcaaugugacauuacaggguuugcaccuuuuucuaaggacaauucgauuaggcuuuccgcugguggggacaucugggugacaagagaaccuuaugugucaugcgauccugacaaguguuaucaauuugcccuuggacagggaacaacacuaaacaacguacauucaaauaacacaguacgugauaggaccccuuaucggacccuauugaugaaugaguuagguguuccuuuucaucuggggaccaagcaagugugcauagcaugguccagcucaaguugucacgauggaaaagcauggcugcauguuuguauaacgggggaugauaaaaaugcaacugcuagcuucauuuacaaugggaggcuuguagauaguguuguuucaugguccaaagaaauccucaggacccaggagucagaaugcguuuguaucaauggaacuuguacaguaguaaugacugaugggagugcuucaggaaaagcugauacuaaaauacuauucauugaggaggggaaaaucguucauacuagcacauugucaggaagugcucagcaugucgaggagugcuccugcuauccucgauauccuggugucagaugugucugcagagacaacuggaaaggauccaauaggcccaucguagauauaaacauaaaggaucauagcauugucuccaguuauguguguucaggacuuguuggagacacacccagaaaaaacgacagcuccagcaguagccauuguuuggauccuaacaaugaggaagguggucauggggugaaaggcugggccuuugaugauggaaaugacguguggaugggaagaacgaucagcgagaagucacgcuuaggguaugaaaccuucaaagucauugaaggcugguccaacccuaaguccaaauugcagauaaauaggcaagucauaguugacagagguaauagguccgguuauucugguauuuucucuguugaaggcaaaagcugcaucaaucggugcuuuuauguggaguugauaaggggaagaaaagaggaaacugaagucuuguggaccucaaacaguauuguuguguuuuguggcaccucagguacauauggaacaggcucauggccugauggggcggacaucaaucucaugccuauauaa

SEQ ID NO: 54563 - RNA, 1410 nt, Artificial Sequence
  derived and/or modified CDS sequence (wt) from neuraminidase__InfluenzaA__AFM71782
augaauccaaaucaaaagauaauaacgauuggcucuguuucucucaccauuuccacaauaugcuucuucaugcaaauugccaucuugauaacuacuguaacauugcauuucaagcaauaugaauucaacucccccccaaacaaccaagugaugcugugugaaccaacaauaauagaaagaaacauaacagagauaguguaucugaccaacaccaccauagagaaggaaauaugccccaaacuagcagaauacagaaauuggucaaagccgcaaugugacauuacaggguuugcaccuuuuucuaaggacaauucgauuaggcuuuccgcugguggggacaucugggugacaagagaaccuuaugugucaugcgauccugacaaguguuaucaauuugcccuuggacagggaacaacacuaaacaacguacauucaaauaacacaguacgugauaggaccccuuaucggacccuauugaugaaugaguuagguguuccuuuucaucuggggaccaagcaagugugcauagcaugguccagcucaaguugucacgauggaaaagcauggcugcauguuuguauaacgggggaugauaaaaaugcaacugcuagcuucauuuacaaugggaggcuuguagauaguguuguuucaugguccaaagaaauccucaggacccaggagucagaaugcguuuguaucaauggaacuuguacaguaguaaugacugaugggagugcuucaggaaaagcugauacuaaaauauuauucauugaggagggaaaaaucguucauacuagcacauugucaggaagugcucagcaugucgaggagugcuccugcuauccucgauauccuggugucagaugugucugcagagacaacuggaaaggauccaauaggcccaucguagauauaaacauaaaggaucauaguauugucuccaguuauguguguucaggacuuguuggagacacacccagaaaaaacgacagcuccagcaguagccauuguuuggauccuaacaaugaggaagguggucauggggugaaaggcugggccuuugaugauggaaaugacguguggaugggaagaacgaucagcgagaagucacgcuuaggguaugaaaccuucaaagucauugaaggcugguccaacccuaaguccaaauugcagauaaauaggcaagucauaguugacagagguaauagguccgguuauucugguauuuucucuguugaaggcaaaagcugcaucaaucggugcuuuuauguggaguugauaaggggaagaaaagaggaaacugaagucuuguggaccucaaacaguauuguuguguuuuguggcaccucagguacauauggaacaggcucauggccugauggggcggacaucaaucucaugccuguauaa

SEQ ID NO: 54564 - RNA, 1410 nt, Artificial Sequence
  derived and/or modified CDS sequence (wt) from neuraminidase__InfluenzaA__AFM71794
augaauccaaaucaaaagauaauaacgauuggcucuguuucucucaccauuuccacaauaugcuucuucaugcaaauugccaucuugauaacuacuguaacauugcauuucaagcaauaugaauucaacucccccccaaacaaccaagugaugcugugugaaccaacaauaauagaaagaaacauaacagagauaguguaucugaccaacaccaccauagagaaggaaauaugccccaaacuagcagaauacagaaauuggucaaagccgcaaugugacauuacaggguuugcaccuuuuucuaaggacaauucgauuaggcuuuccgcugguggggacaucugggugacaagagaaccuuaugugucaugcgauccugacaaguguuaucaauuugcccuuggacagggaacaacacuaaacaacguacauucaaauaacacaguacgugauaggaccccuuaucggacccuauugaugaaugaguuagguguuccuuuucauuuggggaccaagcaagugugcauagcaugguccagcucaaguugucacgauggaaaagcauggcugcauguuuguauaacgggggaugauaaaaaugcaacugcuagcuucauuuacaaugggaggcuuguagauaguguuguuucaugguccaaagaaauccucaggacccaggagucagaaugcguuuguaucaauggaacuuguacaguaguaaugacugaugggagugcuucaggaaaagcugauacuaaaauauuauucauugaggagggaaaaaucguucauacuagcacauugucaggaagugcucagcaugucgaggagugcuccugcuauccucgauauccuggugucagaugugucugcagagacaacuggaaaggauccaauaggcccaucguagauauaaacauaaaggaucauaguauugucuccaguuauguguguucaggacuuguuggagacacacccagaaaaaacgacagcuccagcaguagccauuguuuggauccuaacaaugaggaagguggucauggggugaaaggcugggccuuugaugauggaaaugacguguggaugggaagaacgaucagcgagaagucacgcuuaggguaugaaaccuucaaagucauugaaggcugguccaacccuaaguccaaauugcagauaaauaggcaagucauaguugacagagguaauagguccgguuauucugguauuuucucuguugaaggcaaaagcugcaucaaucggugcuuuuauguggaguugauaaggggaagaaaagaggaaacugaagucuuguggaccucaaacaguauuguuguguuuuguggcaccucagguacauauggaacaggcucauggccugauggggcggacaucaaucucaugccuguauaa

SEQ ID NO: 54565 - RNA, 1410 nt, Artificial Sequence; identical to SEQ ID NO: 49470
  derived and/or modified CDS sequence (wt) from neuraminidase__InfluenzaA__AFM71805

SEQ ID NO: 54566 - RNA, 1410 nt, Artificial Sequence
  derived and/or modified CDS sequence (wt) from neuraminidase__InfluenzaA__AFM71827
augaauccaaaucaaaagauaauaacgauuggcucuguuucucucaccauuuccacaauaugcuucuucaugcaaauugccaucuugauaacuacuguaacauugcauuucaagcaauaugaauucaacucccccccaaacaaccaagugaugcugugugaaccaacaauaauagaaagaaauauaacagagauaguguaucugaccaacaccaccauagagaaggaaauaugccccaaacuagcagaauacagaaauuggucaaagccgcaaugugacauuacaggguuugcaccuuuuucuaaggacaauucgauuaggcuuuccgcugguggggacaucugggugacaagagaaccuuaugugucaugcgauccugacaaguguuaucaauuugcccuuggacagggaacaacacuaaacaacguacauucaaauaacacaguacgugauaggaccccuuaucggacccuauugaugaaugaguuagguguuccuuuucaucuggggaccaagcaagugugcauagcaugguccagcucaaguugucacgauggaaaagcauggcugcauguuuguauaacgggggaugauaaaaaugcaacugcuagcuucauuuacaaugggaggcuuguagauaguguuguuucaugguccaaagaaauccucaggacccaggagucagaaugcguuuguaucaauggaacuuguacaguaguaaugacugaugggagugcuucaggaaaagcugauacuaaaauacuauucauugaggaggggaaaaucguucauacuagcacauugucaggaagugcucagcaugucgaggagugcuccugcuauccucgauauccuggugucagaugugucugcagagacaacuggaaaggauccaauaggcccaucguagauauaaacauaaaggaucauagcauugucuccaguuauguguguucaggacuuguuggagacacacccagaaaaaacgacagcuccagcaguagccauuguuuggauccuaacaaugaggaagguggucauggggugaaaggcugggccuuugaugauggaaaggacguguggaugggaagaacgaucagcgagaagucacgcuuaggguaugaaaccuucaaagucauugaaggcugguccaacccuaaguccaaauugcagauaaauaggcaagucauaguugacagagguaauagguccgguuauucugguauuuucucuguugaaggcaaaagcugcaucaaucggugcuuuuauguggaguugauaaggggaagaaaagaggaaacugaaguuuuguggaccucaaacaguauuguuguguuuuguggcaccucagguacauauggaacaggcucauggccugauggggcggacaucaaucucaugccuauauaa

SEQ ID NO: 54567 - RNA, 1410 nt, Artificial Sequence
  derived and/or modified CDS sequence (wt) from neuraminidase__InfluenzaA__AFM71838
augaauccaaaucaaaagauaauaacgauuggcucuguuucucucaccauuuccacaauaugcuucuucaugcaaauugccaucuugauaacuacuguaacauugcauuucaagcaauaugaauucaacucccccccaaacaaccaagugaugcugugugaaccaacaauaauagaaagaaacauaacagagauaguguaucugaccaacaccaccauagagaaggaaauaugccccaaacuagcagaauacagaaauuggucaaaaccgcaaugugacauuacaggauuugcaccuuuuucuaaggacaauucgauuaggcuuuccgcugguggggacaucugggugacaagagaaccuuaugugucaugcgauccugacaaguguuaucaauuugcccuuggacagggaacaacacuaaacaacgugcauucaaauaacacaguacgugauaggaccccuuaucggacccuauugaugaaugaguuaggugugccuuuucaucuggggaccaagcaagugugcauagcaugguccagcucaaguugucacgauggaaaagcauggcugcauguuuguauaacgggggaugauaaaaaugcaacugcuagcuucauuuacaaugggaggcuuguagauaguguuguuucaugguccaaagaaauucucaggacccaggagucagaaugcguuuguaucaauggaacuuguacaguaguaaugacugauggaagugcuucaggcaaagcugauacuaaaauacuauucauugaggaggggaaaaucguucauacuagcacauugucaggaagugcucagcaugucgaggaaugcucuugcuauccucgauauccuggugucagaugugucugcagagacaacuggaaaggcuccaauaggcccaucguagauauaaacauaaaggaucauagcauuguuuccaguuauguguguucaggacuuguuggagacacacccagaaaaaacgacagcuccagcaguagccauuguuuggauccuaacaaugaagaagguggucauggagugaaaggcugggccuuugaugauggaaaugacguguggaugggaagaacaaucaacgagacgucacgcuuaggguaugaaaccuucaaagucauugaaggcugguccaacccuaaguccaaauugcagauaaauaggcaagucauaguugacagagguaauagguccgguuauucugguauuuucucuguugaaggcaaaagcugcaucaaucggugcuuuuauguggaguugauuaggggaagaaaagaggaaacugaagucuuguggaccucaaacaguauuguuguguuuuguggcaccucagguacauauggaacaggcucauggccugauggggcggaccucaaucucaugccuauauaa

SEQ ID NO: 54568 - RNA, 1365 nt, Artificial Sequence; identical to SEQ ID NO: 47731
  derived and/or modified CDS sequence (wt) from neuraminidase__InfluenzaA__AFM71849

SEQ ID NO: 54569 - RNA, 1410 nt, Artificial Sequence; identical to SEQ ID NO: 46119
  derived and/or modified CDS sequence (wt) from neuraminidase__InfluenzaA__AFM71860

SEQ ID NO: 54570 - RNA, 1410 nt, Artificial Sequence; identical to SEQ ID NO: 48467
  derived and/or modified CDS sequence (wt) from neuraminidase__InfluenzaA__AFM71871

SEQ ID NO: 54571 - RNA, 1410 nt, Artificial Sequence; identical to SEQ ID NO: 48467
  derived and/or modified CDS sequence (wt) from neuraminidase__InfluenzaA__AFM71882

SEQ ID NO: 54572 - RNA, 1410 nt, Artificial Sequence
  derived and/or modified CDS sequence (wt) from neuraminidase__InfluenzaA__AFM71893
augaauccaaaucaaaagauaauaacaauuggcucugucucucucaccauugcaacaguaugcuuccucaugcagauugccauccuggcaacuacugugacauugcauuuuaaacaacaugagugcgacucccccgcgagcaaccaaguaaugccaugugaaccaauaauaauagaaaggaacauaacagagauaguguauuugaauaacaccaccauagaaaaagagauuugccccgaaguaguggaauacagaaauuggucaaagccgcaaugucaaauuacaggauuugcaccuuuuucuaaggacaauucaauccggcugucugcugguggggacauuugggugacgagagaaccuuaugugucaugcgacccuggcaaguguuaucaauuugcacucgggcaggggaccacacuagacaacaaacauucaaauggcacaauacaugauagaaucccucaccgaacccuauuaaugaaugaguuggguguuccauuucauuuaggaaccaaacaaguguguguagcaugguccagcucaaguugucacgauggaaaagcaugguugcauguuugugucacuggggaugauagaaaugcgacugcuagcuucauuuaugacgggaggcuuguggacaguauugguucauggucucaaaauauccucaggacccaggagucggaaugcguuuguaucaaugggacuugcacaguaguaaugacugauggaagugcaucaggaagagccgauacuagaauacuauucauuaaagaggggaaaauuguccauauuagcccauugucaggaagugcucagcauauagaggaguguuccuguuacccucgauauccugacguaagauguaucugcagagacaacuggaaaggcucuaauaggcccguuauagacauaaauauggaagauuauagcauugauuccaguuaugugugcucagggcuuguuggcgacacacccaggaacgacgacagcucuagcaauagcaauugcagggauccuaacaaugaaagagggaauccaggagugaaaggcugggccuuugacaauggagaugauguauggaugggaagaacaaucaacaaagaaucacgcucagguuaugaaacuuucaaagucauuggugguugguccacaccuaauuccaaaucgcaggucaauagacaggucauaguugacaacaauaauuggucugguuacucugguauuuucucuguugagggcaaaagcugcaucaauaggugcuuuuauguggaguugauaaggggaaggccacaggagacuagaguaugguggaccucaaacaguauuguuguguuuuguggcacuucagguacuuauggaacaggcucauggccugauggggcgaacaucaauuucaugccuauauaa

SEQ ID NO: 54573 - RNA, 1410 nt, Artificial Sequence
  derived and/or modified CDS sequence (wt) from neuraminidase__InfluenzaA__AFM71904
augaauccaaaucaaaagauaauaacaauuggcucugucucucucaccauugcaacaguaugcuuccucaugcagauugccauccuggcaacuacugugacauugcauuuuaaacaacaugagugcgacucccccgcgagcaaccaaguaaugccaugugaaccaauaauaauagaaaggaacauaacagagauaguguauuugaauaacaccaccauagagaaagagauuugccccgaaguaguggaauacagaaauuggucaaagccgcaaugucaaauuacaggauuugcaccuuuuucuaaggacaauucaauccggcuuucugcugguggggacauuugggugacgagagaaccuuaugugucaugcgacccuggcaaguguuaucaauuugcacucgggcaggggaccacacuagacaacaaacauucaaaugucacaauacaugauagaaucccucaccgaacccuauuaaugaaugaguuggguguuccauuucauuuaggaaccaaacaaguguguguagcaugguccagcucaaguugucacgauggaaaagcaugguugcauguuugugucacuggggaugauagaaaugcgacugcuagcuucauuuaugacgggaggcuuguggacaguauugguuccuggucucaaaauauccucaggacccaggagucggaaugcguuuguaucaaugggacuugcacaguaguaaugacugauggaagugcaucaggaagagccgauacuagaauacuauucauuaaagaggggaaaauuguccauauuagcccauugucaggaagugcucagcauauagaggaguguuccuguuacccucgauauccugacguaagauguaucugcagagacaacuggaaaggcucuaauaggcccguuauagacauaaauauggaagauuauagcauugauuccgguuaugugugcucagggcuuguuggcgacacacccaggaacgacgacagcucuagcaauagcaauugcagggauccuaacaaugaaagagggaauccaggagugaaaggcugggccuuugacaauggagaugauguauggaugggaagaacaaucaacaaagaaucacgcucagguuaugaaacuuucaaagucauuggugguugguccacaccuaauuccaaaucgcaggucaauagacaggucauaguugacaacaauaauuggucugguuacucugguauuuucucuguugagggcaaaagcugcaucaauaggugcuuuuauguggaguugauaaggggaaggccacaggagacuagaguaugguggaccucaaacaguauuguuguguuuuguggcacuucagguacuuauggaacaggcucauggccugauggggcgaacaucaauuucaugccuauauaa

SEQ ID NO: 54574 - RNA, 1410 nt, Artificial Sequence
  derived and/or modified CDS sequence (wt) from neuraminidase__InfluenzaA__AFM71915
augaauccaaaucaaaagauaauaacaauuggcucugucucucucaccauugcaacaauaugcuuccucaugcagauugccauccugguaacuacuguaacauugcauuucaagcaauaugagugcgacucccccgcgaacaaccaaguaaugccgugugaaccaauaauaauagaaaggaacauaacagagauaguguauuugacuaacaccaccauagagaaagagauaugccccaaauuaguggaauacaggaaauggucaaagccgcaauguaaaauuacaggauuugcaccuuuuucuaaggacaauucaauucggcuuucugcugguggggacauuugggugacaagagaaccuuaugugucaugcgauccuggcaaguguuaucaauuugcacucgggcagggaaccacacuagacaacaaacauucaaaugacacaauacaugauagaaucccucaucgaacccuauugaugaaugaguuggguguuccauuucauuugggaaccaggcaaguguguauagcaugguccagcucaaguugucacgauggaaaagcauggcugcauguuugugucacuggggaugauaaaaaugcaacugcuagcuucauuuacgaugggaggcuuguggacaguauugguucauggucucaaaauauccucaggacccaggagucggaaugcguuuguaucaaugggacuuguacaguaguaaugacugauggaagugcuucaggaagagcugauacuagaauacuauucauugaagaggggaaaauuguucauauuagcccauugucaggaagugcucagcauguagaggaguguuccuguuauccucgauauccuggugucagauguaucugcagagacaacuggaaaggcucuaauaggcccgucguagauauaaaugugaaagauuauagcauugauuccaguuaugugugcucagggcuuguuggcgacacacccagaaacaacgacagaucuagcaauagcuauugccggaauccuaacaaugagagagggaaucacggagugaaaggcugggccuuugacgauggaaaugacguguggaugggaagaacgaucagcaaggauucacgcucagguuaugaaaccuucaaagucauuggugguugguccacaccuaauuccaaaucgcagauaaauaggcaagucauaguugacagcgauaauaggucagguuauucugguauuuucucuguugagggcaaaagcugcaucaauaggugcuuuuauguggaguugauaaggggaagggaacaggagacuagaguaugguggaccucaaacaguauuguuguguuuuguggcacuucagguaccuaugggacaggcucauggccugauggggcggacaucaaucucaugccuauauaa

SEQ ID NO: 54575 - RNA, 1410 nt, Artificial Sequence; identical to SEQ ID NO: 46984
  derived and/or modified CDS sequence (wt) from neuraminidase__InfluenzaA__AFM71926

SEQ ID NO: 54576 - RNA, 1410 nt, Artificial Sequence
  derived and/or modified CDS sequence (wt) from neuraminidase__InfluenzaA__AFM71937
augaauccaaaucaaaagauaauaacaauuggcucugucucucucaccauugcaacaauaugcuuccucaugcagauugccauccugguaacuacuguaacauugcauuucaagcaauaugagugcgacucccccgcgaacaaccaaguaaugccgugugaaccaauaauaauagaaaggaacauaacagagauaguguauuugacuaacaccaccauagagaaagagauaugccccaaauuaguggaauacaggaaauggucaaagccgcaauguaaaauuacaggauuugcaccuuuuucuaaggacaauucaauucggcuuucugcugguggggacauuugggugacgagagaaccuuaugugucaugcgauccuggcaaguguuaucaauuugcacucgggcagggaaccacacuagacaacaaacauucaaaugacacaauacaugauagaaucccucaucgaacccuauugaugaaugaguuggguguuccauuucauuugggaaccaggcaaguguguauagcaugguccagcucaaguugucacgauggaaaagcauggcugcauguuugugucacuggggaugauaaaaaugcaacugcuagcuucauuuacgaugggaggcuuguggacaguauugguucauggucucaaaauauccucaggacccaggagucggaaugcguuuguaucaaugggacuuguacaguaguaaugacugauggaagugcuucaggaagagcugauacuagaauacuauucauugaagaggggaaaauuguucauauuagcccauugucaggaagugcucagcauguagaggaguguuccuguuauccucgauauccuggugucagauguaucugcagagacaacuggaaaggcucuaauaggcccgucguagauauaaaugugaaagauuauagcauugauuccaguuaugugugcucagggcuuguuggcgacacacccagaaacaacgacagaucuagcaauagcuauugccggaauccuaacaaugagagagggaaucacggagugaaaggcugggccuuugacgauggaaaugacguguggaugggaagaacgaucagcaaggauucacgcucagguuaugaaaccuucaaagucauuggugguugguccacaccuaauuccaaaucgcagauaaauaggcaagucauaguugacagcgauaauaggucagguuauucugguauuuucucuguugagggcaaaagcugcaucaauaggugcuuuuauguggaguugauaaggggaagggaacaggagacuagaguaugguggaccucaaacaguauuguuguguuuuguggcacuucagguaccuaugggacaggcucauggccugauggggcggacaucaaucucaugccuauauaa

SEQ ID NO: 54577 - RNA, 1410 nt, Artificial Sequence; identical to SEQ ID NO: 53992
  derived and/or modified CDS sequence (wt) from neuraminidase__InfluenzaA__AFM71948

SEQ ID NO: 54578 - RNA, 1410 nt, Artificial Sequence; identical to SEQ ID NO: 53992
  derived and/or modified CDS sequence (wt) from neuraminidase__InfluenzaA__AFM71959

SEQ ID NO: 54579 - RNA, 1410 nt, Artificial Sequence
  derived and/or modified CDS sequence (wt) from neuraminidase__InfluenzaA__AFM71970
augaauccaaaucaaaagauaauaacaauuggcucugucucucucaccauugcaacaauaugcuuccucaugcagauugccauccugguaacuacuguaacauugcauuucaagcaauaugagugcgacucccccgcgaacaaccaaguaaugccguaugaaccaauaauaauagaaaggaacauaacagagauaguguauuugacuaacaccaccauagaaaaagagauaugccccaaauuaguggaauacaggaauuggucaaagccacaauguaaaauuacaggauuugcaccuuucucuaaggacaauucaauucggcuuucugcugguggggacauuugggugacgagagaaccuuaugugucaugcgauccuggcaaauguuaucaauuugcacucgggcaggggaccacacuagaaaacaaacauucaaaugacacaauacaugauagaaccccucaucgaacccuauugaugaaugaguuggguguuccauuucacuugggaaccaggcaaguguguauagcaugguccagcucaaguugucacgauggaaaagcauggcugcauguuugugucacuggguaugauaaaaaugcaacugcuagcuucauuuacgaugggaggcuuguagacagcauugguucauggucucaaaauauccucaggacccaggagucggaauguguuuguaucaaugggacuuguacaguaguaaugacugauggaagugcuucaggaagagcugauacuaaaauacuauucauugaagaggggaaaauuguucauauuagcccauugucaggaagugcucagcauguagaggaguguuccuguuauccucgauauccuggugucagauguaucugcagagacaacuggaaaggcucuaauaggccagucguagauauaaaugugaaagauuauagcauugauuccaguuaugugugcucagggcuuguuggcgacacacccagaaaaaacgacagaucuagcaguagcuauugccggaauccuaacaaugaaaaagggaaucacggagugaaaggcugggccuuugacgauggaaaugacguguggaugggaagaacgaucagcgaggauucacgcucagguuaugaaaccuucaaagucauuggugguugguccacaccuaauuccaaauugcagauaaauaggcaagucauaguugacagcgcuaauaggucagguuauucugguauuuucucuguugagggcaaaagcugcaucaauaggugcuuuuauguggaguugauaaggggaagggaacaggaaacuagaguaugguggaccucaaacaguauuguuguguuuuguggcacuucagguaccuaugggacaggcucauggccugauggggcggacaucaaucucaugccuauauaa

SEQ ID NO: 54580 - RNA, 1410 nt, Artificial Sequence; identical to SEQ ID NO: 54000
  derived and/or modified CDS sequence (wt) from neuraminidase__InfluenzaA__AFM71981

SEQ ID NO: 54581 - RNA, 1410 nt, Artificial Sequence
  derived and/or modified CDS sequence (wt) from neuraminidase__InfluenzaA__AFM71992
augaauccaaaucaaaagauaauaacgauuggcucuguuucucucaccauuuccacaauaugcuucuucaugcaaauugccaucuugauaacuacuguaacauugcauuucaagcaauaugaauucaacucccccccaaacaaccaagugaugcugugugaaccaacaauaauagaaagaaacauaacagagauaguguaucugaccaacaccaccauagagaaggaaauaugccccaaacuagcagaauacagaaauuggucaaagccgcaaugugacauuacaggauuugcaccuuuuucuaaggacaauucgauuaggcuuuccgcugguggggacaucugggugacaagagaaccuuaugugucaugcgauccugacaaguguuaucaauuugcccuuggacagggaacaacacuaaacaacgugcauucaaauaacacaguacgugauaggaccccuuaucggacccuauugaugaaugaguuagguguuccuuuucaucuggggaccaagcaagugugcauagcaugguccagcucaaguugucacgauggaaaagcauggcugcauguuuguauaacgggggaugauaaaaaugcaacugcuagcuucauuuacaaugggaggcuuguagauaguguuguuucauggucccaagaaauccucaggacccaggagucagaaugcguuuguaucaauggaacuuguacaguaguaaugacugaugggagugcuucaggaaaagcugauacuaaaauacuauucauugaggaggggaaaaucguucauacuagcacauugucaggaagugcucagcaugucgaggagugcucuugcuauccucgauauccuggugucagaugugucugcagagacaacuggaaaggcuccaauaggcccaucguagauauaaacauaaaggaucauagcauuguuuccaguuauguguguucaggacuuguuggagacacacccagaaaaaacgacagcuccagcaguagccauuguuuggauccuaacaaugaagaagguggucauggagugaaaggcugggccuuugaugauggaaaugacguguggaugggaagaacgaucaacgagacgucacguuuaggguaugaaaccuucaaagucauugaaggcugguccaacccuaaguccaaauugcagaugaauaggcaagucauaguugacagagguaauagguccgguuauucugguauuuucucuguugaaggcaaaagcugcaucaaucggugcuuuuauguggaguugauuaggggaagaaaagaggaaacugaagucuuguggaccucaaacaguauuguuguguuuuguggcaccucagguacauauggaacaggcucauggccugauggggcggaccucaaucucaugccuauauaa

SEQ ID NO: 54582 - RNA, 1410 nt, Artificial Sequence; identical to SEQ ID NO: 54556
  derived and/or modified CDS sequence (wt) from neuraminidase__InfluenzaA__AFM72013

SEQ ID NO: 54583 - RNA, 1365 nt, Artificial Sequence; identical to SEQ ID NO: 47731
  derived and/or modified CDS sequence (wt) from neuraminidase__InfluenzaA__AFM72024

SEQ ID NO: 54584 - RNA, 1410 nt, Artificial Sequence; identical to SEQ ID NO: 51007
  derived and/or modified CDS sequence (wt) from neuraminidase__InfluenzaA__AFM72035

SEQ ID NO: 54585 - RNA, 1410 nt, Artificial Sequence; identical to SEQ ID NO: 51007
  derived and/or modified CDS sequence (wt) from neuraminidase__InfluenzaA__AFM72046

SEQ ID NO: 54586 - RNA, 1413 nt, Artificial Sequence
  derived and/or modified CDS sequence (wt) from neuraminidase__InfluenzaA__AFM72057
augaauccaaaucagaaaauaauaaccauuggaucaaucuguacgacaaucggaauaauuagucuaauauugcaaauaggaaauauuauuucaauauggguuagccacucaauccaaacuggaagucaaaaccacacuggaauaugcaaccaaagaaucauuacuuaugaaaauagcaccuggguaaaucaaacauaugucaauauuaacaacacuaacguuguugcuggaaaggacacaacuucagugacauuagccggcaauucaucucuuuguccuauccgugggugggcuauauacagcaaagacaacagcauaagaauugguuccaaaggagauguuuuugucauaagagaaccuuuuauaucauguucucacuuggaaugcagaaccuuuuuucugacccaaggugcucuauuaaaugacaagcauucaaaugggaccguuaaggacagaagcccuuauagggccuuaaugagcuguccuauaggugaagcuccgucuccauacaauucaagguuugaaucaguugcuuggucagcaagcgcaugucaugauggcaugggcuggcuaacaaucggaauuucugguccagaugauggagcaguggcuguacuaaaauacaacggcauaauaacugaaaccauaaaaaguuggaggaagcgaauauuaagaacacaagagucugaaugugucuguguaaacgguucauguuuuaccauaaugaccgauggcccgaguaauggaccugccucguacagaaucuucaaaaucgagaaggggaagauuacuaaaucaauagaguuggaugcacccaauucucauuacgaggaauguuccuguuacccagacaccggcacagugaugugugugugcagagacaauuggcaugguucgaaucgaccuugggugucuuuuaaucaaaaccuggauuaucaaauaggauacaucugcagugggguguucggugacaauccgcgucccaaagauggaaaaggcagcugugauccaguaacuguugauggagcagacggaguaaagggguuuucauacagguaugguaaugguguuuggauaggaaggacuaaaaguaacagcuccagaaagggauuugagaugauuugggauccuaauggauggacagauaccgauaguaauuucuuagugaaacaggauguaguggcaaugacugauuggucaggguacagcggaaguuucguucaacauccugagcuaacaggauuggacuguaugaggccuugcuucuggguugaauuaaucagaggacgaccuagagaaaagacaacaaucuggacuagugggagcagcauuucuuuuuguggcgugaauagugauacugcaaauuggucuuggccagacggugccgaguugccauucaccauugacaaguag

SEQ ID NO: 54587 - RNA, 1413 nt, Artificial Sequence
  derived and/or modified CDS sequence (wt) from neuraminidase__InfluenzaA__AFM72068
augaauccaaaucagaaaauaauaaccauuggaucaaucuguaugacaaucggaauaauuagucuaauauugcaaauaggaaauauuauuucaauauggguuagccacucaauccaaacuggaagucaaaaccacacuggaauaugcaaccaaagaaucauuacuuaugaaaauagcaccuggguaaaucaaacauaugucaauauuaacaacacuaacguuguugcuggaaaggacacaacuucagugacauuagccggcaauucaucucuuuguccuauccgugggugggcuauauacagcaaagacaacagcauaagaauugguuccaaaggagauguuuuugucauaagagaaccuuuuauaucauguucucacuuggaaugcagaaccuuuuuucugacccaaggugcucuauuaaaugacaagcauucaaaugggaccguuaaggacagaagcccuuauagggccuuaaugagcuguccuauaggugaagcuccgucuccauacaauucaagguuugaaucaguugcuuggucagcaagcgcaugucaugauggcaugggcuggcuaacaaucggaauuucugguccagaugauggagcaguggcuguacuaaaauacaacggcauaauaacugaaaccauaaaaaguuggaggaagcgaauauuaagaacacaagagucugaaugugucuguguaaacgguucauguuuuaccauaaugaccgauggcccgaguaauggaccugccucguacagaaucuucaaaaucgagaaggggaagauuacuaaaucaauagaguuggaugcacccaauucucauuacgaggaauguuccuguuacccagacaccggcacagugaugugugugugcagagacaauuggcaugguucgaaucgaccuugggugucuuuuaaucaaaaccuggauuaucaaauaggauacaucugcagugggguguucggugacaauccgcgucccaaagauggaaaaggcagcugugauccaguaacuguugauggagcagacggaguaaagggguuuucauacagguaugguaaugguguuuggauaggaaggacuaaaaguaacagcuccagaaagggauuugagaugauuugggauccuaauggauggacagauaccgauaguaauuucuuagugaaacaggauguaguggcaaugacugauuggucaggguacagcggaaguuucguucaacauccugagcuaacaggauuggacuguaugaggccuugcuucuggguugaauuaaucagaggacgaccuagagaaaagacaacaaucuggacuagugggagcagcauuucuuuuuguggcgugaauagugauacugcaaauuggucuuggccagacggugccgaguugccauucaccauugacaaguag

SEQ ID NO: 54588 - RNA, 1410 nt, Artificial Sequence
  derived and/or modified CDS sequence (wt) from neuraminidase__InfluenzaA__AFM72090
augaauccaaaucaaaagauaauaacaauuggcucuguuucucucaccauugcaacaauaugcuuccuuaugcaaauugccauccugguaacuacuguaacacugcauuucaagcaauaugagugcagcucccccccaaacaaucaaguaaugccgugugaaccaauaauaauagaaagaaacauaacagagauaguguauuugacuaacaccaccauagagaaagagauaugccccaaacuaguggaauacagaaauuggucaaagccgcaauguaaaauuacaggauuugcaccuuuuucuaaggacaauucaauucggcuuuccgcugguggggacauuugggugacgagagaaccuuaugugucaugcgauccuggcaaguguuaucaauuugcacucgggcaaggaaccacacuaaacaacaagcauucaaaugacacaguacaugauaggaccccuuaucgaacccuauugaugaaugaguugggggucccauuucauuuaggaaccaagcaagugugcauagcaugguccagcucaaguugucacgauggaaaagcauggcugcauguuugugucacugggcaugauaaaaaugcaacugcuagcuucauuuacgaugggaggcuuguagacaguauugguucaugguccaaaaauauucucaggacccaggaaucggagugcguuuguaucaaugggacuuguacaguaguaaugacugauggaagugcuucagaaagagcugauacuaaaauacuauucauugaagaggggaaaaucguucauauuagcccauugucaggaagugcucagcauguagaggaguguuccuguuauccucgguauccuggugucagaugugucugcagagacaacuggaaaggcuccaauaggcccaucguagauauaaauguaaaagauuauagcauuguuuccaguuaugugugcucagggcuuguuggcgacacacccagaaaaaacgacagauccagcaguagcuauugccggaauccuaacaaugagaaagggaaucauggagugaaaggaugggccuuugacgauggaaaugacguguggaugggaagaacgauuggcgaggaguuacgcuuagguuaugaaaccuucaaagucauuggugguugguccacaccuaacuccaaauugcagauaaauaggcaagucauaguugacagcaaaaauaggucagguuauucugguauuuucucuguugagggcaaaagcugcaucaauaggugcuuuuauguggaguugauaaggggaagggaacaggaaacuagagucugguggaccucaaacaguauuguuguguuuuguggcaccucagguacauauggaacaggcucauggccugauggagcggacaucaaucucaugccuauauaa

SEQ ID NO: 54589 - RNA, 1410 nt, Artificial Sequence
  derived and/or modified CDS sequence (wt) from neuraminidase__InfluenzaA__AFM72101
augaauccaaaucaaaagauaauaacaauuggcucuguuucucucaccauugccacaauaugcuuccuuaugcaaauugccauccugguaacuacuguaacauugcauuucaagcaauaugagugcagcucccccccaaacaaccaagcaaugccgugugaaccaacaauaauagaaagaaacauaacagagauaguguauuugacuaacaccaccauagagaaagagauaugccccaaacuaguagaauacagaaauuggucaaagccgcaauguaaaauuacaggauuugcaccuuuuucuaaggacaauucaauucggcuuuccgcugguggagacauuugggugacaagagaaccuuaugugucaugcgauccuggcaaguguuaucaauuugcacuugggcagggaaccacacuaaacaacaggcauucaaaugacacaguacaugauaggaccccuuaucgaacccucuugaugaaugaguuggguguuccauuucauuugggaaccaagcaagugugcauagcaugguccagcucaaguugucacgauggaaaagcauggcugcauguuugugucacugggcaugauaaaaaugcaacugcuagcuucauuuacgaugggaggcuuguagacaguauugguucaugguccaaaaauauccucaggacccaggagucggaaugcguuuguaucaaugggacuuguacaguaguaaugacugauggaagugcuucagaaagagcugauacuaaaauacuauucauugaagaggggaaaaucguucauauuagcccauugucaggaagugcucagcauguagaggagugcuccuguuauccucgauauccuggugucagaugugucugcagagacaacuggaaaggcuccaauaggcccaucguagauauaaaugugaaagauuauagcauuguuuccaguuaugugugcucagggcuuguuggagacacacccagaaaaaacgacagauccagcaguagcuauugccggaauccuaacaaugagaaagggagucauggagugaaaggcugggccuuugacgauggaaaugacguguggaugggaagaacgaucggcgaggaguuacgcucagguuaugaaaccuucaaagucauuggagguugguccacaccuaacuccaaauugcagauaaauaggcaagucauaguugacagcgguaauagguccgguuauucugguauuuucucuguugagggcaaaagcugcaucaaucggugcuuuuauguggaguugauaaggggaagggaacaggaaacuagagucugguggaccucaaacaguauuguuguguuuugugguaccucagguacauauggaacaggcucauggccugauggggcggacaucaaucucaugccuauauaa

SEQ ID NO: 54590 - RNA, 1410 nt, Artificial Sequence
  derived and/or modified CDS sequence (wt) from neuraminidase__InfluenzaA__AFM72112
augaauccaaaucaaaagauaauaacaauuggcucuguuucucucaccauugccacaauaugcuuccuuaugcaaauugccauccugguaacuacuguaacauugcauuucaagcaauaugagugcagcucccccccaaacaaccaaguaaugccgugugaaccaacaauaauagaaagaaacauaacagagauaguguauuugacuaacaccaccauagagaaagagauaugccccaaacuaguagaauacagaaauuggucaaagccgcaauguaaaauuacaggauuugcaccuuuuucuaaggacaauucaauucggcuuuccgcugguggagacauuugggugacaagagaaccuuaugugucaugcgauccuggcaaguguuaucaauuugcacuugggcagggaaccacacuaaacaacaggcauucaaaugacacaguacaugauaggaccccuuaucgaacccucuugaugaaugaguuggguguuccauuucauuugggaaccaagcaagugugcauagcaugguccagcucaaguugucacgauggaaaagcauggcugcauguuugugucacugggcaugauaaaaaugcaacugcuagcuucauuuacgaugggaggcuuguagacaguauugguucaugguccaaaaauauccucaggacccaggagucggaaugcguuuguaucaaugggacuuguacaguaguaaugacugauggaagugcuucagaaagagcugauacuaaaauacuauucauugaagaggggaaaaucguucauauuagcccauugucaggaagugcucagcauguagaggagugcuccuguuauccucgauauccuggugucagaugugucugcagagacaacuggaaaggcuccaauaggcccaucguagauauaaaugugaaagauuauagcauuguuuccaguuaugugugcucagggcuuguuggagacacacccagaaaaaacgacagauccagcaguagcuauugccggaauccuaacaaugagaaagggagucauggagugaaaggcugggccuuugacgauggaaaugacguguggaugggaagaacgaucggcgaggaguuacgcucagguuaugaaaccuucaaagucauuggagguugguccacaccuaacuccaaauugcagauaaauaggcaagucauaguugacagcgguaauagguccgguuauucugguauuuucucuguugagggcaaaagcugcaucaaucggugcuuuuauguggaguugauaaggggaagggaacaggaaacuagagucugguggaccucaaacaguauuguuguguuuugugguaccucagguacauauggaacaggcucauggccugauggggcggacaucaaucucaugccuauauaa

SEQ ID NO: 54591 - RNA, 1410 nt, Artificial Sequence
  derived and/or modified CDS sequence (wt) from neuraminidase__InfluenzaA__AFM72123
augaauccaaaucaaaagauaauaacaauuggcucuguuucucucacuauugccacaauaugcuuucuuaugcaaauugccauccugguaacuacuguaacauugcauuucaagcaauaugagugcagcucccccccaaacaaccaaguaaugccgugugaaccaacaauaauagaaagaaacauaacagagauaguguauuugacuaacaccaccauagagaaagagauaugccccaaacuaguagaauacagaaauuggucaaagccgcaauguaaaauuacaggauuugcaccuuuuucuaaggacaauucaauucggcuuuccgcugguggagacauuugggugacaagagaaccuuaugugucaugcgauccuggcaaguguuaucaauuugcacuugggcagggaaccacacuaaacaacaggcauucaaaugacacaguacaugauaggaccccuuaucgaacccucuugaugaaugaguuggguguuccauuucauuugggaaccaagcaagugugcauagcaugguccagcucaaguugucacgauggaaaagcauggcugcauguuugugucacugggcaugauaaaaaugcaacugcuagcuucauuuacgaugggaggcuuguagacaguauugguucaugguccaaaaauauccucaggacccaggagucggaaugcguuuguaucaaugggacuuguacaguaguaaugacugauggaagugcuucagaaagagcugauacuaaaauacuauucauugaagaggggaaaaucguucauauuagcccauugucaggaagugcucagcauguagaggagugcuccuguuauccucgauauccuggugucagaugugucugcagagacaacuggaaaggcuccaauaggcccaucguagauauaaaugugaaagauuauagcauuguuuccaguuaugugugcucagggcuuguuggagacacacccagaaaaaacgacagauccagcaguagcuauugccggaauccuaacaaugagaaagggagucauggagugaaaggcugggccuuugacgauggaaaugacguguggaugggaagaacgaucggagaggaguuacgcucagguuaugaaaccuucaaagucauuggagguugguccacaccuaacuccaaauugcagacaaauaggcaagucauaguugacagcgguaauagguccgguuauucugguauuuucucuguugagggcaaaagcugcaucaaucggugcuuuuauguggaguugauaaggggaagggaacaggaaacuagagucugguggaccucaaacaguauuguuguguuuuguggcaccucagguacauauggaacaggcucauggccugauggggcggacaucaaucucaugccuauauaa

SEQ ID NO: 54592 - RNA, 1410 nt, Artificial Sequence; identical to SEQ ID NO: 54147
  derived and/or modified CDS sequence (wt) from neuraminidase__InfluenzaA__AFM72134

SEQ ID NO: 54593 - RNA, 1410 nt, Artificial Sequence
  derived and/or modified CDS sequence (wt) from neuraminidase__InfluenzaA__AFM72145
augaauccaaaucaaaagauaauaacaauuggcucuguuucucucacuauugccacaauaugcuuccuuaugcaaauugccauccuggcaauuacuguaacauugcauuucaagcaauaugagugcaacucccccccaaacaaccaaguaaugcugugugaaccaacaauaauagaaagaaacacaacagagauaguguaucugaccaacaccaccauagagaaagaaguaugccccaaacuagcagaauacagaaauuggucaaagccgcaauguaaaauuacaggauuugcaccuuuuucuaaggacaauucaauucggcuuuccgcugguggagacauuugggugacaagagaaccuuaugugucaugcgauccuggcaaguguuaucaauuugcccuuggacagggaacaacacuaaacaacaggcacucaaaugacacaguacaugauaggaccccuuaucgaacccuauugaugaaugaguuggguguuccauuucauuugggaaccaagcaagugugcauagcaugguccagcucaaguugucacgauggaaaagcauggcugcauguuuguguaacugggcaugaugaaaaugcaacugcuagcuucauuuacgaugggaggcuuguagauaguauugguucaugguccaaaaauauccucaggacccaggagucggaaugcguuuguaucaauggaacuuguacaguaguaaugacugauggaagugcuucagaaagagcugauacuaaaauacuauucauugaagaggggaaaaucguucauauuagcccauugucaggaagugcucagcaugucgaggagugcuccuguuauccucgauauccuggugucagaugugucugcagagacaacuggaaaggcuccaauaggcccaucguagauauaaaugugaaagauuauagcauuguuuccaguuaugugugcucaggacuuguuggagacacacccagaaaaaacgacagcuccagcaguagcuauugccggaauccuaacaaugagaaagggagucauggagugaaaggcugggccuuugaugauggaaaugacguguggaugggaagaacgaucagcgaggaguuacgcucagguuaugaaaccuucaaagucauuggaggcugguccaaaccuaacuccaaauugcagauaaauaggcaagucauaguugacagagguaauagguccgguuauucugguauuuucucuguugaaggcaaaagcugcaucaaucggugcuuuuauguggaguugauaaggggaaggaaacaggaaacugaagucugguggaccucaaacaguauuguuguuuuuuguggcaccucagguacauauggaacaggcucauggccugauggggcggacaucaaucucaugccuauauaa

SEQ ID NO: 54594 - RNA, 1410 nt, Artificial Sequence; identical to SEQ ID NO: 48604
  derived and/or modified CDS sequence (wt) from neuraminidase__InfluenzaA__AFM72156

SEQ ID NO: 54595 - RNA, 1410 nt, Artificial Sequence
  derived and/or modified CDS sequence (wt) from neuraminidase__InfluenzaA__AFM72167
augaauccaaaucaaaagauaauaacaauuggcucuauuucucucacuauugccacaauaugcuuccuuaugcaaauugccauccugguaacuacuguaacauugcauuucaagcaauaugagugcaacucccccccaaacaaccaaguaaugcugugugaaccaacaauaauagaaagaaacauaacagagauaguguaucugaccaacaccaccauagagaaagaaauaugccccgaacuagcagaauacagaaauuggucaaagccgcaauguaaaauuacaggauuugcaccuuuuucuaaggacaauucaauucggcuuuccgcugguggagacauuugggugacaagagaaccuuaugugucaugcgauccuggcaaguguuaucaauuugcccuuggacagggaacaacacuaaacaacaggcauucaaaugacacaguacaugauaggaccccuuaucgaacccuauugaugaaugaguuggguguuccauuucauuugggaaccaagcaagugugcauagcaugguccagcucaaguugucacgauggaaaagcauggcugcauguuuguguaacugggcaugaugaaaaugcaacugcuagcuucauuuacgaugggaggcuuguagauaguauugguucaugguccaaaaauauccucaggacccaggagucggaaugcguuuguaucaauggaacuuguacaguaguaaugacugauggaagugcuucagaaagagcugauacuaaaauacuauucauugaagaggggaaaaucguucauauuagcccauugucaggaagugcucagcaugucgaggagugcuccuguuauccucgauauccuggugucagaugugucugcagagacaacuggaaaggcuccaauaggcccaucguagauauaaaugugaaagauuauagcauuguuuccaguuaugugugcucaggacuuguuggagacacacccagaaaaaacgacagcuccagcaguagcuauugcuggaauccuaacaaugagaaagggggucauggagugaaaggcugggccuuugaugauggaaaugacguguggaugggaagaacgaucagcgaggaguuacgcucagguuaugaaaccuucaaagucauuggaggcugguccaaaccuaacuccaaauugcagauaaauaggcaagucauaguugacagagguaauagguccgguuauucugguauuuucucuguugaaggcaaaagcugcaucaaucggugcuuuuauguggaguugauaaggggaaggaaacaggaaacugaagucugguggaccucaaacaguauuguuguguuuuguggcaccucagguacauauggaacaggcucauggccugauggggcggacaucaaucucaugccuauauaa

SEQ ID NO: 54596 - RNA, 1410 nt, Artificial Sequence
  derived and/or modified CDS sequence (wt) from neuraminidase__InfluenzaA__AFM72178
augaauccaaaucaaaagauaauaacaauuggcucuguuucucucaccauugccacaauaugcuuccuuaugcaaauugccauccugguaacuacuguaacauugcauuucaagcaauaugagugcaacucccccccaaacaaccaaguaaugcugugugaaccaacaauaauagaaagaaacauaacagagauaguguaucugaccaacaccaccauagagaaagaaauaugccccgaacuagcagaauacagaaauuggucaaagccgcaauguaaaauuacaggauuugcaccuuuuucuaaggacaauucaauucggcuuuccgcugguggagacauuugggugacaagagaaccuuaugugucaugcgauccuggcaaguguuaucaauuugcccuuggacagggaacaacacuaaacaacaggcauucaaaugacacaguacaugauaggaccccuuaucgaacccuauugaugaaugaguuggguguuccauuucauuugggaaccaagcaagugugcauagcaugguccagcucaaguugucacgauggaaaagcauggcugcauguuuguguaacugggcaugaugaaaaugcaacugcuagcuucauuuacgaugggaggcuuguagauaguauugguucaugguccaaaaauauccucaggacccaggagucggaaugcguuuguaucaauggaacuuguacaguaguaaugacugauggaagugcuucagaaagagcugauacuaaaauacuauucauugaagaggggaaaaucguucauauuagcccauugucaggaagugcucagcaugucgaggagugcuccuguuauccucgauauccuggugucagaugugucugcagagacaacuggaaaggcuccaauaggcccaucguagauauaaaugugaaagauuauagcauuguuuccaguuaugugugcucaggacuuguuggagacacacccagaaaaaacgacagcuccagcaguagcuauugcuggaauccuaacaaugagaaagggggucauggagugaaaggcugggccuuugaugauggaaaugacguguggaugggaagaacgaucagcgaggaguuacgcucagguuaugaaaccuucaaagucauuggaggcugguccaaaccuaacuccaaauugcagauaaauaggcaagucauaguugacagagguaauagguccgguuauucugguauuuucucuguugaaggcaaaagcugcaucaaucggugcuuuuauguggaguugauaaggggaaggaaacaggaaacugaagucugguggaccucaaacaguauuguuguguuuuguggcaccucagguacauauggaacaggcucauggccugauggggcggacaucaaucucaugccuauauaa

SEQ ID NO: 54597 - RNA, 1410 nt, Artificial Sequence
  derived and/or modified CDS sequence (wt) from neuraminidase__InfluenzaA__AFM72189
augaauccaaaucaaaagauaauaacgauuggcucuguuucucucacuauugccacaauaugcuuccuuaugcaaauugccauccugguaacuacuguaacauugcauuucaagcaauaugaaugcaacucccccccaaacaaccaaguaaugcugugugaaccaacaauaauagaaagaaacauaacagagauaguguaucugaccaacaccaccauagagaaggaaauaugccccaaacuagcagaauacagaaauuggucaaagccgcaauguaaaauuacaggauuugcaccuuuuucuaaggacaauucaauucggcuuuccgcugguggggacauuugggugacaagagaaccuuaugugucaugcgauccugacaaguguuaucaauuugcccuuggacagggaacaacacuaaacaacaggcauucaaaugacacaguacaugauaggaccccuuaucgaacccuauugaugaaugaguuggguguuccauuucauuugggaaccaagcaagugugcauagcaugguccagcucaaguugucacgauggaaaagcauggcugcauguuuguguaacugggcaugaugaaaaugcaacugcuagcuucauuuacgaugggaggcuuguagauaguauugguucaugguccaaaaaaauccucaggacccaggagucggaaugcguuuguaucaauggaacuuguacaguaguaaugacugaugggagugccucaggaagagcugauacuaaaauacuauucauugaggaggggaaaaucguucauauuagcccauuguuaggaagugcucagcaugucgaggagugcuccuguuauccucgauauccuggugucagaugugucugcagagacaacuggaaaggcuccaauaggcccaucguagauauaaauguaaaggauuauagcauuguuuccaguuaugugugcucaggacuuguuggagacacacccagaaaaaacgacagcuccagcaguagccauugccugaauccuaacaaugaggaagggggucauggagugaaaggcugggccuuugaugauggagaugacguguggaugggaagaacgaucagcgagaaguuacgcucagguuaugaaaccuucaaagucauugaaggcugguccaaaccuaacuccaaauugcagauaaauaggcaagucauaguugacagagguaauagguccgguuauucugguauuuucucuguugaaggcaaaagcugcaucaaucggugcuuuuauguggaguugauaaggggaaggaaacaggaaacugaagucugguggaccucaaacaguauuguuguguuuuguggcaccucagguacauauggaacaggcucauggccugauggggcggacaucaaucucaugccuauauaa

SEQ ID NO: 54598 - RNA, 1410 nt, Artificial Sequence; identical to SEQ ID NO: 54597
  derived and/or modified CDS sequence (wt) from neuraminidase__InfluenzaA__AFM72200

SEQ ID NO: 54599 - RNA, 1410 nt, Artificial Sequence; identical to SEQ ID NO: 53973
  derived and/or modified CDS sequence (wt) from neuraminidase__InfluenzaA__AFM72211

SEQ ID NO: 54600 - RNA, 1410 nt, Artificial Sequence; identical to SEQ ID NO: 53973
  derived and/or modified CDS sequence (wt) from neuraminidase__InfluenzaA__AFM72222

SEQ ID NO: 54601 - RNA, 1413 nt, Artificial Sequence; identical to SEQ ID NO: 48465
  derived and/or modified CDS sequence (wt) from neuraminidase__InfluenzaA__AFM72233

SEQ ID NO: 54602 - RNA, 1410 nt, Artificial Sequence; identical to SEQ ID NO: 48725
  derived and/or modified CDS sequence (wt) from neuraminidase__InfluenzaA__AFM72249

SEQ ID NO: 54603 - RNA, 1410 nt, Artificial Sequence
  derived and/or modified CDS sequence (wt) from neuraminidase__InfluenzaA__AFM72260
augaauccaaaucaaaagauaauaacgauuggcucuguuucucucaccauugccacaauaugcuuccuuaugcaaauugccauccugguaacuacuguaacauugcauuucaagcaguaugaaugcaacucccccccaaacaaccaagugaugcugugugaaccaacaauaauagaaagaaacauaacagagauaguguaucugaccaacaccaccauagagaaggaaauaugccccaaacuagcagaauacagaaauuggucaaagccgcaauguaacauuacaggauuugcaccuuuuucuaaggacaauucgauucggcuuuccgcugguggggacaucugggugacaagagaaccuuaugugucaugcgauccugacaaguguuaucaauuugcccuuggacagggaacaacacuaaacaacggacauucaaaugacacaguacaugauaggaccccuuaucggacccuauugaugaaugaguuggguguuccauuucauuugggaaccaagcaagugugcauagcaugguccagcucaaguugccacgauggaaaagcauggcugcauguuuguguaacgggggaugaugaaaaugcaacugcuagcuucauuuacaaugggaggcuuguagauaguauugguucaugguccaaaaaaauccucaggacccaggagucggaaugcguuuguaucaauggaacuuguacaguaguaaugacugaugggagugcuucaggaaaagcugauacuaaaauacuauucauugaggaggggaaaaucguucauacuagccuauugucaggaagugcucagcaugucgaggagugcuccuguuauccucgauacccuggugucagaugugucugcagagacaacuggaaaggcuccaauaggcccaucguagauauaaauguaaaggauuauagcauuguuuccaguuaugugugcucaggacuuguuggagacacacccagaaaaaacgacagcuccagcaguagccauugcuuggauccuaacaaugaggaagguggucauggagugaaaggcugggccuuugaugauggaaaugacguguggaugggaagaacgaucagcgagaaguuacgcucaggauaugaaaccuucaaagucauugaaggcugguccaaaccuaacuccaaauugcagauaaauaggcaagucauaguugacagagguaauagguccgguuauucugguauuuucucuguugaaggcaaaagcugcaucaaucggugcuuuuauguggaguugauaaggggaaggaaacaggaaacugaagucuuguggaccucaaacaguauuguuguguuuuguggcaccucagguacauauggaacaggcucauggccugauggggcggacaucaaucucaugccuauauaa

SEQ ID NO: 54604 - RNA, 1410 nt, Artificial Sequence; identical to SEQ ID NO: 54603
  derived and/or modified CDS sequence (wt) from neuraminidase__InfluenzaA__AFM72271

SEQ ID NO: 54605 - RNA, 1410 nt, Artificial Sequence
  derived and/or modified CDS sequence (wt) from neuraminidase__InfluenzaA__AFM72293
augaauccaaaucaaaagauaauaacgauuggcucuguuucucucaccauugccacaauaugcuuccuuaugcaaauugccauccugguaacuacuguaacauugcauuucaagcaauaugaaugcaacucccccccaaacaaccaagugaugcugugugaaccaacaauaauagaaagaaacauaacagagauaguauaucugaccaacaccaccauagagaaggaaauaugccccaaacuagcagaauacagaaauuggucaaagccgcaauguaacauuacaggauuugcaccuuuuucuaaggacaauucgauucggcuuuccgcugguggggacaucugggugacaagagaaccuuaugugucaugcgauccugacaaguguuaucaauuugcccuuggacagggaacaacacuaaacaacgggcauucaaauuacacaguacaugauaggaccccuuaucgaacccuauugaugaaugaguuggguguuccauuucauuugggaaccaagcaagugugcauagcaugguccagcucaaguugucacgauggaaaagcauggcugcauguuuguguaacgggggaugaugaaaaugcaacugcuagcuucauuuacaaugggaggcuuguagauaguauugguucaugguccaaaaaaauccucaggacccaggagucggaaugcguuuguaucaauggaacuuguacaguaguaaugacugaugggagugcuucaggaaaagcugauacuaaaauacuauucauugaggaggggaaaaucguucauacuagcucauugucaggaagugcucagcaugucgaggagugcuccuguuauccucgauauccuggugucagaugugucugcagagacaacuggaaaggcuccaauaggcccaucguagauauaaauguaaaggauuauagcauuguuuccaguuaugugugcucaggacuuguuggagacacacccagaaaaaacgacagcuccagcaguagccauugcuuggauccuaacaaugaggaagguggucauggagugaaaggcugggccuuugaugauggaaaugacguguggaugggaagaacgaucagcgagaaguuacgcucaggauaugaaaccuucaaagucauugaaggcugguccaaaccuaacuccaaauugcagauaaauaggcaagucauaguugacagagguaauagguccgguuauucugguauuuucucuguugaaggcaaaagcugcaucaaucggugcuuuuauguggaguugauaaggggaaggaaacaggaaacugaagucuuguggaccucaaacaguauuguuguguuuuguggcaccucagguacauauggaacaggcucauggccugauggggcggacaucaaucucaugccuauauaa

SEQ ID NO: 54606 - RNA, 1410 nt, Artificial Sequence; identical to SEQ ID NO: 48466
  derived and/or modified CDS sequence (wt) from neuraminidase__InfluenzaA__AFM72304

SEQ ID NO: 54607 - RNA, 1410 nt, Artificial Sequence
  derived and/or modified CDS sequence (wt) from neuraminidase__InfluenzaA__AFM72315
augaauccaaaucaaaagauaauaacgauuggcucuguuucucucaccauuuccacaauaugcuucuucaugcaaauugccauccugauaacuacuguaacauugcauuucaagcaauaugaauucaacucccccccaaacaaccaagugaugcugugugaaccaacaauaauagaaagaaacauaacagagauaguguaucugaccaacaccaccauagagaaggaaauaugccccaaacuagcagaauacagaaauuggucaaagccgcaauguaacauuacaggauuugcaccuuuuucuaaggacaauucgauucggcuuuccgcugguggggacaucugggugacaagagaaccuuaugugucaugcgauccugacaaguguuaucaauuugcccuuggacagggaacaacacuaaacaacgugcauucaaaugacacaguacaugauaggaccccuuaucggacccuauugaugaaugaguuggguguuccauuucaucuggggaccaagcaagugugcauagcaugguccagcucaaguugucacgauggaaaagcauggcugcauguuuguguaacaggggaugaugaaaaugcaacugcuagcuucauuuacaaugggaggcuuguagauaguauuguuucaugguccaaaaaaauccucaggacccaggagucagaaugcguuuguaucaauggaacuuguacaguaguaaugacugaugggagugcuucaggaaaagcagauacuaaaauacuauucauugaggaggggaaaaucguucauacuagcacauugucaggaagugcucagcaugucgaggagugcuccuguuauccucgauauccuggugucagaugugucugcagagacaacuggaaaggcuccaauaggcccaucguagauauaaacauaaaggauuauagcauuguuuccaguuaugugugcucaggacuuguuggagacacacccagaaaaaacgacagcuccagcaguagccauugcuuggauccaaacaaugagaaagguggucauggagugaaaggcugggccuuugaugauggaaaugacguguggaugggaagaacgaucagcgagaaguuacgcucaggauaugaaaccuucaaagucauugaaggcugguccaacccuaacuccaaauugcagauaaauaggcaagucauaguugacagagauaauagguccgguuauucugguauuuucucuguugaaggcaaaagcugcaucaaucggugcuuuuauguggaguugauaaggggaagaaaccaggaaacugaagucuuguggaccucaaacaguauuguuguguuuuguggcaccucagguacauauggaacaggcucauggccugauggggcggacaucaaucucaugccuauauaa

SEQ ID NO: 54608 - RNA, 1410 nt, Artificial Sequence
  derived and/or modified CDS sequence (wt) from neuraminidase__InfluenzaA__AFM72326
augaauccaaaucaaaagauaauaacgauuggcucuguuucucucaccauuuccacaauaugcuucuucaugcaaauugccauccugauaacuacuguaacauugcauuucaagcaauaugaauucaacucccccccaaacaaccaagugaugcugugugaaccaacaauaauagaaagaaacauaacagagauaguguaucugaccaacaccaccauagagaaggaaauaugccccaaacuagcagaauacagaaauuggucaaagccgcaauguaacauuacaggauuugcaccuuuuucuaaggacaauucgauucggcuuuccgcugguggggacaucugggugacaagagaaccuuaugugucaugcgauccugacaaguguuaucaauuugcccuuggacagggaacaacacuaaacaacgugcauucaaaugacacaguacaugauaggaccccuuaucggacccuauugaugaaugaguuggguguuccauuucaucuggggaccaagcaagugugcauagcaugguccagcucaaguugucacgauggaaaagcauggcugcauguuuguguaacaggggaugaugaaaaugcaacugcuagcuucauuuacaaugggaggcuuguagauaguauuguuucaugguccaaaaaaauccucaggacccaggagucagaaugcguuuguaucaauggaacuuguacaguaguaaugacugaugggagugcuucaggaaaagcagauacuaaaauacuauucauugaggaggggaaaaucguucauacuagcacauugucaggaagugcucagcaugucgaggagugcuccuguuauccucgauauccuggugucagaugugucugcagagacaacuggaaaggcuccaauaggcccaucguagauauaaacauaaaggauuauagcauuguuuccaguuaugugugcucaggacuuguuggagacacacccagaaaaaacgacagcuccagcaguagccauugcuuggauccaaacaaugaggaagguggucauggagugaaaggcugggccuuugaugauggaaaugacguguggaugggaagaacgaucagcgagaaguuacgcucaggauaugaaaccuucaaagucauugaaggcugguccaacccuaacuccaaauuucagauaaauaggcaagucauaguugacagagauaauagguccgguuauucugguauuuucucuguugaaggcaaaagcugcaucaaucggugcuuuuauguggaguugauaaggggaagaaaccaggaaacugaagucuuguggaccucaaacaguauuguuguguuuuguggcaccucagguacauauggaacaggcucauggccugauggggcggacaucaaucucaugccuauauaa

SEQ ID NO: 54609 - RNA, 1410 nt, Artificial Sequence
  derived and/or modified CDS sequence (wt) from neuraminidase__InfluenzaA__AFM72337
augaauccaaaucaaaagauaauaacgauuggcucuguuucucucaccauuuccacaauaugcuucuucaugcaaauugccaucuugauaacuacuguaacauugcauuucaagcaauaugaauucaacucccccccaaacaaccaagugaugcugugugaaccaacaauaauagaaagaaacauaacagagauaguguaucugaccaacaccaccauagagaaggaaauaugccccaaacuagcagaauacagaaauuggucaaagccgcaaugugacauuacaggauuugcaccuuuuucuaaggacaauucgauuaggcuuuccgcugguggggacaucugggugacaagagaaccuuaugugucaugcgauccugacaaguguuaucaauuugcccuuggacagggaacaacacuaaacaacgugcauucaaaugacacaguacgugauaggaccccuuaucggacccuauugaugaaugaguuagguguuccuuuucaucuggggaccaagcaagugugcauagcaugguccagcucaaguugucacgauggaaaagcauggcugcauguuuguauaacgggggaugauaaaaaugcaacugcuagcuucauuuacaaugggaggcuuguagauaguguuguuucaugguccaaagaaauccucaggacccaggagucagaaugcguuuguaucaauggaacuuguacaguaguaaugacugaugggagugcuucaggaaaagcugauacuaaaauacuauucauugaggaggggaaaaucguucauacuagcacauugucaggaagugcucagcaugucgaggagugcucuugcuauccucgauauccuggugucagaugugucugcagagacaacuggaaaggcuccaauaggcccaucguagauauaaacauaaaggaucauagcauuguuuccaguuauguguguucaggacuuguuggagacacacccagaaaaaacgacagcuccagcaguagccauuguuuggauccuaacaaugaagaagguggucauggagugaaaggcugggccuuugaugauggaaaugacguguggaugggaagaacgaucaacgagacgucacguuuaggguaugaaaccuucaaagucauugaaggcugguccaacccuaaguccaaauugcagauaaauaggcaagucauaguugacagagguaauagguccgguuauucugguauuuucucuguugaaggcaaaagcugcaucaaucggugcuuuuauguggaguugauuaggggaagaaaagaggaaacugaagucuuguggaccucaaacaguauuguuguguuuuguggcaccucagguacauauggaacaggcucauggccugauggggcggaccucaaucucaugccuauauaa

SEQ ID NO: 54610 - RNA, 1410 nt, Artificial Sequence
  derived and/or modified CDS sequence (wt) from neuraminidase__InfluenzaA__AFM72348
augaauccaaaucaaaagauaauaacaauuggcucuguuucucucaccauugccacaauaugcuuccuuaugcaaauugccauccugguaacuacuguaacauugcauuucaagcagcaugaaugcaacucccccccaaacaaccaaguaaugcugugugaaccaacaauaauagaaagaaacauaacagagauaguguaucugaccaacaccaccauagagaaggaaauaugccccaaacuagcagaauacagaaauuggucaaagccgcaauguaacauuacaggauuugcaccuuuuucuaaggacaauucgauucggcuuuccgcugguggugacaucugggugacaagagaaccuuaugugucaugcgauccugacaaguguuaucaauuugcccuugggcagggaacaacacuaaacaacgggcauucaaaugacacaguacaugauaggaccccuuaccggacccuauugaugaaugaauuggguauuccauuucauuugggaaccaggcaagugugcauagcaugguccagcucaaguugucacgauggaaaagcauggcugcauguuuguguaacuggggaugauaaaaaugcaacugcuagcuucauuuacaaugggaggcuuguagauaguauugguucaugguccaaaaaaauacucagaacccaggagucggaaugcguuuguaucaauggaacuuguacaguaguaaugacugaugggagcgcuucaggaaaagcugauacuaaaauacuauucauugaggaggggaaaaucguucauauuagcacauugucaggaagugcucagcaugucgaggaguguuccuguuauccucgauauccuggugucagaugugucugcagagacaacuggaaaggcuccaauaggcccauuguagauauaaauguaaaggauuauagcauuguuuccaguuaugugugcucaggacuuguuggagacacacccagaaaaaacgacagcuccagcaguagccauugccuagauccuaacaaugaggaagguggucauggagugaaaggcugggccuuugaugauggaaaugacguguggaugggaagaacgaucagcgagaaguuacgcucagguuaugaaaccuucaaagucaucgaaggcugguccaaaccuaacuccaaauuacagauaaauaggcaaguuauaguugaaagagguaacagguccgguuauucugguauuuucuccguugaaggcaaaagcugcaucaaucggugcuuuuauguggaguugauaaggggaaggaaagaggaaacugaagucugguggaccucaaacaguauuguuguguuuuguggcaccucagguacauauggaacaggcucauggccugauggggcggacaucaaucucaugccuauauaa

SEQ ID NO: 54611 - RNA, 1410 nt, Artificial Sequence
  derived and/or modified CDS sequence (wt) from neuraminidase__InfluenzaA__AFM72359
augaauccaaaucaaaagauaauaacgauuggcucuguuucucucaccauuuccacaauaugcuucuucaugcaaauugccaucuugauaacuacuguaacauugcauuucaagcaauaugaauucaacucccccccaaacaaccaagugaugcugugugaaccaacaauaauagaaagaaacauaacagagauaguguaucugaccaacaccaccauagagaaggaaauaugccccaaacuagcagaauacagaaauuggucaaagccgcaaugugacauuacaggauuugcaccuuuuucuaaggacaauucgauuaggcuuuccgcugguggggacaucugggugacaagagaaccuuaugugucaugcgauccugacaaguguuaucaauuugcccuuggacagggaacaacacuaaacaacgugcauucaaaugacacaguacaugauaggaccccuuaucggacccuauugaugaaugaguuagguguuccauuucaucuggggaccaagcaagugugcauagcaugguccagcucaaguugucacgauggaaaagcauggcugcauguuuguguaacgggggaugauaaaaaugcaacugcuagcuucauuuacaaugggaggcuuguagauaguauuguuucaugguccaaaaaaauccucaggacccaggagucagaaugcguuuguaucaauggaacuuguacaguaguaaugacugaugggagugcuucaggaaaagcugauacuaaaauacuauucauugaggaggggaaaaucguucauacuagcacauugucaggaagugcucagcaugucgaggagugcuccugcuauccucgauauccuggugucagaugugucugcagagacaacuggaaaggcuccaauaggcccaucguagauauaaacauaaaggauuauagcauuguuuccaguuaugugugcucaggacuuguuggagacacacccagaaaaaacgacagcuccagcaguagccauugcuuggauccuaacaaugaagaagguggucauggagugaaaggcugggccuuugaugauggaaaugacguguggaugggaagaacgaucagcgagaaguuacgcucaggauaugaaaccuucaaagucauugaaggcugguccaacccuaauuccaaauugcagauaaauaggcaagucauaguugacagagguaauagguccgguuauucugguauuuucucuguugaaggcaaaagcugcaucaaucggugcuuuuauguggaguugauaaggggaagaaaagaggaaacuaaagucuuguggaccucaaacaguauuguuguguuuuguggcaccucagguacauauggaacaggcucauggccugauggggcggacaucaaucucaugccuauauaa

SEQ ID NO: 54612 - RNA, 1410 nt, Artificial Sequence; identical to SEQ ID NO: 54611
  derived and/or modified CDS sequence (wt) from neuraminidase__InfluenzaA__AFM72370

SEQ ID NO: 54613 - RNA, 1410 nt, Artificial Sequence; identical to SEQ ID NO: 52717
  derived and/or modified CDS sequence (wt) from neuraminidase__InfluenzaA__AFM72381

SEQ ID NO: 54614 - RNA, 1410 nt, Artificial Sequence
  derived and/or modified CDS sequence (wt) from neuraminidase__InfluenzaA__AFM72392
augaauccaaaucaaaagauaauaacgauuggcucuguuucucucaccauuuccacaauaugcuucuucaugcaaauugccaucuugauaacuacuguaacauugcauuucaagcaauaugaauucaacuccccuccaaacaaccaagugaugcugugugaaccaacaauaauagaaagaaacauaacagagauaguguaucugaccaacaccaccauagagaaggaaauaugccccaaacuagcagaauacagaaauuggucaaagccgcaaugugacauuacaggauuugcaccuuuuucuaaggacaauucgauuaggcuuuccgcugguggggacaucugggugacaagagaaccuuaugugucaugcgauccugacaaguguuaucaauuugcccuuggacagggaacaacacuaaacaacgugcauucaaauaacacaguacgugauaggaccccuuaucggacccuauugaugaaugaguuagguguuccuuuucaucuggggaccaagcaagugugcauagcaugguccagcucaaguugucacgauggaaaagcauggcugcauguuuguauaacgggggaugauaaaaaugcaacugcuagcuucauuuacaaugggaggcuuguagauaguguuguuucaugguccaaagaaauccucaggacccaggagucagaaugcguuuguaucaauggaacuuguacaguaguaaugacugaugggagugcuucaggaaaagcugauacuaaaauacuauucauugaggaggggaaaaucguucauacuagcacauugucaggaagugcucagcaugucgaggagugcucuugcuauccucgauauccuggugucagaugugucugcagagacaacuggaaaggcuccaauaggcccaucguagauauaaacauaaaggaucauagcauuguuuccaguuauguguguucaggacuuguuggagacacacccagaaaaaacgacagcuccagcaguagccauuguuuggauccuaacaaugaagaagguggucauggagugaaaggcugggccuuugaugauggaaaugacguguggaugggaagaacgaucaacgagacgucacguuuaggguaugaaaccuucaaagucauugaaggcugguccaacccuaaguccaaauugcagauaaauaggcaagucauaguugacagagguaauagguccgguuauucugguauuuucucuguugaaggcaaaagcugcaucaaucggugcuuuuauguggaguugauuaggggaagaaaagaggaaacugaagucuuguggaccucaaacaguauuguuguguuuuguggcaccucagguacauauggaacaggcucauggccugauggggcggaccucaaucucaugccuauauaa

SEQ ID NO: 54615 - RNA, 1410 nt, Artificial Sequence
  derived and/or modified CDS sequence (wt) from neuraminidase__InfluenzaA__AFM72403
augaauccaaaucaaaagauaauaacgauuggcucuguuucucucaccauuuccacaauaugcuucuucaugcaaauugccaucuugauaacuacuguaacauugcauuucaagcaauaugaauucagcucccccccaaacaaccaagugaugcugugugaaccaacaauaauagaaagaaacauaacagagauaguguaucugaccaacaccaccauagagaaggaaauaugccccaaacuagcagaauacagaaauuggucaaagccgcaaugugacauuacaggauuugcaccuuuuucuaaggacaauucgauuaggcuuuccgcugguggggacaucugggugacaagagaaccuuaugugucaugcgauccugacaaguguuaucaauuugcccuuggacagggaacaacacuaaacaacgugcauucaaaugacacaguacaugauaggaccccuuaucggacccuauugaugaaugagcuagguguuccauuucaucuggggaccaagcaagugugcauagcaugguccagcucaaguugucacgauggaaaagcauggcugcauguuuguguaacgggggaugacaaaaaugcaacugcuagcuucauuuacaaugggaggcuuguagauaguauuguuucaugguccaaagaaauccucaggacccaggagucagaaugcguuuguaucaauggaacuuguacaguaguaaugacugaugggagugcuucaggaaaagcugacacuaaaauacuauucauugaggaagggaaaaucguucauacuagcacauugucaggaagugcucagcaugucgaggagugcuccugcuauccucgauauccuggugucagaugugucugcagagacaauuggaaaggcuccaauaggcccaucguagauauaaacauaaaggauuauagcauuguuuccagauaugugugcucaggacuuguuggagacacacccagaaaaaacgacagcuccagcaguagccauugcuuggauccuaacaaugaagaagguggucauggagugaaaggcugggccuuugaugauggaaaugacguguggaugggaagaacgaucagcgagaagucacgcucaggauaugaaaccuucaaagucauugaaggcugguccaacccuaauuccaaauugcagauaaauaggcaagucauaguugacagagguaauagguccgguuauucugguauuuucucuguugaaggcaaaagcugcaucaaucggugcuuuuauguggaguugauaaggggaagaaaagaggaaacugaaguuuuguggaccucaaacaguauuguuguguuuuguggcaccucagguacauauggaacaggcucauggccugauggggcggacaucaaucucaugccuauauaa

SEQ ID NO: 54616 - RNA, 1410 nt, Artificial Sequence; identical to SEQ ID NO: 54615
  derived and/or modified CDS sequence (wt) from neuraminidase__InfluenzaA__AFM72414

SEQ ID NO: 54617 - RNA, 1410 nt, Artificial Sequence
  derived and/or modified CDS sequence (wt) from neuraminidase__InfluenzaA__AFM72425
augaauccaaaucaaaagauaauaacgauuggcucuguuucucucaccauuuccacaauaugcuucuucaugcaaacugccaucuugauaacuacuguaacauugcauuucaagcaauaugaauucaacucccccccaaacaaccaagugaugcugugugaaccaacaauaauagaaagaaacauaacagagauaguguaucugaccaacaccaccauagagaaggaaauaugccccaaacuagcagaauacagaaauuggucaaagccgcaaugugacauuacaggauuugcaccuuuuucuaaggacaauucgauuaggcuuuccgcugguggggacaucugggugacaagagaaccuuaugugucaugcgauccugacaaguguuaucaauuugcccuuggacagggaacaacacuaaacaacgugcauucaaaugacacaguacgugauaggaccccuuaucggacccuauugaugaaugaguuagguguuccuuuucaucuggggaccaagcaagugugcauagcaugguccagcucaaguugucacgauggaaaagcauggcugcauguuuguauaacgggggaugauaaaaaugcaacugcuagcuucauuuacaaugggaggcuuguagauaguauuguuucaugguccaaagaaauccucaggacccaggagucagaaugcguuuguaucaauggaacuuguacaguaguaaugacugaugggagugcuucaggaaaagcugauacuaaaauacuauucauugaggaggggaaaaucguucauacuagcacauugucaggaagugcucagcaugucgaggagugcuccugcuauccucgauauccuggugucagaugugucugcagagacaacuggaaaggcuccaauaggcccaucguagauauaaacauaaaggaucauagcauuguuuccaguuauguguguucaggacuuguuggagacacacccagaaaaaaugacagcuccagcaguagccauuguuuggauccuaacaaugaagaagguggucauggagugaaaggcugggccuuugaugauggaaaugacguguggaugggaagaacgaucagcgagaagucacgcuuaggguaugaaaccuucaaagucauugaaggcugguccaacccuaaguccaaauugcagauaaauaggcaagucauaguugacagagguaauagguccgguuauucugguauuuucucuguugaaggcaaaagcugcaucaaucggugcuuuuauguggaguugauaaggggaagaaaagaggaaacugaagucuuguggaccucaaacaguauuguuguguuuuguggcaccucagguacauauggaacaggcucauggccugauggggcggacaucaaucucaugccuauauaa

SEQ ID NO: 54618 - RNA, 1410 nt, Artificial Sequence; identical to SEQ ID NO: 54617
  derived and/or modified CDS sequence (wt) from neuraminidase__InfluenzaA__AFM72436

SEQ ID NO: 54619 - RNA, 1410 nt, Artificial Sequence; identical to SEQ ID NO: 54617
  derived and/or modified CDS sequence (wt) from neuraminidase__InfluenzaA__AFM72447

SEQ ID NO: 54620 - RNA, 1410 nt, Artificial Sequence; identical to SEQ ID NO: 54617
  derived and/or modified CDS sequence (wt) from neuraminidase__InfluenzaA__AFM72458

SEQ ID NO: 54621 - RNA, 1410 nt, Artificial Sequence; identical to SEQ ID NO: 54617
  derived and/or modified CDS sequence (wt) from neuraminidase__InfluenzaA__AFM72469

SEQ ID NO: 54622 - RNA, 1410 nt, Artificial Sequence
  derived and/or modified CDS sequence (wt) from neuraminidase__InfluenzaA__AFM72491
augaauccaaaucaaaagauaauaacgauuggcucuguuucucucaccauuuccacaauaugcuucuucaugcaaauugccaucuugauaacuacuguaacauugcauuucaagcaauaugaauucaacucccccccaaacaaccaagugaugaugugugaaccaacaauaauagaaagaaacauaacagagauaguguaucugaccaacaccaccauagagaaggaaauaugccccaaacuagcagaauacagaaauuggucaaagccgcaaugugacauuacaggauuugcaccuuuuucuaaggacaauucgauuaggcuuuccgcugguggggacaucugggugacaagagaaccuuaugugucaugcgauccugacaaguguuaucaauuugcccuuggacagggaacaacacuaaacaacgugcauucaaaugacacaguacgugauaggaccccuuaucggacccuauugaugaaugaguuagguguuccuuuucaucuggggaccaagcaagugugcauagcauggucaagcucaaguugucacgauggaaaagcauggcugcauguuuguauaacgggggaugauaaaaaugcaacugcuagcuucauuuacaaugggaggcuuguagauaguauuguuucaugguccaaagaaauccucaggacccaggagucagaaugcguuuguaucaauggaacuuguacaguaguaaugacugaugggagugcuucaggaaaagcugauacuaaaauacuauucauugaggaggggaaaaucguucauacuagcacauugucaggaagugcucagcaugucgaggagugcuccugcuauccucgauaucccggugucagaugugucugcagagacaacuggaaaggcuccaauaggcccaucguagauauaaacauaaaggaucauagcauuguuuccaguuauguguguucaggacuuguuggagacacacccagaaaaaacgacagcuccagcaguagccauuguuuggauccuaacaaugaagaagguggucauggagugaaaggcugggccuuugaugauggaaaugacguguggaugggaagaacgaucagcgagaagucacgcuuaggauaugaaaccuucaaagucauugaaggcugguccaacccuaauuccaaauugcagauaaauaggcaagucauaguugacagagguaauagguccgguuauucugguauuuucucuguugaaggcaaaagcugcaucaaucggugcuuuuauguggaguugauaaggggaagaaaagaggaaacugaagucuuguggaccucaaacaguauuguuguguuuuguggcaccucagguacauauggaacaggcucauggccugauggggcggacaucaaucucaugccuauauaa

SEQ ID NO: 54623 - RNA, 1410 nt, Artificial Sequence; identical to SEQ ID NO: 54622
  derived and/or modified CDS sequence (wt) from neuraminidase__InfluenzaA__AFM72502

SEQ ID NO: 54624 - RNA, 1413 nt, Artificial Sequence
  derived and/or modified CDS sequence (wt) from neuraminidase__InfluenzaA__AFM72513
augaacccaaaucaaaagauaauaaccauuggaucaaucaguauagcaaucggaauaauuagucuaauguugcaaauaggaaauauuauuucaauaugggcuagucacucaauccaaacuggaagucaaaacaacacuggaauaugcaaccaaagaaucaucacauaugaaaacagcaccugggugaaucacacauauguuaauauuaacaacacuaauguuguugcuggagaggacaaaacuucagugacauuggccggcaauucaucucuuuguucuaucaguggaugggcuauauacacaaaagacaacagcauaagaauuggcuccaaaggagauguuuuugucauaagagaaccuuucauaucauguucucacuuggaaugcagaaccuuuuuucugacccaaggcgcucuauuaaaugacaaacauucaaaugggaccguaaaggacagaaguccuuauagggccuuaaugagcuguccucuaggugaagcuccguccccauacaauucaaaguucgaaucaguugcauggucagcaagcgcaugccaugauggcaugggcugguuaacaaucggaauuucugguccagacaauggagcuguggcuguacuaaaauacaacggaauaauaacuggaaccauaaaaaguuggaaaaagcaaauauuaagaacacaagagucugaaugugucuguaugaacgggucauguuucaccauaaugaccgauggcccgaguaauaaggccgccucguacaaaauuuucaagaucgaaaaggggaagguuacuaaaucaauagaguugaaugcacccaauuuucauuaugaggaaugcuccuguuacccagacacuggcauagugauguguguaugcagggacaacuggcaugguucaaaucgaccuugggugucuuucaaucaaaacuuggauuaucaaauaggauacaucugcaguggaguguuuggugacaauccgcgucccgaagauggagagggcagcugcaauccagugacuguugauggagcaaacggaguaaaaggguuuucauacaaauaugauaaugguguuuggauaggaaggaccaaaaguaacagacuuagaaagggguuugagaugauuugggauccuaauggauggacaaauaccgacagugauuucucagugaaacaggauguuguagcaauaacugauuggucaggguacagcggaaguuucguccaacauccugaguuaacaggauuggacuguauaagaccuugcuucuggguugaguuagucagagggcugccuagagaaaauacaacaaucuggacuagugggagcagcauuucuuuuuguggcguuaauagugauacugcaaacuggucuuggccagacggugcugaguugccguucaccauugacaaguag

SEQ ID NO: 54625 - RNA, 1413 nt, Artificial Sequence; identical to SEQ ID NO: 54624
  derived and/or modified CDS sequence (wt) from neuraminidase__InfluenzaA__AFM72524

SEQ ID NO: 54626 - RNA, 1413 nt, Artificial Sequence; identical to SEQ ID NO: 54624
  derived and/or modified CDS sequence (wt) from neuraminidase__InfluenzaA__AFM72535

SEQ ID NO: 54627 - RNA, 1413 nt, Artificial Sequence; identical to SEQ ID NO: 54624
  derived and/or modified CDS sequence (wt) from neuraminidase__InfluenzaA__AFM72546

SEQ ID NO: 54628 - RNA, 1413 nt, Artificial Sequence; identical to SEQ ID NO: 54624
  derived and/or modified CDS sequence (wt) from neuraminidase__InfluenzaA__AFM72557

SEQ ID NO: 54629 - RNA, 1410 nt, Artificial Sequence
  derived and/or modified CDS sequence (wt) from neuraminidase__InfluenzaA__AFM72579
augaauccaaaucaaaagauaauaacgauuggcucuguuucucucaccauuuccacaauaugcuucuucaugcaaacugccaucuugauaacuacuguaacauugcauuucaagcaauaugaauucaacucccccccaaacaaccaagugaugcugugugaaccaacaauaauagaaagaaacauaacagagauaguguaucugaccaacaccaccauagagaaggaaauaugccccaaacuagcagaauacagaaauuggucaaagccgcaaugugacauuacaggauuugcaccuuuuucuaaggacaauucgauuaggcuuuccgcugguggggacaucugggugacaagagaaccuuaugugucaugcgauccugacaaguguuaucaauuugcccuuggacagggaacaacacuaaacaacgugcauucaaaugacacaguacaugauaggaccccuuaucggacccuauugaugaaugaguuagguguuccuuuucaucuggggaccaagcaagugugcauagcaugguccagcucaaguugucacgauggaaaagcauggcugcauguuuguauaacgggggaugauaaaaaugcaacugcuagcuucauuuacaaugggaggcuuguagauaguauuguuucaugguccaaagaaauccucaggacccaggagucagaaugcguuuguaucaauggaacuuguacaguaguaaugacugaugggagugcuucaggaaaagcugauacuaaaauacuauucauugaggaggggaaaaucguucauacuagcauauugucaggaagugcucagcaugucgaggagugcuccugcuauccucgauauccuggugucagaugugucugcagagacaacuggaaaggcuccaauaggcccaucguagauauaaacauaaaggaucauagcauuguuuccaguuauguguguucaggacuuguuggagacacacccagaaaaaacgacagcuccagcaguagccauuguuuggauccuaacaaugaagaagguggucauggagugaaaggcugggccuuugaugauggaaaugacguguggaugggaagaacgaucagcgagaagucacgcuuaggguaugaaaccuucaaagucauugaaggcugguccaacccuaaguccaaauugcagauaaauaggcaagucauaguugacagagguaauagguccgguuauucugguauuuucucuguugaaggcaaaagcugcaucaaucggugcuuuuauguggaguugauaaggggaagaaaagaggaaacugaagucuuguggaccucaaacaguauuguuguguuuuguggcaccucagguacauauggaacaggcucauggccugauggggcggacaucaaucucaugccuauauaa

SEQ ID NO: 54630 - RNA, 1413 nt, Artificial Sequence
  derived and/or modified CDS sequence (wt) from neuraminidase__InfluenzaA__AFM72802
augaacccaaaucaaaaaauaauaaccauuggaucaaucaguauagcaaucggaauaauuaguuuaauguugcaaauaggaaauauuauuucgauaugggcuagucacucaauccaaacuggaagucaaaaccacacuggaaugugcaaccaaagaaucauuacauaugaaaacagcaccugggugaaucacacauauguuaauauuaacaacaccaauguuguugcuggaaaggacaaaacuccaguuacauuggccggcaacucaucucuuuguucuaucaguggaugggcuauacacacaaaagacaacagcauaagaauuggcuccaaaggagauguuuuugucauaagagaaccuuucauaucauguucucacuuggaaugcaaaaccuuuuuucugacccaaggcgcucuauuaaaugacaaacauucaaaugggaccguaaaggacagaaguccuuauagggccuuaaugagcuguccucuaggugaagcuccguccccauacaauucaaaguucgaaucaguugcauggucagcaagcgcaugccaugauggcauaggcugguuaacaaucggaauuucugguccagacaauggagcuguggcuguacuaaaauacaacggaauaauaacuggaaccauaaaaaguuggaaaaagcaaauauuaagaacacaagagucugaaugugucuguaugaacgggucauguuucaccauaaugacugaugguccgaguaauggggccgccucguacaaaauuuucaagaucgaaaaggggaagguuauuaaaucaauggaguuaaaugcacccaauuuucauuaugaggaauguucuuguuacccagacacuggcacagugauguguguaugcagggacaacuggcaugguucaaaucgaccuugggugucuuuuaaucaaaacuuggauuaucaaauaggauacaucugcaguggaguguucggugacaauccgcgucccgaagauggagagggcagcugcaauccagugacuguugauggagcaaacggaguaaaaggguuuucauacaaauaugguaaugguguuuggauaggaaggaccaaaaguaacagaauuagaaagggguuugagaugauuugggauccuaauggauggacaaauaccgacagugauuucucagugaaacaggauauuguagcaauaacugauuggucaggguacagcggaaguuucguccaacauccugaguuaacaggauuggacuguauaagaccuugcuucuggguugaguuagucagagggcugccuagagaaaauacgacaaucuggacuaguggaagcagcauuuccuuuuguggcguuaauagugauauugcaaacuggucuuggccagacggugcugagcugccguucaccauugacaaguag

SEQ ID NO: 54631 - RNA, 1413 nt, Artificial Sequence; identical to SEQ ID NO: 54630
  derived and/or modified CDS sequence (wt) from neuraminidase__InfluenzaA__AFM72813

SEQ ID NO: 54632 - RNA, 1413 nt, Artificial Sequence; identical to SEQ ID NO: 54630
  derived and/or modified CDS sequence (wt) from neuraminidase__InfluenzaA__AFM72824

SEQ ID NO: 54633 - RNA, 1410 nt, Artificial Sequence; identical to SEQ ID NO: 48740
  derived and/or modified CDS sequence (wt) from neuraminidase__InfluenzaA__AFM72835

SEQ ID NO: 54634 - RNA, 1410 nt, Artificial Sequence; identical to SEQ ID NO: 48740
  derived and/or modified CDS sequence (wt) from neuraminidase__InfluenzaA__AFM72845

SEQ ID NO: 54635 - RNA, 1410 nt, Artificial Sequence
  derived and/or modified CDS sequence (wt) from neuraminidase__InfluenzaA__AFM72855
augaauccaaaccaaaagauaauaaccauugguucggucuguaugacaauuggaauggcuaacuuaauauuacaaauuggaaacauaaucucaauauggauuagccacucaauucaacuugggaaucaaaaucagauugaaacaugcaaucaaagcgucauuacuuaugaaaacaacacuuggguaaaucagacauauguuaacaucagcaacaccaacuuugcugcuggacagucagugguuuccgugaaauuagcgggcaauuccucucucugcccuguuaguggaugggcuauauacaguaaagacaacaguguaagaaucgguuccaagggggauguguuugucauaagggaaccauucauaucaugcucccccuuggaaugcagaaccuucuucuugacucaaggggccuugcuaaaugacaaacauuccaauggaaccauuaaagacaggagcccauaucgaacccuaaugagcuguccuauuggugaaguucccucuccauacaacucaagauuugagucagucgcuuggucagcaagugcuugucaugauggcaucaauuggcuaacaauuggaauuucuggcccagacaauggggcaguggcuguguuaaaguacaacggcauaauaacagacacuaucaagaguuggagaaacaauauauugagaacacaagagucugaaugugcauguguaaaugguucuugcuuuacuguaaugaccgauggaccaaguaauggacaggccucauacaagaucuucagaauagaaaagggaaagauagucaaaucaguugaaaugaaugccccuaauuaucacuaugaggaaugcuccuguuauccugauucuagugaaaucacaugugugugcagggauaacuggcauggcucgaaucgaccgugggugucuuucaaccagaaucuggaauaucagauaggauacauaugcagugggauuuucggagacaauccacgcccuaaugauaagacaggcaguugugguccaguaucgucuaauggagcaaauggaguaaaaggguuuucauucaaauacggcaaugguguuuggauagggagaacuaaaagcauuaguucaagaaacgguuuugagaugauuugggauccgaacggauggacugggacagacaauaacuucucaauaaagcaagauaucguaggaauaaaugaguggucaggauauagcgggaguuuuguucagcauccagaacuaacagggcuggauuguauaagaccuugcuucuggguugaacuaaucagagggcgacccaaagagaacacaaucuggacuagcgggagcagcauauccuuuugugguguaaacagugacacuguggguuggucuuggccagacggugcugaguugccauuuaccauugacaaguaa

SEQ ID NO: 54636 - RNA, 1410 nt, Artificial Sequence; identical to SEQ ID NO: 48740
  derived and/or modified CDS sequence (wt) from neuraminidase__InfluenzaA__AFM72865

SEQ ID NO: 54637 - RNA, 1410 nt, Artificial Sequence
  derived and/or modified CDS sequence (wt) from neuraminidase__InfluenzaA__AFM72875
augaauccaaaucaaaagauaauaacgauuggcucuguuucucucaccauuuccacaauaugcuucuucaugcaaauugccaucuugauaacuacuguaacauugcauuucaagcaauaugaauucaacucccccccaaacaaccaagugaugcugugugaaccaacaauaauagaaagaaacauaacagagauaguguaucugaccaacaccaccauagagaaggaaauaugccccaaacuagcagaauacagaaauuggucaaagccgcaaugugacauuacaggguuugcaccuuuuucuaaggacaauucgauuaggcuuuccgcugguggggacaucugggugacaagagaaccuuaugugucaugcgauccugacaaguguuaucaauuugcccuuggacagggaacaacacuaaacaacguacauucaaauaacacaguacgugauaggaccccuuaucggacccuauugaugaaugaguuagguguuccuuuucaucuggggaccaagcaagugugcauagcaugguccagcucaaguugucacgauggaaaagcauggcugcauguuuguauaacgggggaugauaaaaaugcaacugcuagcuucauuuacaaugggaggcuuguagauaguguuguuucaugguccaaagaaauccucaggacccaggagucagaaugcguuuguaucaauggaacuuguacaguaguaaugacugaugggagugcuucaggaaaagcugauacuaaaauauuauucauugaggagggaaaaaucguucauacuagcacauugucaggaagugcucagcaugucgaggagugcuccugcuauccucgauauccuggugucagaugugucugcagagacaacuggaaaggauccaauaggcccaucguagauauaaacauaaaggaucauaguauugucuccaguuauguguguucaggacuuguuggagacacacccagaaaaagcgacagcuccagcaguagccauuguuuggauccuaacaaugaggaagguggucauggggugaaaggcugggccuuugaugauggaaaugacguguggaugggaagaacgaucagcgagaagucacgcuuaggguaugaaaccuucaaagucauugaaggcugguccaacccuaaguccaaauugcagauaaauaggcaagucauaguugacagagguaauagguccgguuauucugguauuuucucuguugaaggcaaaagcugcaucaaucggugcuuuuauguggaguugauaaggggaagaaaagaggaaacugaagucuuguggaccucaaacaguauuguuguguuuuguggcaccucagguacauauggaacaggcucauggccugauggggcggacaucaaucucaugccuguauaa

SEQ ID NO: 54638 - RNA, 1410 nt, Artificial Sequence; identical to SEQ ID NO: 49470
  derived and/or modified CDS sequence (wt) from neuraminidase__InfluenzaA__AFM72886

SEQ ID NO: 54639 - RNA, 1410 nt, Artificial Sequence; identical to SEQ ID NO: 49470
  derived and/or modified CDS sequence (wt) from neuraminidase__InfluenzaA__AFM72897

SEQ ID NO: 54640 - RNA, 1410 nt, Artificial Sequence
  derived and/or modified CDS sequence (wt) from neuraminidase__InfluenzaA__AFM72908
augaauccaaaucaaaagauaauaacgauuggcucuguuucucucaccauuuccacaauaugcuucuucaugcaaauugccaucuugauaacuacuguaacauugcauuucaagcaauaugaauucaacucccccccaaacaaccaagugaugcugugugaaccaacaauaauagaaagaaacauaacagagauaguguaucugaccaacaccaccauagagaaggaaauaugccccaaacuagcagaauacagaaauuggucaaagccgcaaugugacauuacaggguuugcaccuuuuucuaaggacaauucgauuaggcuuuccgcugguggggacaucugggugacaagagaaccuuaugugucaugcgauccugacaaguguuaucaauuugcccuuggacagggaacaacacuaaacaacguacauucaaauaacacaguacgugauaggaccccuuaucggacccuauugaugaaugaguuagguguuccuuuucaucuggggaccaagcaagugugcauagcaugguccagcucaaguugucacgauggaaaagcauggcugcauguuuguauaacgggggaugauaaaaaugcaacugcuagcuucauuuacaaugggaggcuuguagauaguguuguuucaugguccaaagaaauccucaggacccaggagucagaaugcguuuguaucaauggaacuuguacaguaguaaugacugaugggagugcuucaggaaaagcugauacuaaaauauuauucauugaggagggaaaaaucguucauacuagcacauugucaggaagugcucagcaugucgaggagugcuccugcuauccucgauauccuggugucagaugugucugcagagacaacuggaaaggauccaauaggcccaucguagauauaaacacaaaggaucauagcauugucuccaguuauguguguucaggacuuguuggagacacacccagaaaaaacgauagcuccagcaguagccauuguuuggauccuaacaaugaggaagguggucauggggugaaaggcugggccuuugaugauggaaaugacguguggaugggaagaacgaucagcgagaagucacgcuuaggguaugaaaccuucaaagucauugaaggcugguccaacccuaaguccaaauugcagauaaauaggcaagucauaguugacagagguaauagguccgguuauucugguauuuucucuguugaaggcaaaagcugcaucaaucggugcuuuuauguggaguugauaaggggaagaaaagaggaaacugaagucuuguggaccucaaacaguauuguuguguuuuguggcaccucagguacauauggaacaggcucauggccugauggggcggacaucaaucucaugccuguauaa

SEQ ID NO: 54641 - RNA, 1410 nt, Artificial Sequence
  derived and/or modified CDS sequence (wt) from neuraminidase__InfluenzaA__AFM72919
augaauccaaaucaaaagauaauaacgauuggcucuguuucucucaccauuuccacaauaugcuucuucaugcaaauugccaucuugauaacuacuguaacauugcauuucaagcaacaugaauucaacucccccccaaacaaccaagugaugcugugugaaccaacaauaauagaaagaaacauaacagagauaguguaucugaccaacaccaccauagagaaggaaauaugccccaaacuagcagaauacagaaauuggucaaagccgcaaugugacauuacaggguuugcaccuuuuucuaaggacaauucgauuaggcuuuccgcugguggggacaucugggugacaagagaaccuuaugugucaugcgauccugacaaguguuaucaauuugcccuuggacagggaacaacacuaaacaacguacauucaaauaacacaguacgugauaggaccccuuaucggacccuauugaugaaugaguuagguguuccuuuucaucuggggaccaagcaagugugcauagcaugguccagcucaaguugucacgauggaaaagcauggcugcauguuuguauaacgggggaugauaaaaaugcaacugcuagcuucauuuacaaugggaggcuuguagauaguguuguuucaugguccaaagaaauccucaggacccaggagucagaaugcguuuguaucaauggaacuuguacaguaguaaugacugaugggagugcuucaggaaaagcugauacuaaaauauuauucauugaggagggaaaaaucguucauacuagcacauugucaggaagugcucagcaugucgaggagugcuccugcuauccucgauauccuggugucagaugugucugcagagacaacuggaaaggauccaauaggcccaucguagauauaaacacaaaggaucauagcauugucuccaguuauguguguucaggacuuguuggagacacacccagaaaaaacgauagcuccagcaguagccauuguuuggauccuaacaaugaggaagguggucauggggugaaaggcugggccuuugaugauggaaaugacguguggaugggaagaacgaucagcgagaagucacgcuuaggguaugaaaccuucaaagucauugaaggcugguccaacccuaaguccaaauugcagauaaauaggcaagucauaguugacagagguaauagguccgguuauucugguauuuucucuguugaaggcaaaagcugcaucaaucggugcuuuuauguggaguugauaaggggaagaaaagaggaaacugaagucuuguggaccucaaacaguauuguuguguuuuguggcaccucagguacauauggaacaggcucauggccugauggggcggacaucaaucucaugccuguauaa

SEQ ID NO: 54642 - RNA, 1410 nt, Artificial Sequence; identical to SEQ ID NO: 51226
  derived and/or modified CDS sequence (wt) from neuraminidase__InfluenzaA__AFM72930

SEQ ID NO: 54643 - RNA, 1410 nt, Artificial Sequence
  derived and/or modified CDS sequence (wt) from neuraminidase__InfluenzaA__AFM72941
augaauccaaaucaaaagauaauaacgauuggcucuguuucucucaccauuuccacaauaugcuucuucaugcaaauugccaucuugauaacuacuguaacauugcauuucaagcaauaugaauucaacucccccccaaacaaccaagugaugcugugugaaccaacaauaauagaaagaaacauaacagagauaguguaucugaccaacaccaccauagagaaggaaauaugccccaaacuagcagaauacagaaauuggucaaagccgcaaugugacauuacaggauuugcaccuuuuucuaaggacaauucgauuaggcuuuccgcugguggggacaucugggugacaagagaaccuuaugugucaugcgauccugacaaguguuaucaauuugcccuuggacagggaacaacacuaaacaacgugcauucaaauaacacaguacgugauaggaccccuuaucggacccuauugaugaaugaguuagguguuccuuuucaucuggggaccaagcaagugugcauagcaugguccagcucaaguugucacgauggaaaagcauggcugcauguuuguauaacgggggaugauaaaaaugcaacugcuagcuucauuuacaaugggaggcuuguagauaguguuguuucaugguccaaagaaauccucaggacccaggagucagaaugcgucuguaucaauggaacuuguacaguaguaaugacugaugggagugcuucaggaaaagcugauacuaaaauacuauucauugaggaggggaaaaucguucauacuagcacauugucaggaagugcucagcaugucgaggagugcucuugcuauccucgauauccuggugucagaugugucugcagagacaacuggaaaggcuccaauaggcccaucguagauauaaacauaaaggaucauagcauuguuuccaguuauguguguucaggacuuguuggagacacacccagaaaaaacgacagcuccagcaguagccauuguuuggauccuaacaaugaagaagguggucauggagugaaaggcugggccuuugaugauggaaaugacguguggaugggaagaacgaucagcgagaagucacgcuuaggguaugaaaccuucaaagucauugaaggaugguccaaccauaaguccaaauugcagauaaauaggcaagucauaguugacagagguaauagguccgguuauucugguauuuucucuguugaaggcaaaagcugcaucaaucggugcuuuuauguggaguugauuaggggaagaaaagaggaaacugaagucuuguggaccucaaacaguauuguuguguuuuguggcaccucagguacauauggaacaggcucauggccugauggggcggaccucaaucucaugccuauauaa

SEQ ID NO: 54644 - RNA, 1410 nt, Artificial Sequence; identical to SEQ ID NO: 51226
  derived and/or modified CDS sequence (wt) from neuraminidase__InfluenzaA__AFM72952

SEQ ID NO: 54645 - RNA, 1410 nt, Artificial Sequence; identical to SEQ ID NO: 51226
  derived and/or modified CDS sequence (wt) from neuraminidase__InfluenzaA__AFM72963

SEQ ID NO: 54646 - RNA, 1410 nt, Artificial Sequence; identical to SEQ ID NO: 51226
  derived and/or modified CDS sequence (wt) from neuraminidase__InfluenzaA__AFM72974

SEQ ID NO: 54647 - RNA, 1410 nt, Artificial Sequence; identical to SEQ ID NO: 54567
  derived and/or modified CDS sequence (wt) from neuraminidase__InfluenzaA__AFM72985

SEQ ID NO: 54648 - RNA, 1410 nt, Artificial Sequence
  derived and/or modified CDS sequence (wt) from neuraminidase__InfluenzaA__AFM72996
augaauccaaaucaaaagauaauaacgauuggcucuguuucucucaccauuuccacaauaugcuucuucaugcaaauugccaucuugauaacuacuguaacauugcauuucaagcaauaugaauucaacucccccccaaacaaccaagugaugcugugugaaccaacaauaauagaaagaaacauaacagagauaguguaucugaccaacaccaccauagagaaggaaauaugccccaaacuagcagaauacagaaauuggucaaaaccgcaaugugacauuacaggauuugcaccuuuuucuaaggacaauucgauuaggcuuuccgcugguggggacaucugggugacaagagaaccuuaugugucaugcgacccugacaaguguuaucaauuugcccuuggacagggaacaacacuaaacaacgugcauucaaauaacacaguacgugauaggaccccuuaucggacccuauugaugaaugaguuagguguuccuuuucaucuggggaccaagcaagugugcauagcaugguccagcucaaguugucacgauggaaaagcauggcugcauguuuguauaacgggggaugauaaaaaugcaacugcuagcuucauuuacaaugggaggcuuguagauaguguuguuucaugguccaaagaaauucucaggacccaggagucagaaugcguuuguaucaauggaacuuguacaguaguaaugacugauggaagugcuucaggaaaagcugauacuaaaauacuauucauugaggaggggaaaaucguucauacuagcacauugucaggaagugcucagcaugucgaggagugcucuugcuauccucgauauccuggugucagaugugucugcagagacaacuggaaaggcuccaauaggcccaucguagauauaaacauaaaggaucauagcauuguuuccaguuauguguguucaggacuuguuggagacacacccagaaaaaacgacagcuccagcaguagccauuguuuggauccuaacaaugaagaagguggucauggagugaaaggcugggccuuugaugauggaaaugacguguggaugggaagaacaaucaacgagacgucacgcuuaggguaugaaaccuucaaagucauugaaggcugguccaacccuaaguccaaauugcagauaaauaggcaagucauaguugacagagguaauagguccgguuauucugguauuuucucuguugaaggcaaaagcugcaucaaucggugcuuuuauguggaguugauuaggggaagaaaagaggaaacugaagucuuguggaccucaaacaguauuguuguguuuuguggcaccucagguacauauggaacaggcucauggccugauggggcggaccucaaucucaugccuauauaa

SEQ ID NO: 54649 - RNA, 1410 nt, Artificial Sequence; identical to SEQ ID NO: 54648
  derived and/or modified CDS sequence (wt) from neuraminidase__InfluenzaA__AFM73007

SEQ ID NO: 54650 - RNA, 1410 nt, Artificial Sequence
  derived and/or modified CDS sequence (wt) from neuraminidase__InfluenzaA__AFM73018
augaauccaaaccaaaagauaauaaccauugguucggucuguaugacaauuggaauggcuaacuuaauauuacaaauuggaaacauaaucucaauauggauuagccacucaauucaacuugggaaucaaagucagauugaaacaugcaaucaaagcgucauuacuuaugaaaacaacacuuggguaaaucagacauauguuaacaucagcaacaccaacuuugcugcuggacagucagugguuuccgugaaauuagcgggcaauuccucucucugcccuguuaguggaugggcuauauacaguaaagacaacaguauaagaaucgguuccaagggggauguguuugucauaagggaaccauucauaucaugcucccccuuggaaugcagaaccuucuucuugacucaaggggccuugcuaaaugacaaacauuccaauggaaccauuaaagacaggagcccauaucgaacccuaaugagcuguccuauuggugaaguucccucuccauacaacucaagauuugagucagucgcuuggucagcaagugcuugucaugauggcaucaauuggcuaacaauuggaauuucuggcccagacaauggggcaguggcuguguuaaaguacaacggcauaauaacagacacuaucaagaguuggagaaacaauauauugagaacacaagagucugaaugugcauguguaaaugguucuugcuuuaccauaaugaccgauggaccaagugauggacaggccucauacaagaucuucagaauagaaaagggaaagauagucaaaucagucgaaaugaaugccccuaauuaucacuaugaggaaugcuccuguuauccugauucuagugaaaucacaugugugugcagggauaacuggcauggcucgaaucgaccgugggugucuuucaaccagaaucuggaauaucagauaggauacauaugcagugggauuuucggagacaauccacgcccuaaugauaagacaggcaguugugguccaguaucgucuaauggagcaaauggaguaaaaggauuuucauucaaauacggcaaugguauuuggauagggagaacuaaaagcauuaguucaagaaaagguuuugagaugauuugggauccaaacggauggacugggacagacaauaacuucucaauaaagcaagauaucguaggaauaaaugaguggucaggauauagcgggaguuuuguucagcauccagaacuaacagggcuggauuguauaagaccuugcuucuggguugaacuaaucagagggcgacccaaagagaacacaaucuggacuagcgggagcagcauauccuuuugugguguaaacagugacacuguggguuggucuuggccagacggugcugaguugccauuuaccauugacaaguaa

SEQ ID NO: 54651 - RNA, 1410 nt, Artificial Sequence; identical to SEQ ID NO: 54650
  derived and/or modified CDS sequence (wt) from neuraminidase__InfluenzaA__AFM73028

SEQ ID NO: 54652 - RNA, 1410 nt, Artificial Sequence; identical to SEQ ID NO: 54650
  derived and/or modified CDS sequence (wt) from neuraminidase__InfluenzaA__AFM73038

SEQ ID NO: 54653 - RNA, 1410 nt, Artificial Sequence; identical to SEQ ID NO: 50485
  derived and/or modified CDS sequence (wt) from neuraminidase__InfluenzaA__AFM73048

SEQ ID NO: 54654 - RNA, 1410 nt, Artificial Sequence
  derived and/or modified CDS sequence (wt) from neuraminidase__InfluenzaA__AFM73058
augaauccaaaccaaaagauaauaaccauugguucguucuguaugacaauuggauuggcuaacuuaauauuacaaauuggaaacauaaucucaauauggauuagccacucaauucaacuugggaaucaaaaucagauugaaacaugcaaucaaagcgucauuacuuaugaaaacaacacuuggguaaaucagacauauguuaacaucagcaacaccaacuuugcugcuggacagucagugguuuccgugaaauuagcgggcaauuccucucucugcccuguuaguggaugggcuauauacaguaaagacaacaguguaagaauugguuccaagggggauguguuugucauaagggaaccauucauaucaugcucccccuuggaaugcagaaccuucuucuugacucaaggggccuugcuaaaugacaaacauuccaauggaaccauuaaagacaggagcccauaucgaacccuaaugagcuguccuauuggugaaguucccucuccauacaacucaagauuugagucagucgcuuggucagcaagugcuugucaugauggcaucaauuggcuaacaauuggaauuucuggcccagacaauggggcaguggcuguguuaaaguacaacggcauaauaacagacacuaucaagaguuggagaaacaauauauugagaacacaagagucugaaugugcauguguaaaugguucuugcuuuacuguaaugaccgauggaccaagugauggacaggccucauacaagaucuucagaauagaaaagggaaagauagucaaaucagucgaaaugaaugccccuaauuaucacuaugaggaaugcuccuguuauccugauucuagugaaaucacaugugugugcagggauaacuggcauggcucgaaucgaccgugggugucuuucaaccagaaucuggaauaucggauaggauacauaugcagugggauuuucggagacaauccacgcccuaaugauaagacaggcaguugugguccaguaucgucuaauggagcaaauggaguaaaaggauuuucauucaaauacggcaaugguguuuggauagggagaacuaaaagcauuaguucaagaaacgguuuugagaugauuugggauccgaacggauggacugggacagacaaaaacuucucaauaaagcaagauaucguaggaauaaaugaguggucaggauauagcgggaguuuuguucagcauccagaacuaacagggcuggauuguauaagaccuugcuucuggguugaacuaaucagagggcgacccaaagagaacacaaucuggacuagcgggagcagcauauccuuuugugguguaaacagugacacuguggguuggucuuggccagacggugcugaguugccauuuaccauugacaaguaa

SEQ ID NO: 54655 - RNA, 1410 nt, Artificial Sequence; identical to SEQ ID NO: 50485
  derived and/or modified CDS sequence (wt) from neuraminidase__InfluenzaA__AFM73068

SEQ ID NO: 54656 - RNA, 1413 nt, Artificial Sequence; identical to SEQ ID NO: 46963
  derived and/or modified CDS sequence (wt) from neuraminidase__InfluenzaA__AFM73480

SEQ ID NO: 54657 - RNA, 1350 nt, Artificial Sequence
  derived and/or modified CDS sequence (wt) from neuraminidase__InfluenzaA__AFM78569
augaauccaaaucagaagauaauaaccauuggaucaaucuguaugguaauuggaauaguuagcuuaauguuacaaauugggaacaugaucucaauaugggucauucauucaauucagacagggaaucaacaccaagcugaaucaaucagcaauacuaacccucuuacugagaaagcuguggcuucaguaacauuagcgggcaauucaucucuuugccccauuagaggaugggcuguacacaguaaggacaacaauauaaggaucgguuccaagggggauguguuuguuauuagagagccguucaucucaugcucccaccuggaaugcagaacuuucuucuugacucagggagccuugcugaaugacaagcacuccaacgggacugucaaagacagaagcccucacagaacauuaaugaguuguccugugggugaggcucccucuccauauaacucaagguuugagucuguugcuuggucagcaagugcuugccaugauggcaccaguugguugacaauuggaauuucuggcccagacaaugaggcuguggcuguauugaaauacaauggcauaauaacagacacuaucaagaguuggaggaacgacauacugagaacucaagagucugaaugugcauguguaaauggcucuugcuuuacuguaaugacugauggaccaaguaaugggcaggcaucauauaagaucuucaaaauggaaaaaggaaaaguggucaaaucagucgaauuggaugcuccuaauuaucacuaugaggaaugcuccuguuauccugaugccggcgaaaucacauguguuugcagggauaauuggcauggcucaaauaggccauggguaucuuucaaucaaaauuuggaguaucaaauaggauauauaugcaguggaguuuucggagacaauccacgccccaaugauggaacagguaguuguggcccgauguccccuaacggggcauaugggguaaaaggguuuucauuuaaauacggcaaugguguuuggaucgggagaaccaaaagcacuaauuccaggagcggcuuugaaaugauuugggauccaaauggguggacuggaacggacaguagcuuuucagugaaacaagauauaguagcaauaacugauuggucaggauauagcgggaguuuuguccagcauccagaacugacaggauuagauugcauaagaccuuguuucuggguugaguuaaucagagggcggcccaaagagagcacaauuuggacuagugggagcagcauaucuuuuugugguguaaauagugacacugugaguuggucuuggccagacggugcugaguugccauucaccauugacaaguag

SEQ ID NO: 54658 - RNA, 1410 nt, Artificial Sequence
  derived and/or modified CDS sequence (wt) from neuraminidase__InfluenzaA__AFM85180
augaauccaaaucaaaaaauaauaacgauuggcucuguuucucucaccauugccacaauaugcuuccuuacgcaaauugccauccugguaacuacuguaacauugcauuucaagcaauaugaaugcaacuccuccccaaacaaccaagugaugcugugugaaccaacaauaauagaaagaaacauaacagagauaguguaucugaccaacaccaccauagagaaggaaauaugccccaaacuagcagaauacagaaauuggucaaagccgcaauguaacauuacuggauuugcaccuuuuucuaaggacaauucgauucggcuuuccgcugguggggacaucuggguuacaagagaaccuuaugugucaugcgguccugacaaguguuaucaauuugcccuuggacagggaacaacacuaaacaacgggcauucaaaugacacaguacaugauaggaccccuuaucggacccuauugaugaaugaguuggguguuccauuucauuugggaaccaagcaagugugcauagcaugguccagcucaaguugucacgauggaaaagcauggcugcauguuuguguaacgggggaugauaaaaaugcaacugcuagcuucauuuacaaugggaggcuuguagauaguauagguucaugguccaaaaaaauccucaggacccaggagucugaaugcguuuguaucaauggaacuuguacaguaguaaugacugaugggagugcuucaggaaaagcugauacuaaaauacuauucauugaagaggggaaaaucguucauacuagccuauugucagggagugcucagcaugucgaggagugcuccuguuauccucgauauccuggugucagaugugucugcagagacaacuggaaaggcuccaauaggcccaucguagauauaaauguaaaggauuauagcauuguuuccaguuaugugugcucaggacuuguuggagacacacccagaaaaaacgacagcuccagcaguagccauugcuuggauccuaacaaugaggaagguggucauggagugaaaggcugggccuuugaugauggaaaugacguguggaugggaagaacgaucagcgagaaguuacgcucaggauaugaaaccuucaaagucauugaaggcugguccaaaccuaacuccaaacugcagauaaauaggcaagucauaguugacagagguaauagguccgguuauucugguauuuucucuguugaaggcaaaagcugcaucaaucggugcuuuuauguggagcugauaaggggaaggaaccaggaaacugaagucuuguggaccucaaacaguauuguuguguuuuguggcaccucggguacauauggaacaggcucauggccugauggggcggacaucaaucucaugccuauauaa

SEQ ID NO: 54659 - RNA, 1410 nt, Artificial Sequence
  derived and/or modified CDS sequence (wt) from neuraminidase__InfluenzaA__AFN11830
augaauccaaaucaaaagauaauaacaauuggcucugucucucucaccauugcaacaguaugcuuccucaugcagauugccauccugguaacuacuguaacauugcauuuuaagcaauaugagugcgacucccccgcgagcaaccaaguaaugccgugugaaccaauaauaauagaaaggaacauaacagagauaguguauuugaauaacaccaccauagagaaagagauaugccccaaaguaguggaauacagaaauuggucaaagccgcaaugucaaauuacaggauuugcaccuuuuucuaaggacaauucaauccggcuuucugcugguggggacauuugggugacgagagaaccuuaugugucaugcgauccuggcaaguguuaucaauuugcacuagggcaggggaccacacuagacaacaaacauucaaaugacacaauacaugauagaaucccucaucgaacccuauuaaugaaugaguuggguguuccauuucauuuaggaaccaggcaaguguguauagcaugguccagcucaaguugucacgauggaaaagcauggcugcauguuuguaucacuggggaugacaaaaaugcaacugcuagcuucauuuaugacgggaggcuuguggacaguauugguucauggucucaaaauauccucagaacccaggagucggaaugcguuuguaucaaugggacuugcacaguaguaaugacugauggaagugcuucaggaagagccgauacuagaauacuauucauugaagaggggaaaauuguccauauuagcccauugucaggaagugcucagcauguagaagaguguuccuguuauccuagauauccuggcgucagauguaucugcagagacaacuggaaaggcucuaauaggcccgucguagacauaaauauggaagauuauagcauugauuccaguuaugugugcucagggcuuguuggcgacacaccuagaaacgacgacagaucuagcaauagcaauugcaggaauccuaacaaugagagagggaaucaaggagugaaaggcugggccuuugacaauggagaugacguguggaugggaagaacgaucagcaaggauuuacgcucagguuaugaaacuuucaaagucauuggugguugguccacaccuaauuccaaaucgcagaucaauagacaagucauaguugacagcgauaaucggucagguuacucugguauuuucucuguugagggcaaaagcugcaucaauaggugcuuuuauguggaguugauaaggggaaggaaacaggagacuagaguaugguggaccucaaacaguauuguuguguuuuguggcacuucagguaccuauggaacaggcucauggccugauggggcgaacaucaauuucaugccuauauaa

SEQ ID NO: 54660 - RNA, 1410 nt, Artificial Sequence
  derived and/or modified CDS sequence (wt) from neuraminidase__InfluenzaA__AFN11831
augaauccaaaucaaaagauaauaacaauuggcucugucucucucaccauugcaacaauaugcuuccucaugcaaauugccauccugguaacuacuguaacauugcauuucaagcaauaugagugcgacucucccgcaaacaaccaaguaaugccgugugaaccaauaauaauagaaaggaacauaacagagauaguguauuugacuaacaccaccauagagaaagagauaugccccaaauuaguggaauacagaaauuggucaaagccgcaauguaaaauuacaggauuugcaccuuuuucuaaggacaauucaauucggcuuucugcugguggggacauuugggugacgagagaaccuuaugugucaugcgauccuggcaaguguuaucaauuugcacucgggcaggggaccacacuagacaacaaacauucaaaugacacaauacaugauagaaccccucaucgaacccuauugaugaaugaguuggguguuccauuucauuugggaaccaggcaaguguguauagcaugguccagcucaaguugucacgauggaaaagcauggcugcauguuugugucacuggguaugauaaaaaugcaacugcuagcuucauuuacgaugggaggcuuguagacaguauugguucauggucuaaaaauauccucaggacccaggagucggaaugcguuuguaucaaugggacuuguacaguaguaaugacugauggaagugcuucaggaagagcugauacuaaaauacuauucauugaagaggggaaaauuguucauauuagcccauugucaggaagugcucagcauguagaggaguguuccuguuauccucgauauccuggugucagaugugucugcagagacaacuggaaaggcucuaauaggcccgucguagauauaaaugugaaagauuauagcauuguuuccaguuaugugugcucagggcuuguuggcgacacacccagaaacaacgacagaucuagcaguagcuauugccggaauccuaacaaugagaaagggaaucauggagugaaaggcugggccuuugacgauggaaaugacguguggaugggaagaacgaucagcgaggagucacgcucagguuaugaaaccuucaaagucauuggugguugguccacaccuaauuccaaauugcagauaaauaggcaagucauaguugacagcgauaauagguccgguuauucugguauuuucucuguugagggcaaaagcugcaucaauaggugcuuuuauguggaguugauaaggggaagggaacaggaaacuagagucugguggaccucaaacaguauuguuguguuuuguggcacuucagguaccuaugggacaggcucauggccugauggggcggacaucaaucucaugccuauauaa

SEQ ID NO: 54661 - RNA, 1410 nt, Artificial Sequence; identical to SEQ ID NO: 46588
  derived and/or modified CDS sequence (wt) from neuraminidase__InfluenzaA__AFN11833

SEQ ID NO: 54662 - RNA, 1410 nt, Artificial Sequence; identical to SEQ ID NO: 48523
  derived and/or modified CDS sequence (wt) from neuraminidase__InfluenzaA__AFN11835

SEQ ID NO: 54663 - RNA, 1410 nt, Artificial Sequence
  derived and/or modified CDS sequence (wt) from neuraminidase__InfluenzaA__AFN11836
augaauccaaaucaaaagauaauaacaauuggcucuguuucucucaccauugccacaaugugcuuccuuaugcaaauugccauccugguaacuacuguaacauugcauuucaagcaauaugagugcagcucccccccaaacaaccaaguaaugccgugugaaccaacaauaauagaaagaaacauaacagagauaguguauuugacuaacaccaccauagagaaagagauaugccccaaacuaguagaauacagaaauuggucaaagccgcaauguaaaauuacaggauuugcaccuuuuucuaaggacaauucaauucggcuuuccgcugguggagacauuugggugacaagagaaccuuaugugucaugcgauccuggcaaguguuaucaauuugcacuugggcagggaaccacacuaaacaacaggcauucaaaugacacaguacaugauaggaccccuuaucgaacccuccugaugaaugaguuggguguuccauuucacuugggaaccaagcaagugugcauagcaugguccagcucaaguugucacgauggaaaagcauggcugcauguuugugucacugggcaugauaaaaaugcaacugccagcuucauuuacgaugggaggcuuguagacaguauugguucaugguccaaaaauauccucaggacccaggagucggaaugcguuuguaucaaugggacuuguacaguaguaaugacugauggaagugcuucagaaagagcugauacuaaaauacuauucauugaagaggggaaaaucauucauauuagcccauugucaggaagugcucagcauguagaggagugcuccuguuauccucgauauccuggugucagaugugucugcagagacaacuggaaaggcuccaauaggcccaucguagauauaaaugugaaagauuauagcauuguuuccaguuaugugugcucagggcuuguuggagacacacccagaaaaaacgacagauccagcaguagcuauugccggaauccuaacaaugagaaagggagucauggagugaaaggcugggccuuugacgauggaaaugacguguggaugggaagaacaaucggcgaggaguuacgcucagguuaugaaaccuucaaagucauuggagguugguccacaccuaacuccaaauugcagauaaauaggcaagucauaguugacagcgguaauagguccgguuauucugguauuuucucuguugagggcaaaagcugcaucaaucggugcuuuuauguggaguugauaaggggaagggaacaggaaacuagagucugguggaccucaaacaguauuguuguguuuuguggcaccucagguacauauggaacaggcucauggccugauggggcggacaucaaucucaugccuauauaa

SEQ ID NO: 54664 - RNA, 1410 nt, Artificial Sequence
  derived and/or modified CDS sequence (wt) from neuraminidase__InfluenzaA__AFN11839
augaauccaaaucaaaagauaauaacaauuggcucuguuucucucaccauugccacaauaugcuuccuuaugcaaauugccauccugguaacuacuguaacauugcauuucaagcaauaugagugcagcucccccccaaacaaccaaguaaugccaugucaaccaacaauaauagaaagaaacauaacagagauaguguauuugacuaacaccaccauagagaaagagauaugccccaaacuaguagaauacagaaauuggucaaagccgcaauguaaaauuacaggauuugcaccuuuuucuaaggacaauucaauucggcuuuccgcugguggagauauuugggugacaagagaaccuuaugugucaugugauccuggcaaguguuaucaauuugcacuuggacagggaaccacacuaaacaacaggcauucaaaugacacaguacaugauaggaccccuuaucgaacccucuugaugaaugaguuggguguuccauuucauuugggaaccaagcaagugugcauagcaugguccagcucaaguugucacgauggaaaagcauggcugcauguuugugucacugggcaugaugaaaaugcaacugcuagcuucauuuacgaugggaggcuuguagauaguauugguucaugguccaaaaauauccucaggacccaggagucggaaugcguuuguaucaaugggacuuguacaguaguaaugacugauggaagugcuucagaaagagcugauacuaaaauacuauucauugaagaggggaaaaucguucauauuagcccauugucaggaagugcucagcauguagaggagugcuccuguuauccucgauauccuggugucagaugugucugcagagacaacuggaaaggcuccaauaggcccaucguagauauaaauaugaaagauuauagcauuguuuccaguuaugugugcucagggcuuguuggagacacacccagaaaaaacgacagcuccagcaguagcuauugccggaauccuaacaaugagaaagggagucauggagugaaaggcugggccuuugacgauggaaaugacguguggaugggaagaacgaucagcgaggaguuacgcucagguuaugaaaccuucaaagucauuggagguugguccacaccuaauuccaaauugcagauaaauaggcaagucauaguugacagcgguaauagguccgguuauucugguauuuucucuguugaaggcaaaagcugcaucaaucggugcuuuuauguggaguugauaaggggaaggaaacaggaaacuaaagucugguggaccucaaacaguauuguuguguuuuguggcaccucagguacauauggaacaggcucauggccugauggggcggacaucaaucucaugccuauauaa

SEQ ID NO: 54665 - RNA, 1410 nt, Artificial Sequence
  derived and/or modified CDS sequence (wt) from neuraminidase__InfluenzaA__AFN11840
augaauccaaaucaaaagauaauaacaauuggcucuguuucucucacuauugccacaauaugcuuccuuaugcaaauugccauccugguaacuacuguaacauugcauuucaagcaauaugagugcaacucccccccaaacaaccaaguaaugcugugugaaccaacaauaauagaaagaaacauaacagagauaguguauuugacuaacaccaccauagagaaagaaauaugccccaaacuagcagaauacagaaauuggucaaagccgcaauguaaaauuacaggauuugcaccuuuuucuaaggacaauucaauucggcuuuccgcugguggagacauuugggugacaagagaaccuuaugugucaugcgauccuggcaaguguuaucaauuugcacuuggacagggaaccacacuaaacaacaggcauucaaaugacacaguacaugauaggaccccuuaucgaacccucuugaugaaugaguuggguguuccauuucauuugggaaccaagcaagugugcauagcaugguccagcucaaguugucacgauggaaaagcauggcugcauguuugugucacugggcaugaugaaaaugcaacugcuagcuucauuuacgaugggaggcuuguagauaguauugguucaugguccaaaaauauccucaggacccaggagucggaaugcguuuguaucaauggaacuuguacaguaguaaugacugauggaagugcuucagaaagagcugauacuaaaauacuauucauugaagaggggaaaaucguucauauuagcccauugucaggaagugcucagcaugucgaggagugcuccuguuauccucgauauccuggugucagaugugucugcagagacaacuggaaaggcuccaauaggcccaucguagauauaaaugugaaagauuauagcauuguuuccaguuaugugugcucaggacuuguuggagacacacccagaaaaaacgacagcuccagcaguagcuauugccggaauccuaacaaugagaaagggagucauggagugaaaggcugggccuuugaugauggaaaugacguguggaugggaagaacgaucggcgaggaguuacgcucagguuaugaaaccuucaaagucauuggaggcugguccacaccuaacuccaaauugcagauaaauaggcaagucauaguugacagagguaauagguccgguuauucugguauuuucucuguugaaggcaaaagcugcaucaaucggugcuuuuauguggaguugguaaggggaaggaaacaggaaacugaagucugguggaccucaaacaguauuguuguguuuuguggcaccucagguacauauggaacaggcucauggccugauggggcggacaucaaucucaugccuauauaa

SEQ ID NO: 54666 - RNA, 1410 nt, Artificial Sequence
  derived and/or modified CDS sequence (wt) from neuraminidase__InfluenzaA__AFN11841
augaauccaaaucaaaagauaauaacgauuggcucuguuucccucaccauuuccacaauaugcuucuucaugcaaauugccauccugauaacuacuguaacauugcauuucaagcaauaugaauucaacucccccccaaacaaccaagugaugcugugugaaccaacaauaauagaaagaaacauaacagagauaguguaucugaccaacaccaccauagagaaggaaauaugccccaaacuagcagaauacagaaauuggucaaagccgcaauguaacauuacaggauuugcaccuuuuucuaaggacaauucgauucggcuuuccgcugguggggacaucugggugacaagagaaccuuaugugucaugcgauccugacaaauguuaucaauuugcccuuggacagggaacaacacuaaacaacgugcauucaaaugacacaguacaugauaggaccccuuaucggacccuauugaugaaugaguuggguguuccauuucaucuggggaccaagcaagugugcauagcaugguccagcucaaguugucacgauggaaaagcauggcugcauguuuguguaacgggggaugaugaaaaugcaacugcuagcuucauuuacaaugggaggcuuguagauaguauuguuucaugguccaaaaaaauccucaggacccaggagucagaaugcguuuguaucaauggaacuuguacaguaguaaugacugaugggagugcuucaggaaaagcugauacuaaaauacuauucauugaggaggggaaaauuguucauacuagcacauuaucaggaagugcucagcaugucgaggagugcuccuguuauccucgauauccuggugucagaugugucugcagagacaacuggaaaggcuccaauaggcccaucguagauauaaacauaaaggauuauagcauuguuuccaguuaugugugcucaggacuuguuggagacacacccagaaaaaacgacagcuccagcaguagccauugcuuggauccaaacaaugaggaagguggucauggagugaaaggcugggccuuugaugauggaaaugacguguggaugggaagaacgaucagcgagaaguuacgcucaggauaugaaaccuucaaagucauugaaggcugguccaacccuaacuccaaauugcagauaaauaggcaagucauaguugacagagguaacagguccgguuauucugguauuuucucuguugaaggcaaaagcugcaucaaucggugcuuuuauguggaguugauaaggggaagaaaacaggaaacugaagucuuguggaccucaaacaguauuguuguguuuuguggcaccucagguacauauggaacaggcucauggccugauggggcggacaucaaucucaugccuauauaa

SEQ ID NO: 54667 - RNA, 1410 nt, Artificial Sequence; identical to SEQ ID NO: 54029
  derived and/or modified CDS sequence (wt) from neuraminidase__InfluenzaA__AFN11842

SEQ ID NO: 54668 - RNA, 1410 nt, Artificial Sequence
  derived and/or modified CDS sequence (wt) from neuraminidase__InfluenzaA__AFN11844
augaauccaaaucaaaagauaauaacgauuggcucuguuucucucaccauuuccacaauaugcuucuucaugcaaauugccaucuugauaacuacuguaacauugcauuucaagcaauaugaauucaacucccccccaaacaaccaagugaugcugugugaaccaacaauaauagaaagaaauauaacagagauaguguaucugaccaacaccaccauagagaaggaaauaugccccaaacuagcagaauacagaaauuggucaaagccgcaauguaacauuacaggauuugcaccuuuuucuaaggacaauucgauuaggcuuuccgcugguggggacaucugggugacaagagaaccuuaugugucaugcgauccugacaaguguuaucaauuugcccuuggacagggaacaacacuaaacaacgugcauucaaaugacacaguacgugauaggaccccuuaucggacccuauugaugaaugaguuagguguuccauuucaucuggggaccaagcaagugugcauagcaugguccagcucaaguugucacgauggaaaagcauggcugcauguuuguguaacgggggaugauaaaaaugcaacugcuagcuucauuuacaaugggaggcuuguagauaguauuguuucaugguccaaagaaauccucaggacccaggagucagaaugcguuuguauuaauggaacuuguacaguaguaaugacugaugggagugcuucaggaaaagcugauacuaaaauacuauucauugaggaggggaaaaucguucauacuagcacauugucaggaagugcucagcaugucgaggagugcuccugcuauccucgauauccuggugucagaugugucugcagagacaacuggaaaggcuccaauaggcccauaguagauauaaacauaaaggauuauagcauuguuuccaguuaugugugcucaggacuuguuggagacacacccagaaaaaacgacagcuccagcaguagccauugcuuggauccuaacaaugaagaagguggucauggagugaaaggcugggccuuugaugauggaaaugacguguggaugggaagaacgaucagcgagaaguuacgcucaggauaugaaaccuucaaagucauugaaggcugguccaacccuaauuccaaauugcagauaaauaggcaagucauaguugacagagguaauagguccgguuauucugguauuuucucuguugaaggcaaaagcugcaucaaucggugcuuuuauguggaguugauaaggggaagaaaagaggaaacugaagucuuguggaccucaaacaguauuguuguguuuuguggcaccucagguacauauggaacaggcucauggccugauggggcggacaucggucucaugccuauguag

SEQ ID NO: 54669 - RNA, 1410 nt, Artificial Sequence; identical to SEQ ID NO: 54588
  derived and/or modified CDS sequence (wt) from neuraminidase__InfluenzaA__AFN11845

SEQ ID NO: 54670 - RNA, 1410 nt, Artificial Sequence
  derived and/or modified CDS sequence (wt) from neuraminidase__InfluenzaA__AFN11847
augaauccaaaucaaaagauaauaacaauuggcucaguuucucucacuauugccacaauaugcuuccuuaugcaaauugccauccugguaacuacuguaacauugcauuucaagcaauaugaaugcaacucccccccaaacaaccaaguaaugcugugugaaccaacaauaauagaaagaaacauaacagagauaguguaucugaccaacaccaccauagagaaagaaauaugccccaaacuagcagaauacagaaauuggucaaagccgcaauguaaaauuacaggauuugcaccuuuuucuaaggacaauucaauucggcuuuccgcugguggagacauuugggugacaagagaaccuuaugugucaugcgauccuggcaaguguuaucaauuugcccuuggacagggaacaacacuaaacaacaggcauucaaaugacacaguacaugauaggaccccuuaucgaacccuauugaugaaugaguuggguguuccauuucauuugggaaccaagcaagugugcauagcaugguccagcucaaguugucacgauggaaaagcauggcugcauguuuguguaacugggcauaaugaaaaugcaacugcuagcuucauuuacgaugggaggcuuguggauaguauugguucaugguccaaaaauauccucaggacccaggagucggaaugcguuuguaucaauggaacuuguacaguaguaaugacugauggaagugcuucaggaagagcugauacuaaaauacuauucauugaagaggggaaaaucguucauauuagcccauugucaggaagugcucagcaugucgaggagugcuccuguuauccucgauauccuggugucagaugugucugcagagacaacuggaaaggcuccaauaggcccaucguagauauaaaugugaaagauuauagcauuguuuccaguuaugugugcucaggacuuguuggagacacacccagaaaaaacgacagcuccagcaguagcuauugccugaauccuaacaaugaggaagggggucauggagugaaaggcugggccuuugaugauggaaaugauguguggaugggaagaacgaucagcgagaaguuacgcucagguuaugaaaccuucaaagucauuggaggcugguccaaaccuaacuccaaauugcagauaaauaggcaagucauaguugacagagguaauagguccgguuauucugguauuuucucuguugaaggcaaaagcugcaucaaucggugcuuuuauguggaguugauaaggggaaggaaacaggaaacugaagucugguggaccucaaacaguauuguuguguuuuguggcaccucagguacauauggaacaggcucauggccugauggggcggacaucaaucucaugccuauauaa

SEQ ID NO: 54671 - RNA, 1410 nt, Artificial Sequence
  derived and/or modified CDS sequence (wt) from neuraminidase__InfluenzaA__AFN11848
augaauccaaaucaaaagauaauaacgauuggcucuguuucccucaccauuuccacaauaugcuucuucaugcaaauugccauccugauaacuacuguaacauugcauuucaagcaauaugaauucaacucccccccaaacaaccaagugaugcugugugaaccaacaauaauagaaagaaacauaacagagauaguguaucugaccaacaccaccauagagaaggaaauaugccccaaacuagcagaauacagaaauuggucaaagccgcaauguaacauuacaggauuugcaccuuuuucuaaggacaauucgauucggcuuuccgcugguggggacaucugggugacaagagaaccuuaugugucaugcgauccugacaaguguuaucaauuugcccuuggacagggaacaacacuaaacaacgugcauucaaaugacacaguacaugauaggaccccuuaucggacccuauugaugaaugaguuggguguuccauuucaucuggggaccaagcaagugugcauagcaugguccagcucaaguugucacgauggaaaagcauggcugcauguuuguguaacgggggaugaugaaaaugcaacugcuagcuucauuuacaaugggaggcuuguagauaguauuguuucaugguccaaaaaaauccucaggacccaggagucagaaugcguuuguaucaauggaacuuguacaguaguaaugacugaugggagugcuucaggaaaagcugauacuaaaauacuauucauugaggaggggaaaauuguucauacuagcacauuaucaggaagugcucagcaugucgaggagugcuccuguuauccucgauauccuggugucagaugugucugcagagacaacuggaaaggcuccaauaggcccaucguagauauaaacauaaaggauuauagcauuguuuccaguuaugugugcucaggacuuguuggagacacacccagaaaaaacgacagcuccagcaguagccauugcuuggguccaaacaaugaggaagguggucauggagugaaaggcugggccuuugaugauggaaaugacguguggaugggaagaacgaucagcgagaaguuacgcucaggauaugaaaccuucaaagucauugaaggcugguccaacccuaacuccaaauugcagauaaauaggcaagucauaguugacagagguaacagguccgguuauucugguauuuucucuguugaaggcaaaagcugcaucaaucggugcuuuuauguggaguugauaaggggaagaaaacaggaaacugaagucuuguggaccucaaacaguauuguuguguuuuguggcaccucagguacauauggaacaggcucauggccugauggggcggacaucaaucucaugccuauauaa

SEQ ID NO: 54672 - RNA, 1410 nt, Artificial Sequence
  derived and/or modified CDS sequence (wt) from neuraminidase__InfluenzaA__AFN11850
augaauccaaaucaaaagauaauaacgauuggcucuguuucucucaccauuuccacaauaugcuucuucaugcaaauugccaucuugauaacuacuguaacauugcauuucaagcaauaugaauucaacucccccccaaacaaccaagugaugcugugugaaccaacaauaauagaaagaaacauaacagagauaguguaucugaccaacaccaccauagagaaggaaauaugccccaaacuagcagaauacagaaauuggucaaagccgcaaugugacauuacaggauuugcaccuuuuucuaaggacaauucgauuaggcuuuccgcugguggggacaucugggugacaagagaaccuuaugugucaugcgauccugacaaguguuaucaauuugcccuuggacagggaacaacacuaaacaacgugcauucaaauaacacaguacgugguaggaccccuuaucggacccuauugaugaaugaguuagguguuccuuuucaucuggggaccaagcaagugugcauagcgugguccagcucaaguugucacgauggaaaagcauggcugcauguuuguauaacgggggaugauaaaaaugcaacugcuagcuucauuuacaaugggaggcuuguagauaguguuguuucaugguccaaagaaauccucaggacccaggagucagaaugcgucuguaucaauggaacuuguacaguaguaaugacugaugggagugcuucaggaaaagcugauacuaaaauacuauucauugaggaggggaaaaucguucauacuagcacauugucaggaagugcucagcaugucgaggagugcucuugcuauccucgauauccuggugucagaugugucugcagagacaacuggaaaggcuccaauaggcccaucguagauauaaacauaaaggaucauagcauuguuuccaguuauguguguucaggacuuguuggagacacacccagaaaaaacgacagcuccagcaguagccauuguuuggauccuaacaaugaagaagguggucauggagugaaaggcugggccuuugaugauggaaaugacguguggaugggaagaacgaucagcgagaagucacgcuuaggguaugaaacuuucaaaguuauugaaggcugguccaaccauaaguccaaauugcagauaaauaggcaagucauaguugacagagguaauagguccgguuauucugguauuuucucuguugaaggcaaaagcugcaucaaucggugcuuuuauguggaguugauuaggggaagaaaagaggaaacugaagucuuguggaccucaaacaguauuguuguguuuuguggcaccucagguacauauggaacaggcucauggccugauggggcggaccucaaucucaugccuauauaa

SEQ ID NO: 54673 - RNA, 1410 nt, Artificial Sequence
  derived and/or modified CDS sequence (wt) from neuraminidase__InfluenzaA__AFN11851
augaauccaaaucaaaagauaauaacaauuggcucuguuucucucacuauugccacaauaugccuccuuaugcaaauugccauccugguaacuacuguaacauugcauuucaagcaauaugagugcaacucccccccaaacaaccaaguaaugcugugugaaccaacaauaauagaaagaaacauaacaaagauaguguauuugacuaacaccaccauagagaaagaaauaugccccaaacuggcagaauacagaaauuggucaaagccgcaauguaaaauuacaggauuugcaccuuuuucuaaggacaauucaauucggcuuuccgcugguggagacauuugggugacaagagaaccuuaugugucaugcgauccuggcaaguguuaucaauuugcacuuggacagggaacaacacuaaacaacaggcauucaaaugacacaguacaugauaggaccccuuaucgaacccuauugaugaaugaguuggguguuccauuucauuugggaaccaagcaagugugcauagcaugguccagcucaaguugucacgauggaaaagcauggcugcauguuuguguaacugggcaugaugaaaaugcaacugcuagcuucauuuacgaugggaggcuuguagauaguauugguucaugguccaaaaauauccucaggacccaggagucggaaugcguuuguaucaauggaacuuguacaguaguaaugacugauggaagugcuucagaaagagcugauacuaaaauacuauucauugaagaggggaaaaucguucauauuagcccauugucaggaagugcucagcaugucgaggagugcuccuguuauccucgauauccuggugucagaugugucugcagagacaacuggaaaggcuccaauaggcccaucguagauauaaaugugaaagauuauagcauuguuuccaguuaugugugcucaggacuuguuggagacacacccagaaaaaacgacagcuccagcaguagcuauugccggaauccuaacaaugagaaagggagucauggagugaaaggcugggccuuugaugauggaaaugacguguggaugggaagaacgaucagcgaggaguuacgcucagguuaugaaaccuucaaaguuauuggaggcugguccaaaccuaacuccaaauugcagauaaauaggcaagucauaguugacagagguaauagguccgguuauucugguauuuucucuguugaaggcaaaagcugcaucaaucggugcuuuuauguggaguugauaaggggaaggaaacaggaaacugaagucugguggaccucaaacaguauuguuguguuuuguggcaccucagguacauauggaacaggcucauggccugauggggcggacaucaaucucaugccuauauaa

SEQ ID NO: 54674 - RNA, 1410 nt, Artificial Sequence; identical to SEQ ID NO: 48467
  derived and/or modified CDS sequence (wt) from neuraminidase__InfluenzaA__AFN11853

SEQ ID NO: 54675 - RNA, 1410 nt, Artificial Sequence
  derived and/or modified CDS sequence (wt) from neuraminidase__InfluenzaA__AFN11855
augaauccaaaucaaaagauaauaacgauuggcucuguuucucucaccauuuccacaauaugcuucuucaugcaaacugccaucuugauaacuauuguaacauugcauuucaagcaauaugaauucaacucccccccaaacaaccaagugaugcugugugaaccaacaauaauagaaagaaacauaacagagauaguguaucugaccaacaccaccauagagaaggaaauaugccccaaacuagcagaauacagaaauuggucaaagccgcaaugugacauuacaggauuugcaccuuuuucuaaggacaauucgauuaggcuuuccgcugguggggacaucugggugacaagagaaccuuaugugucaugcgauccugacaaguguuaucaauuugcccuuggacagggaacaacacuaaacaacgugcauucaaaugacacaguacaugauaggaccccuuaucggacccuauugaugaaugaguuagguguuccuuuucaucuggggaccaagcaagugugcauagcaugguccagcucaaguugucacgauggaaaagcauggcugcauguuuguauaacgggggaugauaaaaaugcaacugcuagcuucauuuacaaugggaggcuuguagauaguauuguuucaugguccaaagaaauccucaggacccaggagucagaaugcguuuguaucaauggaacuuguacaguaguaaugacugaugggagugcuucaggaaaagcugauacuaaaauacuauucauugaggaggggaaaaucguucauacuagcauauugucaggaagugcucagcaugucgaggagugcuccugcuauccucgauauccuggugucagaugugucugcagagacaacuggaaaggcuccaauaggcccaucguagauauaaacauaaaggaucauagcauuguuuccaguuauguguguucaggacuuguuggagacacacccagaaaaaacgacagcuccagcaguagccauuguuuggauccuaacaaugaagaagguggucauggagugaaaggcugggccuuugaugauggaaaugacguguggaugggaagaacgaucagcgagaagucacgcuuaggguaugaaaccuucaaagucauugaaggcugguccaacccuaaguccaaauugcagauaaauaggcaagucauaguugacagagguaauagguccgguuauucugguauuuucucuguugaaggcaaaagcugcaucaaucggugcuuuuauguggaguugauaaggggaagaaaagaggaaacugaagucuuguggaccucaaacaguauuguuguguuuuguggcaccucagguacauauggaacaggcucauggccugauggggcggacaucaaucucaugccuauauaa

SEQ ID NO: 54676 - RNA, 1410 nt, Artificial Sequence; identical to SEQ ID NO: 48466
  derived and/or modified CDS sequence (wt) from neuraminidase__InfluenzaA__AFN11857

SEQ ID NO: 54677 - RNA, 1410 nt, Artificial Sequence; identical to SEQ ID NO: 48750
  derived and/or modified CDS sequence (wt) from neuraminidase__InfluenzaA__AFN17373

SEQ ID NO: 54678 - RNA, 1410 nt, Artificial Sequence
  derived and/or modified CDS sequence (wt) from neuraminidase__InfluenzaA__AFN17383
augaauccaaaccaaaagauaauaaccauugguucggucuguaugacaauuggaauggcuaacuuaauauuacaaauuggaaacauaaucucaauauggauuagccacucaauucaacuugggaaucaaaaucagauugaaacaugcaaucaaagcgucauuacuuaugaaaacaacacuuggguaaaucagacauauguuaacaucagcaacaccaacuuugcugcuggacagucagugguuuccgugaaauuagcgggcaauuccucucucugcccuguuaguggaugggcuauauacaguaaagacaacaguauaagaaucgguuccaagggggauguguuugucauaagggaaccauucauaucaugcucccccuuggaaugcagaaccuucuucuugacucaaggggccuugcuaaaugacaaacauuccaauggaaccauuaaagacaggagcccauaucgaacccuaaugagcuguccuauuggugaaguucccucuccauacaacucaagauuugagucagucgcuuggucagcaagugcuugucaugauggcaucaauuggcuaacaauuggaauuucuggcccagacaauggggcaguggcuguguuaaaguacaacggcauaauaacagacacuaucaagaguuggagaaacaauauauugagaacacaagagucugaaugugcauguguaaaugguucuugcuuuacuuuaaugaccgauggaccaagugauggacaggccucauacaagaucuucagaauagaaaagggaaagauagucaaaucagucgaaaugaaugccccuaauuaucacuaugaggaaugcuccuguuauccugauucuagugaaaucacaugugugugcagggauaauuggcauggcucgaaucgaccgugggugucuuucaaccagaaucuggaauaucagauaggauacauaugcagugggauuuucggagacaauccacgcccuaaugauaagacaggcaguugugguccaguaucgucuaauggagcaaauggaguaaaaggauuuucauucaaauacggcaaugguguuuggauagggagaacuaaaagcauuaguucaagaaacgguuuugagaugauuugggauccgaacggauggacugggacagacaauaacuucucaauaaagcaagauaucguaggaauaaaugaguggucaggauauagcgggaguuuuguucagcauccagaacuaacagggcuggauuguauaagaccuugcuucuggguugaacuaaucagagggcgacccaaagagaacacaaucuggacuagcgggagcagcauauccuuuugugguguaaacagugacacuguggguuggucuuggccagacggugcugaguugccauuuaccauugacaaguaa

SEQ ID NO: 54679 - RNA, 1410 nt, Artificial Sequence; identical to SEQ ID NO: 48750
  derived and/or modified CDS sequence (wt) from neuraminidase__InfluenzaA__AFN17393

SEQ ID NO: 54680 - RNA, 1410 nt, Artificial Sequence; identical to SEQ ID NO: 48750
  derived and/or modified CDS sequence (wt) from neuraminidase__InfluenzaA__AFN17403

SEQ ID NO: 54681 - RNA, 1410 nt, Artificial Sequence; identical to SEQ ID NO: 48750
  derived and/or modified CDS sequence (wt) from neuraminidase__InfluenzaA__AFN17413

SEQ ID NO: 54682 - RNA, 1410 nt, Artificial Sequence; identical to SEQ ID NO: 48750
  derived and/or modified CDS sequence (wt) from neuraminidase__InfluenzaA__AFN17423

SEQ ID NO: 54683 - RNA, 1410 nt, Artificial Sequence; identical to SEQ ID NO: 48750
  derived and/or modified CDS sequence (wt) from neuraminidase__InfluenzaA__AFN17433

SEQ ID NO: 54684 - RNA, 1410 nt, Artificial Sequence; identical to SEQ ID NO: 48750
  derived and/or modified CDS sequence (wt) from neuraminidase__InfluenzaA__AFN17443

SEQ ID NO: 54685 - RNA, 1410 nt, Artificial Sequence; identical to SEQ ID NO: 48750
  derived and/or modified CDS sequence (wt) from neuraminidase__InfluenzaA__AFN17453

SEQ ID NO: 54686 - RNA, 1410 nt, Artificial Sequence; identical to SEQ ID NO: 50191
  derived and/or modified CDS sequence (wt) from neuraminidase__InfluenzaA__AFN17459

SEQ ID NO: 54687 - RNA, 1410 nt, Artificial Sequence; identical to SEQ ID NO: 48750
  derived and/or modified CDS sequence (wt) from neuraminidase__InfluenzaA__AFN17469

SEQ ID NO: 54688 - RNA, 1410 nt, Artificial Sequence; identical to SEQ ID NO: 48750
  derived and/or modified CDS sequence (wt) from neuraminidase__InfluenzaA__AFN17479

SEQ ID NO: 54689 - RNA, 1410 nt, Artificial Sequence; identical to SEQ ID NO: 48750
  derived and/or modified CDS sequence (wt) from neuraminidase__InfluenzaA__AFN17489

SEQ ID NO: 54690 - RNA, 1410 nt, Artificial Sequence; identical to SEQ ID NO: 48750
  derived and/or modified CDS sequence (wt) from neuraminidase__InfluenzaA__AFN17499

SEQ ID NO: 54691 - RNA, 1410 nt, Artificial Sequence; identical to SEQ ID NO: 48750
  derived and/or modified CDS sequence (wt) from neuraminidase__InfluenzaA__AFN17509

SEQ ID NO: 54692 - RNA, 1410 nt, Artificial Sequence; identical to SEQ ID NO: 48750
  derived and/or modified CDS sequence (wt) from neuraminidase__InfluenzaA__AFN17519

SEQ ID NO: 54693 - RNA, 1410 nt, Artificial Sequence; identical to SEQ ID NO: 48750
  derived and/or modified CDS sequence (wt) from neuraminidase__InfluenzaA__AFN17529

SEQ ID NO: 54694 - RNA, 1410 nt, Artificial Sequence; identical to SEQ ID NO: 48750
  derived and/or modified CDS sequence (wt) from neuraminidase__InfluenzaA__AFN17539

SEQ ID NO: 54695 - RNA, 1410 nt, Artificial Sequence
  derived and/or modified CDS sequence (wt) from neuraminidase__InfluenzaA__AFN17549
augaauccaaaccaaaagauaauaaccauugguucggucuguaugacaauuggaauggcuaacuuaauauuacaaauuggaaacauaaucucaauauggauuagccacucaauucaacuugggaaucaaaaucagauugaaacaugcaaucaaagcgucauuacuuaugaaaacaacacuuggguaaaucagacauauguuaacaucagcaacaccaacuuugcugcuggacagucagugguuuccgugaaauuagcgggcaauuccucucucuguccuguuaguggaugggcuauauacaguaaagacaacaguauaagaaucgguuccaagggggauguguuugucauaagggaaccauucauaucaugcucccccuuggaaugcagaaccuucuucuugacucaaggggccuugcuaaaugacaaacauuccaauggaaccauuaaagacaggagcccauaucgaacccuaaugagcuguccuauuggugaaguucccucuccauacaacucaagauuugagucagucgcuuggucagcaagugcuugucaugauggcaucaauuggcuaacaauuggaauuucuggcccagacaauggggcaguggcuguguuaaaguacaacggcauaauaacagacacuaucaagaguuggagaaacaauauauugagaacacaagagucugaaugugcauguguaaaugguucuugcuuuacuguaaugaccgauggaccaagugauggacaggccucauacaagaucuucagaauagaaaagggaaagauagucaaaucagucgaaaugaaugccccuaauuaucacuaugaggaaugcuccuguuauccugauucuagugaaaucacaugugugugcagggauaacuggcauggcucgaaucgaccgugggugucuuucaaccagaaucuggaauaucagauaggauacauaugcagugggauuuucggagacaauccacgcccuaaugauaagacaggcaguugugguccaguaucgucuaauggagcaaauggaguaaaaggauuuucauucaaauacggcaaugguguuuggauagggagaacuaaaagcauuaguucaagaaacgguuuugagaugauuugggauccgaacggauggacugggacagacaauaacuucucaauaaagcaagauaucguaggaauaaaugaguggucaggauauagcgggaguuuuguucagcauccagaacuaacagggcuggauuguauaagaccuugcuucuggguugaacuaaucagagggcgacccaaagagaacacaaucuggacuagcgggagcagcauauccuuuugugguguaaacagugacacuguggguuggucuuggccagacggugcugaguugccauuuaccauugacaaguaa

SEQ ID NO: 54696 - RNA, 1410 nt, Artificial Sequence; identical to SEQ ID NO: 50013
  derived and/or modified CDS sequence (wt) from neuraminidase__InfluenzaA__AFN17559

SEQ ID NO: 54697 - RNA, 1410 nt, Artificial Sequence; identical to SEQ ID NO: 48750
  derived and/or modified CDS sequence (wt) from neuraminidase__InfluenzaA__AFN17569

SEQ ID NO: 54698 - RNA, 1410 nt, Artificial Sequence; identical to SEQ ID NO: 48750
  derived and/or modified CDS sequence (wt) from neuraminidase__InfluenzaA__AFN17575

SEQ ID NO: 54699 - RNA, 1410 nt, Artificial Sequence; identical to SEQ ID NO: 48750
  derived and/or modified CDS sequence (wt) from neuraminidase__InfluenzaA__AFN17581

SEQ ID NO: 54700 - RNA, 1410 nt, Artificial Sequence; identical to SEQ ID NO: 48750
  derived and/or modified CDS sequence (wt) from neuraminidase__InfluenzaA__AFN17587

SEQ ID NO: 54701 - RNA, 1410 nt, Artificial Sequence; identical to SEQ ID NO: 48750
  derived and/or modified CDS sequence (wt) from neuraminidase__InfluenzaA__AFN17597

SEQ ID NO: 54702 - RNA, 1410 nt, Artificial Sequence
  derived and/or modified CDS sequence (wt) from neuraminidase__InfluenzaA__AFN17607
augaauccaaaccaaaagauaauaaccauugguucggucuguaugacaauuggaauggcuaacuuaauauuacaaauuggaaacauaaucucaauauggauuagccacucaauucaacuugggaaucaaaaucagauugaaacaugcaaucaaagcgucauuacuuaugaaaacaacacuuggguaaaucagacauauguuaacaucagcaacaccaacuuugcugcuggacagucagugguuuccgugaaauuagcgggcaauuccucucucugcccuguuaguggaugggcuauauacaguaaagacaacaguauaagaaucgguuccaagggggauguguuugucauaagggaaccauucauaucaugcucccccuuggaaugcagaaccuucuucuugacucaaggggccuugcuaaaugacaaacauuccaauggaaccauuaaagacaggagcccauaucgaacccuaaugagcuguccuauuggugaaguucccucuccauacaacucaagauuugagucagucgcuuggucagcaagugcuugucaugauggcaucaauuggcuaacaauuggaauuucuggcccagacaauggggcaguggcuguguuaaaguacaacggcauaauaacagacacuaucaagaguuggagaaacaauauauugagaacacaagagucugaaugugcauguguaaaugguucuugcuuuacuuuaaugaccgauggaccaagugauggacaggccucauacaagaucuucagaauagaaaagggaaagauagucaaaucagucgaaaugaaugccccuaauuaucacuaugaggaaugcuccuguuauccugauucuagugaaaucacaugugugugcagggauaacuggcauggcucgaaucgaccgugggugucuuucaaccagaaucuggaauaucagauaggauacauaugcagugggauuuucggagacaauccacgcccuaaugauaagacaggcaguugugguccaguaucgucuaauggagcaaauggaguaaaaggauuuucauucaaauacggcaaugguguuuggauagggagaacuaaaagcauuaguucaagaaacgguuuugagaugauuugggauccgaacggauggacugggacagacaauaacuucucaauaaagcaagauaucguaggaauaaaugaguggucaggauauagcgggaguuuuguucagcauccagaacuaacagggcuggauuguauaagaccuugcuucuggguugaacuaaucagagggcgacccaaagagaacacaaucuggacuagcgggagcagcauauccuuuugugguguaaacagugacacuguggguuggucuuggccagacggugcugaguugccauuuaccauugacaaguaa

SEQ ID NO: 54703 - RNA, 1410 nt, Artificial Sequence; identical to SEQ ID NO: 48750
  derived and/or modified CDS sequence (wt) from neuraminidase__InfluenzaA__AFN17617

SEQ ID NO: 54704 - RNA, 1410 nt, Artificial Sequence; identical to SEQ ID NO: 48750
  derived and/or modified CDS sequence (wt) from neuraminidase__InfluenzaA__AFN17627

SEQ ID NO: 54705 - RNA, 1410 nt, Artificial Sequence; identical to SEQ ID NO: 48750
  derived and/or modified CDS sequence (wt) from neuraminidase__InfluenzaA__AFN17637

SEQ ID NO: 54706 - RNA, 1410 nt, Artificial Sequence; identical to SEQ ID NO: 48750
  derived and/or modified CDS sequence (wt) from neuraminidase__InfluenzaA__AFN17647

SEQ ID NO: 54707 - RNA, 1410 nt, Artificial Sequence; identical to SEQ ID NO: 49543
  derived and/or modified CDS sequence (wt) from neuraminidase__InfluenzaA__AFN17657

SEQ ID NO: 54708 - RNA, 1410 nt, Artificial Sequence
  derived and/or modified CDS sequence (wt) from neuraminidase__InfluenzaA__AFN17667
augaauccaaaccaaaagauaauaaccauugguucggucuguaugacaauuggaauggcuaacuuaauauuacaaauuggaaacauaaucucaauauggauuagccacucaauucaacuugggaaucaaaaucagauugaaacaugcaaucaaagcgucauuacuuaugaaaacaacacuuggguaaaucagacauauguuaacaucagcaacaccaacuuugcugcuggacagucagugguuuccgugaaauuagcgggcaauuccucucucugcccuguuaguggaugggcuauauacaguaaagacaacaguauaagaaucgguuccaagggggauguguuugucauaagggaaccauucauaucaugcucccccuuggaaugcagaaccuucuucuugacucaaggggccuugcuaaaugacaaacauuccaauggaaccauuaaagacaggagcccauaucgaacccuaaugagcuguccuauuggugaaguucccucuccauacaacucaagauuugagucagucgcuuggucagcaagugcuugucaugauggcaucaauuggcuaacaauuggaauuucuggcccagacaauggggcaguggcuguguuaaaguacaacggcauaauaacagacacuaucaagaguuggagaaacaauauauugagaacacaagagucugaaugugcauguguaaaugguucuugcuuuacuguaaugaccgauggaccaagugauggacaggccucauacaagaucuucagaauagaaaagggaaagauagucaaaucggucgaaaugaaugccccuaauuaucacuaugaggaaugcuccuguuauccugauucuagugaaaucacaugugugugcagggauaacuggcauggcucgaaucgaccgugggugucuuucaaccagaaucuggaauaucagauaggauacauaugcagugggauuuucggagacaauccacgcccuaaugauaagacaggcaguugugguccaguaucgucuaauggagcaaauggaguaaaaggauuuucauucaaauacggcaaugguguuuggauagggagaacuaaaagcauuaguucaagaaacgguuuugagaugauuugggauccgaacggauggacugggacagacaauaacuucucaauaaagcaagauaucguaggaauaaaugaguggucaggauauagcgggaguuuuguucagcauccagaacuaacagggcuggauuguauaagaccuugcuucuggguugaacuaaucagagggcgacccaaagagaacacaaucuggacuagcgggagcagcauauccuuuugugguguaaacagugacacuguggguuggucuuggccagacggugcugaguugccauuuaccauugacaaguaa

SEQ ID NO: 54709 - RNA, 1410 nt, Artificial Sequence; identical to SEQ ID NO: 48750
  derived and/or modified CDS sequence (wt) from neuraminidase__InfluenzaA__AFN17677

SEQ ID NO: 54710 - RNA, 1410 nt, Artificial Sequence; identical to SEQ ID NO: 54702
  derived and/or modified CDS sequence (wt) from neuraminidase__InfluenzaA__AFN17687

SEQ ID NO: 54711 - RNA, 1410 nt, Artificial Sequence; identical to SEQ ID NO: 48750
  derived and/or modified CDS sequence (wt) from neuraminidase__InfluenzaA__AFN17697

SEQ ID NO: 54712 - RNA, 1410 nt, Artificial Sequence; identical to SEQ ID NO: 54702
  derived and/or modified CDS sequence (wt) from neuraminidase__InfluenzaA__AFN17707

SEQ ID NO: 54713 - RNA, 1410 nt, Artificial Sequence; identical to SEQ ID NO: 51588
  derived and/or modified CDS sequence (wt) from neuraminidase__InfluenzaA__AFN17717

SEQ ID NO: 54714 - RNA, 1410 nt, Artificial Sequence; identical to SEQ ID NO: 54383
  derived and/or modified CDS sequence (wt) from neuraminidase__InfluenzaA__AFN17727

SEQ ID NO: 54715 - RNA, 1410 nt, Artificial Sequence
  derived and/or modified CDS sequence (wt) from neuraminidase__InfluenzaA__AFN17737
augaauccaaaccaaaagauaauaaccauugguucggucuguaugacaauuggaauggcuaacuuaauauuacaaauuggaaacauaaucucaauauggauuagccacucaauucaacuugggaaucaaaaucagauugaaacaugcaaucaaagcgucauuacuuaugaaaacaacacauggguaaaucagacauauguuaacaucagcaacaccaacuuugcugcuggacagucagugguuuccgugaaauuagcgggcaauuccucucucugcccuguuaguggaugggcuauauacaguaaagacaacaguauaagaaucgguuccaagggggauguguuugucauaagggaaccauucauaucaugcucccccuuggaaugcagaaccuucuucuugacucaaggggccuugcuaaaugacaaacauuccaauggaaccauuaaagacaggagcccauaucgaacccuaaugagcuguccuauuggugaaguucccucuccauacaacucaagauuugagucagucgcuuggucagcaagugcuugucaugauggcaucaauuggcuaacaauuggaauuucuggcccagacaauggggcaguggcuguguuaaaguacaacggcauaauaacagacacuaucaagaguuggagaaacaauauauugagaacacaagagucugaaugugcauguguaaaugguucuugcuuuacuguaaugaccgauggaccaagugauggacaggccucauacaagaucuucagaauagaaaagggaaagauagucaaaucagucgaaaugaaugccccuaauuaucacuaugaggaaugcuccuguuauccugauucuagugaaaucacaugugugugcagggauaacuggcauggcucgaaucgaccgugggugucuuucaaccagaaucuggaauaucagauaggauacauaugcagugggauuuucggagacaauccacgcccuaaugauaagacaggcaguugugguccaguaucgucuaauggagcaaauggaguaaaaggauuuucauucaaauacggcaaugguguuuggauagggagaacuaaaagcauuaguucaagaaacgguuuugagaugauuugggauccgaacggauggacugggacagacaauaacuucucaauaaagcaagauaucguaggaauaaaugaguggucaggauauagcgggaguuuuguucagcauccagaacuaacagggcuggauuguauaagaccuugcuucuggguugaacuaaucagagggcgacccaaagagaacacaaucuggacuagcgggagcagcauauccuuuugugguguaaacagugacacuguggguuggucuuggccagacggugcugaguugccauuuaccauugacaaguaa

SEQ ID NO: 54716 - RNA, 1410 nt, Artificial Sequence; identical to SEQ ID NO: 48750
  derived and/or modified CDS sequence (wt) from neuraminidase__InfluenzaA__AFN17743

SEQ ID NO: 54717 - RNA, 1410 nt, Artificial Sequence; identical to SEQ ID NO: 54702
  derived and/or modified CDS sequence (wt) from neuraminidase__InfluenzaA__AFN17749

SEQ ID NO: 54718 - RNA, 1410 nt, Artificial Sequence; identical to SEQ ID NO: 48750
  derived and/or modified CDS sequence (wt) from neuraminidase__InfluenzaA__AFN17759

SEQ ID NO: 54719 - RNA, 1410 nt, Artificial Sequence; identical to SEQ ID NO: 51588
  derived and/or modified CDS sequence (wt) from neuraminidase__InfluenzaA__AFN17769

SEQ ID NO: 54720 - RNA, 1410 nt, Artificial Sequence
  derived and/or modified CDS sequence (wt) from neuraminidase__InfluenzaA__AFN17775
augaauccaaaccaaaagauaauaaccauugguucggucuguaugacaauuggaauggcuaacuuaauauuacaaauuggaaacauaaucucaauauggauuagccacucaauucaacuugggaaucaaaaucagauugaaacaugcaaucaaagcgucauuacuuaugaaaacaacacuuggguaaaucagacauauguuaacaucagcaacaccaacuuugcugcuggacagucagugguuuccgugaaauuagcgggcaauuccucucucugcccuguuaguggaugggcuauauacaguaaagacaacaguauaagaaucgguuccaagggggauguguucgucauaagggaaccauucauaucaugcucccccuuggaaugcagaaccuucuucuugacucaaggggccuugcuaaaugacaaacauuccaauggaaccauuaaagacaggagcccauaucgaacccuaaugagcuguccuauuggugaaguucccucuccauacaacucaagauuugagucagucgcuuggucagcaagugcuugucaugauggcaucaauuggcuaacaauuggaauuucuggcccagacaauggggcaguggcuguguuaaaguacaacggcauaauaacagacacuaucaagaguuggagaaacaauauauugagaacacaagagucugaaugugcauguguaaaugguucuugcuuuacuguaaugaccgauggaccaagugauggacaggccucauacaagaucuucagaauagaaaagggaaagauagucaaaucagucgaaaugaaugccccuaauuaucacuaugaggaaugcuccuguuauccugauucuagugaaaucacaugugugugcagggauaacuggcauggcucgaaucgaccgugggugucuuucaaccagaaucuggaauaucagauaggauacauaugcagugggauuuucggagacaauccacgcccuaaugauaagacaggcaguugugguccaguaucgucuaauggagcaaauggaguaaaaggauuuucauucaaauacggcaaugguguuuggauagggagaacuaaaagcauuaguucaagaaacgguuuugagaugauuugggauccgaacggauggacugggacagacaauaacuucucaauaaagcaagauaucguaggaauaaaugaguggucaggauauagcgggaguuuuguucagcauccagaacuaacagggcuggauuguauaagaccuugcuucuggguugaacuaaucagagggcgacccaaagagaacacaaucuggacuagcgggagcagcauauccuuuugugguguaaacagugacacuguggguuggucuuggccagacggugcugaguugccauuuaccauugacaaguaa

SEQ ID NO: 54721 - RNA, 1410 nt, Artificial Sequence
  derived and/or modified CDS sequence (wt) from neuraminidase__InfluenzaA__AFN17785
augaauccaaaccaaaagauaauaaccauugguucggucuguaugacaauuggaauggcuaacuuaauauuacaaauuggaaacauaaucucaauauggauuagccacucaauucaacuugggaaucaaaaucagauugaaacaugcaaucaaagcgucauuacuuaugaaaacaacacuuggguaaaucagacauauguuaacaucagcaacaccaacuuugcugcuggacagucagugguuuccgugaaauuagcgggcaauuccucucucugcccuguuaguggaugggcuauauacaguaaagacaacaguauaagaaucgguuccaagggggauguguuugucauaagggaaccauucauaucaugcucccccuuggaaugcagaaccuucuucuugacucaaggggccuugcuaaaugacaaacauuccaauggaaccauuaaagacaggagcccauaucgaacccuaaugagcuguccuauuggugaaguucccucuccauacaacucaagauuugagucagucgcuuggucagcaagugcuugucaugauggcaucaauuggcuaacaauuggaauuucuggcccagacaauggggcaguggcuguguuaaaguacaacggcauaauaacagacacuaucaagaguuggagaaacaauauauugagaacacaagagucugaaugugcauguguaaaugguucuugcuuuacuuuaaugaccgauggaccaagugauggacaggccucauacaagaucuucagaauagaaaagggaaagauagucaaaucagucgaaaugaaugccccuaauuaucacuaugaggaaugcuccuguuauccugauucuagugaaaucacaugugugugcagggauaacuggcauggcucgaaucgaccgugggugucuuucaaccagaaucuggaauaucagauaggauacauaugcagugggauuuucggagacaauccacgcccuaaugauaagacaggcaguugugguccaguaucgucuaauggagcaaauggaguaaaaggauuuucauucaaauacggcaaugguguuuggauagggagaacuaaaagcauuaguucaagaaacgguuuugagaugauuugggauccgaacggauggacugggacagacaauaccuucucaauaaagcaagauaucguaggaauaaaugaguggucaggauauagcgggaguuuuguucagcauccagaacuaacagggcuggauuguauaagaccuugcuucuggguugaacuaaucagagggcgacccaaagagaacacaaucuggacuagcgggagcagcauauccuuuugugguguaaacagugacacuguggguuggucuuggccagacggugcugaguugccauuuaccauugacaaguaa

SEQ ID NO: 54722 - RNA, 1410 nt, Artificial Sequence
  derived and/or modified CDS sequence (wt) from neuraminidase__InfluenzaA__AFN17795
augaauccaaaccaaaagauaauaaccauugguucggucuguaugacaauuggaauggcuaacuuaauauuacaaauuggaaacauaaucucaauauggauuagccacucaauucaacuugggaaucaaaaucagauugaaacaugcaaucaaagcgucauuacuuaugaaaacaacacuuggguaaaucagacauauguuaacaucagcaacaccaacuuugcugcuggacagucagugguuuccgugaaauuagcgggcaauuccucucucugcccuguugguggaugggcuauauacaguaaagacaacaguauaagaaucgguuccaagggggauguguuugucauaagggaaccauucauaucaugcucccccuuggaaugcagaaccuucuucuugacucaaggggccuugcuaaaugacaaacauuccaauggaaccauuaaagacaggagcccauaucgaacccuaaugagcuguccuauuggugaaguucccucuccauacaacucaagauuugagucagucgcuuggucagcaagugcuugucaugauggcaucaauuggcuaacaauuggaauuucuggcccagacaauggggcaguggcuguguuaaaguacaacggcauaauaacagacacuaucaagaguuggagaaacaauauauugagaacacaagagucugaaugugcauguguaaaugguucuugcuuuacuguaaugaccgauggaccaagugauggacaggccucauacaagaucuucagaauagaaaagggaaagauagucaaaucagucgaaaugaaugccccuaauuaucacuaugaggaaugcuccuguuauccugauucuagugaaaucacaugugugugcagggauaacuggcauggcucgaaucggccgugggugucuuucaaccagaaucuggaauaucagauaggauacauaugcagugggauuuucggagacaauccacgcccuaaugauaagacaggcaguugugguccaguaucgucuaauggagcaaauggaguaaaaggauuuucauucaaauacggcaaugguguuuggauagggagaacuaaaagcauuaguucaagaaacgguuuugagaugauuugggauccgaacggauggacugggacagacaauaacuucucaauaaagcaagauaucguaggaauaaaugaguggucaggauauagcgggaguuuuguucagcauccagaacuaacagggcuggauuguauaagaccuugcuucuggguugaacuaaucagagggcgacccaaagagaacacaaucuggacuagcgggagcagcauauccuuuugugguguaaacagugacacuguggguuggucuuggccagacggugcugaguugccauuuaccauugacaaguaa

SEQ ID NO: 54723 - RNA, 1410 nt, Artificial Sequence; identical to SEQ ID NO: 48750
  derived and/or modified CDS sequence (wt) from neuraminidase__InfluenzaA__AFN17805

SEQ ID NO: 54724 - RNA, 1410 nt, Artificial Sequence
  derived and/or modified CDS sequence (wt) from neuraminidase__InfluenzaA__AFN17815
augaauccaaaccaaaagauaauaaccauugguucggucaguaugacaauuggaauggcuaacuuaauauuacaaauuggaaacauaaucucaauauggauuagccacucaauucaacuugggaaucaaaaucagauugaaacaugcaaucaaagcgucauuacuuaugaaaacaacacuuggguaaaucagacauauguuaacaucagcaacaccaacuuugcugcuggacagucagugguuuccgugaaauuagcgggcaauuccucucucugcccuguuaguggaugggcuauauacaguaaagacaacaguauaagaaucgguuccaagggggauguguuugucauaagggaaccauucauaucaugcucccccuuggaaugcagaaccuucuucuugacucaaggggccuugcuaaaugacaaacauuccaaugggaccauuaaagacaggagcccauaucgaacccuaaugagcuguccuauuggugaaguucccucuccauacaacucaagauuugagucagucgcuuggucagcaagugcuugucaugauggcaucaauuggcuaacaauuggaauuucuggcccagacaauggggcaguggcuguguuaaaguacaacggcauaauaacagacacuaucaagaguuggagaaacaauauauugagaacacaagagucugaaugugcauguguaaaugguucuugcuuuacuguaaugaccgauggaccaagugauggacaggccucauacaagaucuucagaauagaaaagggaaagauagucaaaucagucgaaaugaaugccccuaauuaucacuaugaggaaugcuccuguuauccugauucuagugaaaucacaugugugugcagggauaacuggcauggcucgaaucgaccgugggugucuuucaaccagaaucuggaauaucagauaggauacauaugcagugggauuuucggagacaauccacgcccuaaugauaagacaggcaguugugguccaguaucgucuaauggagcaaauggaguaaaaggauuuucauucaaauacggcaaugguguuuggauagggagaacuaaaagcauuaguucaagaaacgguuuugagaugauuugggauccgaacggauggacugggacagacaauaacuucucaauaaagcaagauaucguaggaauaaaugaguggucaggauauagcgggaguuuuguucagcauccagaacuaacagggcuggauuguauaagaccuugcuucuggguugaacuaaucagagggcggcccaaagagaacacaaucuggacuagcgggagcagcauauccuuuugugguguaaacagugacacuguggguuggucuuggccagacggugcugaguugccauuuaccauugacaaguaa

SEQ ID NO: 54725 - RNA, 1410 nt, Artificial Sequence; identical to SEQ ID NO: 48750
  derived and/or modified CDS sequence (wt) from neuraminidase__InfluenzaA__AFN17825

SEQ ID NO: 54726 - RNA, 1410 nt, Artificial Sequence; identical to SEQ ID NO: 54702
  derived and/or modified CDS sequence (wt) from neuraminidase__InfluenzaA__AFN17835

SEQ ID NO: 54727 - RNA, 1410 nt, Artificial Sequence; identical to SEQ ID NO: 48750
  derived and/or modified CDS sequence (wt) from neuraminidase__InfluenzaA__AFN17845

SEQ ID NO: 54728 - RNA, 1410 nt, Artificial Sequence; identical to SEQ ID NO: 48750
  derived and/or modified CDS sequence (wt) from neuraminidase__InfluenzaA__AFN17855

SEQ ID NO: 54729 - RNA, 1410 nt, Artificial Sequence
  derived and/or modified CDS sequence (wt) from neuraminidase__InfluenzaA__AFN17865
augaauccaaaccaaaagauaauaaccauugguucggucuguaugacaauuggaauggcuaacuuaauauuacaaauuggaaacauaaucucaauauggauuagccacucaauucaacuugggaaucaaaaucagauugaaacaugcaaucaaagcgucauuacuuaugaaaacaacacuuggguaaaucagacauauguuaacaucagcaacaccaacuuugcugcuggacagucagugguuuccgugaaauuagcgggcaauuccucucucugcccuguuaguggaugggcuauauacaguaaagacaacaguauaagaaucgguuccaagggggauguguuugucauaagggaaccauucauaucaugcucccccuuggaaugcagaaccuucuucuugacucaaggggccuugcuaaaugacaaacauuccaauggaaccauuaaagacaggagcccauaucgaacccuaaugagcuguccuauuggugaaguucccucuccauacaacucaagauuugagucagucgcuuggucagcaagugcuugucaugauggcaucaauuggcuaacaauuggaauuucuggcccagacaauggggcaguggcuguguuaaaguacaacggcauaauaacagacacuaucaagaguuggagaaacaauauauugagaacacaagagucugaaugugcauguguaaaugguucuugcuuuacuguaaugaccgauggaccaagugauggacaggccucauacaagaucuucagaauagaaaagggaaagauagucaaaucagucgaaaugaaugccccuaauuaucacuaugaggaaugcuccuguuauccugauucuagugaaaucacaugugugugcagggauaacuggcauggcucgaaucgaccgugggugucuuucaaccagaaucuggaauaucggauaggauacauaugcagugggauuuucggagacaauccacgcccuaaugauaagacaggcaguugugguccaguaucgucuaauggagcaaauggaguaaaaggauuuucauucaaauacggcaaugguguuuggauagggagaacuaaaagcauuaguucaagaaacgguuuugagaugauuugggauccgaacggauggacugggacagacaauaacuucucaauaaagcaagauaucguaggaauaaaugaguggucaggauauagcgggaguuuuguucagcauccagaacuaacagggcuggauuguauaagaccuugcuucuggguugaacuaaucagagggcgacccaaagagaacacaaucuggacuagcgggagcagcauauccuuuugugguguaaacagugacacuguggguuggucuuggccagacggugcugaguugccauuuaccauugacaaguaa

SEQ ID NO: 54730 - RNA, 1410 nt, Artificial Sequence
  derived and/or modified CDS sequence (wt) from neuraminidase__InfluenzaA__AFN17875
augaauccaaaccaaaagauaauaaccauugguucggucuguaugacaauuggaauggcuaacuuaauauuacaaauuggaaacauaaucucaauauggauuagccacucaauucaacuugggaaucaaaaucagauugaaacaugcaaucaaagcgucauuacuuaugaaaacaacacuuggguaaaucagacauauguuaacaucagcaacaccaacuuugcugcuggacagucagugguuuccgugaaauuagcgggcaauuccucucucugcccuguuaguggaugggcuauauacaguaaagacaacaguauaagaaucgguuccaagggggauguguuugucauaagggaaccauucauaucaugcucccccuuggaaugcagaaccuucuucuugacucaaggggccuugcuaaaugacaaacauuccaauggaaccauuaaagacaggagcccauaucgaacccuaaugagcuguccuauuggugaaguucccucuccauacaacucaagauuugagucagucgcuuggucagcaagugcuugucaugauggcaucaauuggcuaacaauuggaauuucuggcccagacaauggggcaguggcuguguuaaaguacaacggcauaauaacagacacuaucaagaguuggagaaacaauauauugagaacacaagagucugaaugugcauguguaaaugguucuugcuuuacuuuaaugaccgauggaccaagugauggacaggccucauacaagaucuucagaauagaaaagggaaaaauagucaaaucagucgaaaugaaugccccuaauuaucacuaugaggaaugcuccuguuauccugauucuagugaaaucacaugugugugcagggauaauuggcauggcucgaaucgaccgugggugucuuucaaccagaaucuggaauaucagauaggauacauaugcagugggauuuucggagacaauccacgcccuaaugauaagacaggcaguugugguccaguaucgucuaauggagcaaauggaguaaaaggauuuucauucaaauacggcaaugguguuuggauagggagaacuaaaagcauuaguucaagaaacgguuuugagaugauuugggauccgaacggauggacugggacagacaauaacuucucaauaaagcaagauaucguaggaauaaaugaguggucaggauauagcgggaguuuuguucagcauccagaacuaacagggcuggauuguauaagaccuugcuucuggguugaacuaaucagagggcgacccaaagagaacacaaucuggacuagcgggagcagcauauccuuuugugguguaaacagugacacuguggguuggucuuggccagacggugcugaguugccauuuaccauugacaaguaa

SEQ ID NO: 54731 - RNA, 1410 nt, Artificial Sequence; identical to SEQ ID NO: 54702
  derived and/or modified CDS sequence (wt) from neuraminidase__InfluenzaA__AFN17885

SEQ ID NO: 54732 - RNA, 1410 nt, Artificial Sequence; identical to SEQ ID NO: 48750
  derived and/or modified CDS sequence (wt) from neuraminidase__InfluenzaA__AFN17895

SEQ ID NO: 54733 - RNA, 1410 nt, Artificial Sequence; identical to SEQ ID NO: 54702
  derived and/or modified CDS sequence (wt) from neuraminidase__InfluenzaA__AFN17905

SEQ ID NO: 54734 - RNA, 1410 nt, Artificial Sequence; identical to SEQ ID NO: 48750
  derived and/or modified CDS sequence (wt) from neuraminidase__InfluenzaA__AFN17911

SEQ ID NO: 54735 - RNA, 1410 nt, Artificial Sequence; identical to SEQ ID NO: 54702
  derived and/or modified CDS sequence (wt) from neuraminidase__InfluenzaA__AFN17921

SEQ ID NO: 54736 - RNA, 1410 nt, Artificial Sequence
  derived and/or modified CDS sequence (wt) from neuraminidase__InfluenzaA__AFN17931
augaauccaaaccaaaagauaauaaccauugguucggucuguaugacaauuggaauggcuaacuuaauauuacaaauuggaaacauaaucucaauauggauuagccacucaauucaacuugggaaucaaaaucagauugaaacaugcaaucaaagcgucauuacuuaugaaaacaacacuuggguaaaucagacauauguuaacaucagcaacaccaacuuugcugcuggacagucagugguuuccgugaaauuagcgggcaauuccucucucugcccuguuaguggaugggcuauauacaguaaagacaacaguauaagaaucgguuccaggggggauguguuugucauaagggaaccauucauaucaugcucccccuuggaaugcagaaccuucuucuugacucaaggggccuugcuaaaugacaaacauuccaauggaaccauuaaagacaggagcccauaucgaacccuaaugagcuguccuauuggugaaguucccucuccauacaacucaagauuugagucagucgcuuggucagcaagugcuugucaugauggcaucaauuggcuaacaauuggaauuucuggcccagacaauggggcaguggcuguguuaaaguacaacggcauaauaacagacacuaucaagaguuggagaaacaauauauugagaacacaagagucugaaugugcauguguaaaugguucuugcuuuacuguaaugaccgauggaccaagugauggacaggccucauacaagaucuucagaauagaaaagggaaagauagucaaaucagucgaaaugaaugccccuaauuaucacuaugaggaaugcuccuguuauccugauucuagugaaaucacaugugugugcagggauaacuggcauggcucgaaucgaccgugggugucuuucaaccagaaucuggaauaucggauaggauacauaugcagugggauuuucggagacaauccacgcccuaaugauaagacaggcaguugugguccaguaucgucuaauggagcaaauggaguaaaaggauuuucauucaaauacggcaaugguguuuggauagggagaacuaaaagcauuaguucaagaaacgguuuugagaugauuugggauccgaacggauggacugggacagacaauaacuucucaauaaagcaagauaucguaggaauaaaugaguggucaggauauagcgggaguuuuguucagcauccagaacuaacagggcuggauuguauaagaccuugcuucuggguugaacuaaucagagggcgacccaaagagaacacaaucuggacuagcgggagcagcauauccuuuugugguguaaacagugacacuguggguuggucuuggccagacggugcugaguugccauuuaccauugacaaguaa

SEQ ID NO: 54737 - RNA, 1410 nt, Artificial Sequence
  derived and/or modified CDS sequence (wt) from neuraminidase__InfluenzaA__AFN17941
augaauccaaaccaaaagauaauaaccauugguucggucuguaugacaauuggaauggcuaacuuaauauuacaaauuggaaacauaaucucaauauggauuagccacucaauucaacuugggaaucaaaaucagauugaaacaugcaaucaaagcgucauuacuuaugaaaacaacacuuggguaaaucagacauauguuaacaucagcaacaccaacuuugcugcuggacagucagugguuuccgugaaauuagcgggcaauuccucucucugcccuguuaguggaugggcuauauacaguaaagacaacaguauaagaaucgguuccaagggggauguguuugucauaagggaaccauucauaucaugcucccccuuggaaugcagaaccuucuucuugacucaaggggccuugcuaaaugacaaacauuccaauggaaccauuaaagacaggagcccauaucgaacccuaaugagcuguccuauuggugaaguucccucuccauacaacucaagauuugagucagucgcuuggucagcaagugcuugucaugauggcaucaauuggcuaacaauuggaauuucuggcccagacaauggggcaguggcuguguuaaaguacaacggcauaauaacagacacuaucaagaguuggagaaacaauauauugagaacacaagagucugaaugugcauguguaaaugguucuugcuuuacuguaaugaccgauggaccaagugauggacaggccucauacaagaucuucagaauagaaaagggaaagauagucaaaucagucgaaaugaaugccccuaauuaucacuaugaggaaugcuccuguuauccugauucuagugaaaucacaugugugugcagggauaacuggcauggcucgaaucgaccgugggugucuuucaaccagaaucuggaauaucagauaggauacauaugcagugggauuuucggagacaauccacgcccuaaugauaagacaggcaguugugguccaguaucgucuaauggagcaaauggagugaaaggauuuucauucaaauacggcaaugguguuuggauagggagaacuaaaagcauuaguucaagaaacgguuuugagaugauuugggauccgaacggauggacugggacagacaauaacuucucaauaaagcaagauaucguaggaauaaaugaguggucaggauauagcgggaguuuuguucagcauccagaacuaacagggcuggauuguauaagaccuugcuucuggguugaacuaaucagagggcgacccaaagagaacacaaucuggacuagcgggagcagcauauccuuuugugguguaaacagugacacuguggguuggucuuggccagacggugcugaguugccauuuaccauugacaaguaa

SEQ ID NO: 54738 - RNA, 1410 nt, Artificial Sequence; identical to SEQ ID NO: 48750
  derived and/or modified CDS sequence (wt) from neuraminidase__InfluenzaA__AFN17951

SEQ ID NO: 54739 - RNA, 1410 nt, Artificial Sequence
  derived and/or modified CDS sequence (wt) from neuraminidase__InfluenzaA__AFN17961
augaauccaaaccaaaagauaauaaccauugguucggucuguaugacaauuggaauggcuaacuuaauauuacaaauuggaaacauaaucucaauauggauuagccacucaauucaacuugggaaucaaaaucagauugaaacaugcaaucaaagcgucauuacuuaugaaaacaacacuuggguaaaucagacauauguuaacaucagcaacaccaacuuugcugcugggcagucagugguuuccgugaaauuagcgggcaauuccucucucugcccuguuaguggaugggcuauauacaguaaagacaacaguauaagaaucgguuccaagggggauguguuugucauaagggaaccauucauaucaugcucccccuuggaaugcagaaccuucuucuugacucaaggggccuugcuaaaugacaaacauuccaauggaaccauuaaagacaggagcccauaucgaacccuaaugagcuguccuauuggugaaguucccucuccauacaacucaagauuugagucagucgcuuggucagcaagugcuugucaugauggcaucaauuggcuaacaauuggaauuucuggcccagacaauggggcaguggcuguguuaaaguacaacggcauaauaacagacacuaucaagaguuggagaaacaauauauugagaacacaagagucugaaugugcauguguaaaugguucuugcuuuacuguaaugaccgauggaccaagugauggacaggccucauacaagaucuucagaauagaaaagggaaagauagucaacucagucgaaaugaaugccccuaauuaucacuaugaggaaugcuccuguuauccugauucuagugaaaucacaugugugugcagggauaacuggcauggcucgaaucgaccgugggugucuuucaaccagaaucuggaauaucagauaggauacauaugcagugggauuuucggagacaauccacgcccuaaugauaagacaggcaguugugguccaguaucgucuaauggagcaaauggaguaaaaggauuuucauucaaauacggcaaugguguuuggauagggagaacuaaaagcauuaguucaagaaacgguuuugagaugauuugggauccgaacggauggacugggacagacaauaacuucucaauaaagcaagauaucguaggaauaaaugaguggucaggauauagcgggaguuuuguucagcauccagaacuaacagggcuggauuguauaagaccuugcuucuggguugaacuaaucagagggcgacccaaagagaacacaaucuggacuagcgggagcagcauauccuuuugugguguaaacagugacacuguggguuggucuuggccagacggugcugaguugccauuuaccauugacaaguaa

SEQ ID NO: 54740 - RNA, 1410 nt, Artificial Sequence; identical to SEQ ID NO: 48750
  derived and/or modified CDS sequence (wt) from neuraminidase__InfluenzaA__AFN17971

SEQ ID NO: 54741 - RNA, 1410 nt, Artificial Sequence; identical to SEQ ID NO: 49543
  derived and/or modified CDS sequence (wt) from neuraminidase__InfluenzaA__AFN17981

SEQ ID NO: 54742 - RNA, 1410 nt, Artificial Sequence; identical to SEQ ID NO: 48750
  derived and/or modified CDS sequence (wt) from neuraminidase__InfluenzaA__AFN17991

SEQ ID NO: 54743 - RNA, 1410 nt, Artificial Sequence
  derived and/or modified CDS sequence (wt) from neuraminidase__InfluenzaA__AFN18001
augaauccaaaccaaaagauaauaaccauuaguucggucuguaugacaauuggaauggccaacuuaauauuacaaauuggaaacauaaucucaauauggauuagccacucaauucaacuugggaaucaaaaucagauugaaacaugcaaucaaagcgucauuacuuaugaaaacaacacuuggguaaaucagacauauguuaacaucagcaacaccaacuuugcugcuggacagucagugguuuccgugaaauuagcgggcaauuccucucucugcccuguuaguggaugggcuauauacaguaaagacaacaguauaagaaucgguuccaagggggauguguuugucauaagggaaccauucauaucaugcucccccuuggaaugcagaaccuucuucuugacucaaggggccuugcuaaaugacaaacauuccaauggaaccauuaaagacaggagcccauaucgaacccuaaugagcuguccuauuggugaaguucccucuccauacaacucaagauuugagucagucgcuuggucagcaagugcuugucaugauggcaucaauuggcuaacaauuggaauuucuggcccagacaauggggcaguggcuguguuaaaguacaacggcauaauaacagacacuaucaagaguuggagaaacaauauauugagaacacaagagucugaaugugcauguguaaaugguucuugcuuuacuuuaaugaccgauggaccaagugauggacaggccucauacaagaucuucagaauagaaaagggaaagauagucaaaucagucgaaaugaaugccccuaauuaucacuaugaggaaugcuccuguuauccugauucuagugaaaucacaugugugugcagggauaacuggcauggcucgaaucgaccgugggugucuuucaaccagaaucuggaauaucagauaggauacauaugcagugggauuuucggagacaauccacgcccuaaugauaagacaggcaguugugguccaguaucgucuaauggagcaaauggaguaaaaggauuuucauucaaauacggcaaugguguuuggauagggagaacuaaaagcauuaguucaagaaacgguuuugagaugauuugggauccgaacggauggacugggacagacaauaacuucucaauaaagcaagauaucguaggaauaaaugaguggucaggauauagcgggaguuuuguucagcauccagaacuaacagggcuggauuguauaagaccuugcuucuggguugaacuaaucagagggcgacccaaagagaacacaaucuggacuagcgggagcagcauauccuuuugugguguaaacagugacacuguggguuggucuuggccagacggugcugaguugccauuuaccauugacaaguaa

SEQ ID NO: 54744 - RNA, 1410 nt, Artificial Sequence; identical to SEQ ID NO: 48750
  derived and/or modified CDS sequence (wt) from neuraminidase__InfluenzaA__AFN18011

SEQ ID NO: 54745 - RNA, 1410 nt, Artificial Sequence; identical to SEQ ID NO: 48750
  derived and/or modified CDS sequence (wt) from neuraminidase__InfluenzaA__AFN18021

SEQ ID NO: 54746 - RNA, 1410 nt, Artificial Sequence
  derived and/or modified CDS sequence (wt) from neuraminidase__InfluenzaA__AFN18031
augaauccaaaccaaaagauaauaaccauugguucgaucuguaugacaauuggaauggcuaacuuaauauuacaaauuggaaacauaaucucaauauggauuagccacucaauucaacuugggaaucaaaaucagauugaaacaugcaaucaaagcgucauuacuuaugaaaacaacacuuggguaaaucagacauauguuaacaucagcaacaccaacuuugcugcuggacagucagugguuuccgugaaauuagcgggcaauuccucucucugcccuguuaguggaugggcuauauacaguaaagacaacaguauaagaaucgguuccaagggggauguguuugucauaagggaaccauucauaucaugcucccccuuggaaugcagaaccuucuucuugacucaaggggccuugcuaaaugacaaacauuccaauggaaccauuaaagacaggagcccauaucgaacccuaaugagcuguccuauuggugaaguucccucuccauacaacucaagauuugagucagucgcuuggucagcaagugcuugucaugauggcaucaauuggcuaacaauuggaauuucuggcccagacaauggggcaguggcuguguuaaaguacaacggcauaauaacagacacuaucaagaguuggagaaacaauauauugagaacacaagagucugaaugugcauguguaaaugguucuugcuuuacuuuaaugaccgauggaccaagugauggacaggccucauacaagaucuucagaauagaaaagggaaagauagucaaaucagucgaaaugaaugccccuaauuaucacuaugaggaaugcuccuguuauccugauucuagugaaaucacaugugugugcagggauaacuggcauggcucgaaucgaccgugggugucuuucaaccagaaucuggaauaucagauaggauacauaugcagugggauuuucggagacaauccacgcccuaaugauaagacaggcaguugugguccaguaucgucuaauggagcaaauggaguaaaaggauuuucauucaaauacggcaaugguguuuggauagggagaacuaaaagcauuaguucaagaaacgguuuugagaugauuugggauccgaacggauggacugggacagacaauaacuucucaauaaagcaagauaucguaggaauaaaugaguggucaggauauagcgggaguuuuguucagcauccagaacuaacagggcuggauuguauaagaccuugcuucuggguugaacuaaucagagggcgacccaaagagaacacaaucuggacuagcgggagcagcauauccuuuugugguguaaacagugacacuguggguuggucuuggccagacggugcugaguugccauuuaccauugacaaguaa

SEQ ID NO: 54747 - RNA, 1410 nt, Artificial Sequence; identical to SEQ ID NO: 48750
  derived and/or modified CDS sequence (wt) from neuraminidase__InfluenzaA__AFN18041

SEQ ID NO: 54748 - RNA, 1410 nt, Artificial Sequence; identical to SEQ ID NO: 54702
  derived and/or modified CDS sequence (wt) from neuraminidase__InfluenzaA__AFN18051

SEQ ID NO: 54749 - RNA, 1410 nt, Artificial Sequence; identical to SEQ ID NO: 54702
  derived and/or modified CDS sequence (wt) from neuraminidase__InfluenzaA__AFN18061

SEQ ID NO: 54750 - RNA, 1410 nt, Artificial Sequence; identical to SEQ ID NO: 48750
  derived and/or modified CDS sequence (wt) from neuraminidase__InfluenzaA__AFN18070

SEQ ID NO: 54751 - RNA, 1410 nt, Artificial Sequence; identical to SEQ ID NO: 48750
  derived and/or modified CDS sequence (wt) from neuraminidase__InfluenzaA__AFN18080

SEQ ID NO: 54752 - RNA, 1410 nt, Artificial Sequence; identical to SEQ ID NO: 48750
  derived and/or modified CDS sequence (wt) from neuraminidase__InfluenzaA__AFN18090

SEQ ID NO: 54753 - RNA, 1410 nt, Artificial Sequence; identical to SEQ ID NO: 51000
  derived and/or modified CDS sequence (wt) from neuraminidase__InfluenzaA__AFN18100

SEQ ID NO: 54754 - RNA, 1410 nt, Artificial Sequence; identical to SEQ ID NO: 48750
  derived and/or modified CDS sequence (wt) from neuraminidase__InfluenzaA__AFN18106

SEQ ID NO: 54755 - RNA, 1410 nt, Artificial Sequence
  derived and/or modified CDS sequence (wt) from neuraminidase__InfluenzaA__AFN18108
augaauccaaaccaaaagauaauaaccauugguucggucuguaugacaauuggaauggcuaacuuaauauuacaaauuggaaacauaaucucaauauggauuagccacucaauucaacuugggaaucaaaaucagauugaaacaugcaaucaaagcgucauuacuuaugaaaacaacacuuggguaaaucagacauauguuaacaucagcaacaccaacuuugcugcuggacagucagugguuuccgugaaauuagcgggcaauuccucucucugcccuguuaguggaugggcuauauacaguaaagacaacaguauaagaaucgguuccaagggggauguguuugucauaagggaaccauucauaucaugcucccccuuggaaugcagaaccuucuucuugacucaaggggccuugcuaaaugacaaacauuccaauggaaccauuaaagacaggagcccauaucgaacccuaaugagcuguccuauuggugaaguucccucuccauacaacucaagauuugagucagucgcuuggucagcaagugcuugucaugauggcaucaauuggcuaacaauuggaauuucuggcccagacaauggggcaguggcuguguuaaaguacaacggcauaauaacagacacuaucaagaguuggagaaacaauauauugagaacacaagagucugaaugugcauguguaaaugguucuugcuuuacuguaaugaccgauggaccaagugauggacaggccucauacaagaucuucagaauagaaaagggaaagauagucaaaucagucgaaaugaaugccccuaauuaucacuaugaggaaugcuccuguuauccugauucuagugaaaucacaugugugugcagggauaacuggcauggcucgaaucgaccgugggugucuuucaaccagaaucuggaauaucggauaggauacauaugcagugggauuuucggagacaauccacgcccuaaugauaagacaggcaguugugguccaguauugucuaauggagcaaauggaguaaaaggauuuucauucaaauacggcaaugguguuuggauagggagaacuaaaagcauuaguucaagaaacgguuuugagaugauuugggauccgaacggauggacugggacagacaauaacuucucaauaaagcaagauaucguaggaauaaaugaguggucaggauauagcgggaguuuuguucagcauccagaacuaacagggcuggauuguauaagaccuugcuucuggguugaacuaaucagagggcgacccaaagagaacacaaucuggacuagcgggagcagcauauccuuuugugguguaaacagugacacuguggguuggucuuggccagacggugcugaguugccauuuaccauugacaaguaa

SEQ ID NO: 54756 - RNA, 1410 nt, Artificial Sequence
  derived and/or modified CDS sequence (wt) from neuraminidase__InfluenzaA__AFN18118
augaauccaaaccaaaagauaauaaccauugguucggucuguaugacaauuggaauggcuaacuuaauauuacaaauuggaaacaugaucucaauauggauuagccacucaauucaacuugggaaucaaaaucagauugaaacaugcaaucaaagcgucauuacuuaugaaaacaacacuuggguaaaucagacauauguuaagaucagcaacaccaacuuugcugcuggacagucagugguuuccgugaaauuagcgggcaauuccucucucugcccuguuaguggaugggcuauauacaguaaagacaacaguauaagaaucgguuccaagggggauguguuugucauaagggaaccauucauaucaugcucccccuuggaaugcagaaccuucuucuugacucaaggggccuugcuaaaugacaaacauuccaauggaaccauuaaagacaggagcccauaucgaacccuaaugagcuguccuauuggugaaguucccucuccauacaacucaagauuugagucagucgcuuggucagcaagugcuugucaugauggcaucaauuggcuaacaauuggaauuucuggcccagacaauggggcaguggcuguguuaaaguacaacggcauaauaacagacacuaucaagaguuggagaaacaauauauugagaacacaagagucugaaugugcauguguaaaugguucuugcuuuacuuuaaugaccgauggaccaagugauggacaggccucauacaagaucuucagaauagaaaagggaaagauagucaaaucagucgaaaugaaugccccuaauuaucacuaugaggaaugcuccuguuauccugauucuagugaaaucacaugugugugcagggauaacuggcauggcucgaaucgaccgugggugucuuucaaccagaaucuggaauaucagauaggauacauaugcagugggauuuucggagacaauccacgcccuaaugauaagacaggcaguugugguccaguaucgucuaauggagcaaauggaguaaaaggauuuucauucaaauacggcaaugguguuuggauagggagaacuaaaagcauuaguucaagaaacgguuuugagaugauuugggauccgaacggauggacugggacagacaauaacuucucaauaaagcaagauaucguaggaauaaaugaguggucaggauauagcgggaguuuuguucagcauccagaacuaacagggcuggauuguauaagaccuugcuucuggguugaacuaaucagagggcgacccaaagagaacacaaucuggacuagcgggagcagcauauccuuuugugguguaaacagugacacuguggguuggucuuggccagacggugcugaguugccauuuaccauugacaaguaa

SEQ ID NO: 54757 - RNA, 1410 nt, Artificial Sequence; identical to SEQ ID NO: 48750
  derived and/or modified CDS sequence (wt) from neuraminidase__InfluenzaA__AFN18120

SEQ ID NO: 54758 - RNA, 1410 nt, Artificial Sequence; identical to SEQ ID NO: 48750
  derived and/or modified CDS sequence (wt) from neuraminidase__InfluenzaA__AFN18122

SEQ ID NO: 54759 - RNA, 1410 nt, Artificial Sequence; identical to SEQ ID NO: 54702
  derived and/or modified CDS sequence (wt) from neuraminidase__InfluenzaA__AFN18128

SEQ ID NO: 54760 - RNA, 1410 nt, Artificial Sequence; identical to SEQ ID NO: 54702
  derived and/or modified CDS sequence (wt) from neuraminidase__InfluenzaA__AFN18134

SEQ ID NO: 54761 - RNA, 1410 nt, Artificial Sequence
  derived and/or modified CDS sequence (wt) from neuraminidase__InfluenzaA__AFN18136
augaauccaaaccaaaagauaauaaccauugguucggucuguaugacaauuggaauggcuaacuuaauauuacaaauuggaaacauaaucucaauauggauuagccacucaauucaacuugggaaucaaaaucagauugaaacaugcaaucaaagcgucauuacuuaugaaaacaacacuuggguaaaucagacauauguuaacaucagcaacaccaacuuugcugcuggacagucagugguuuccgugaaauuagcgggcaauuccucucucugccccguuaguggaugggcuauauacaguaaagacaacaguauaagaaucgguuccaagggggauguguuugucauaagggaaccauucauaucaugcucccccuuggaaugcagaaccuucuucuugacucaaggggccuugcuaaaugacaaacauuccaauggaaccauuaaagacaggagcccauaucgaacccuaaugagcuguccuauuggugaaguucccucuccauacaacucaagauuugagucagucgcuuggucagcaagugcuugucaugauggcaucaauuggcuaacaauuggaauuucuggcccagacaauggggcaguggcuguguuaaaguacaacggcauaauaacagacacuauuaagaguuggagaaacaauauauugagaacacaagagucugaaugugcauguguaaaugguucuugcuuuacuguaaugaccgauggaccaagugauggacaggccucauacaagaucuucagaauagaaaagggaaagauagucaaaucagucgaaaugaaugccccuaauuaucacuaugaggaaugcuccuguuauccugauucuagugaaaucacaugugugugcagggauaacuggcauggcucgaaucgaccgugggugucuuucaaccagaaucuggaauaucagauaggauacauaugcagugggauuuucggagacaauccacgcccuaaugauaagacaggcaguugugguccaguaucgucuaauggagcaaauggagugaaaggauuuucauucaaauacggcaaugguguuuggauagggagaacuaaaagcauuaguucaagaaacgguuuugagaugauuugggauccgaacggauggacugggacagacaauaacuucucaauaaagcaagauaucguaggaauaaaugaguggucaggauauagcgggaguuuuguucagcauccagaacuaacagggcuggauuguauaagaccuugcuucuggguugaacuaaucagagggcgacccaaagagaacacaaucuggacuagcgggagcagcauauccuuuugugguguaaacagugacacuguggguuggucuuggccagacggugcugaguugccauuuaccauugacaaguaa

SEQ ID NO: 54762 - RNA, 1410 nt, Artificial Sequence; identical to SEQ ID NO: 48750
  derived and/or modified CDS sequence (wt) from neuraminidase__InfluenzaA__AFN18138

SEQ ID NO: 54763 - RNA, 1410 nt, Artificial Sequence
  derived and/or modified CDS sequence (wt) from neuraminidase__InfluenzaA__AFN18140
augaauccaaaccaaaagauaauaaccauugguucggucuguaugacaauuggaauggcuaacuuaauauuacaaauuggaaacauaaucucaauauggauuagccacucaauucaacuugggaaucaaaaucagauugaaacaugcaaucaaagcgucauuacuuaugaaaacaacacuuggguaaaucagacauauguuaacaucagcaacaccaacuuugcugcuggacagucagugguuuccgugaaauuagcgggcaauuccucucucugcccuguuaguggaugggcuauauacaguaaagacaacaguauaagaaucgguuccaagggggauguguuugucauaagggaaccauucauaucaugcucccccuuggaaugcagaaccuucuucuugacucaaggggccuugcuaaaugacaaacauuccaauggaaccauuaaagacaggagcccauaucgaacccuaaugagcuguccuauuggugaaguucccucuccauacaacucaagauuugagucagucgcuuggucagcaagugcuugucaugauggcaucaauuggcuaacaauuggaauuucuggcccagacaauggggcaguggcuguguuaaaguacaacggcauaauaacagacacuaucaagaguuggagaaacaauauauugagaacacaagagucugaaugugcauguguaaaugguucuugcuuuacuguaaugaccgauggaccaagugauggacaggccucauacaagaucuucagaauagaaaagggaaagauagucaaaucagucgaaaugaaugccccuaauuaucacuaugaggaaugcuccuguuauccugauucuagugaaaucacaugugugugcagggauaacuggcauggcucgaaucgaccgugggugucuuucaaccagaaucuggaauaucggauaggauacauaugcagugggauuuucggagacaauccacgcccuaaugauaagacaggcaguugugguccaguaucgucuaauggagcaaauggaguaaaaggauuuucauucaaauacggcaaugguauuuggauagggagaacuaaaagcauuaguucaagaaacgguuuugagaugauuugggauccgaacggauggacugggacagacaauaacuucucaauaaagcaagauaucguaggaauaaaugaguggucaggauauagcgggaguuuuguucagcauccagaacuaacagggcuggauuguauaagaccuugcuucuggguugaacuaaucagagggcgacccaaagagaacacaaucuggacuagcgggagcagcauauccuuuugugguguaaacagugacacuguggguuggucuuggccagacggugcugaguugccauuuaccauugacaaguaa

SEQ ID NO: 54764 - RNA, 1410 nt, Artificial Sequence; identical to SEQ ID NO: 48750
  derived and/or modified CDS sequence (wt) from neuraminidase__InfluenzaA__AFN18144

SEQ ID NO: 54765 - RNA, 1410 nt, Artificial Sequence; identical to SEQ ID NO: 48750
  derived and/or modified CDS sequence (wt) from neuraminidase__InfluenzaA__AFN18150

SEQ ID NO: 54766 - RNA, 1410 nt, Artificial Sequence
  derived and/or modified CDS sequence (wt) from neuraminidase__InfluenzaA__AFN18156
augaauccaaaccaaaagauaauaaccauugguucggucuguaugacaauuggaauggcuaacuuaauauuacaaauuggaaacauaaucucaauauggauuagccacucaauucaacuugggaaucaaaaucagauugaaacaugcaaucaaagcgucauuacuuaugaaaacaacacuuggguaaaucagacauauguuaacaucagcaacaccaacuuugcugcuggacagucagugguuuccgugaaauuagcgggcaauuccucucucugcccuguuaguggaugggcuauauacaguaaagacaauaguauaagaaucgguuccaagggggauguguuugucauaagggaaccauucauaucaugcucccccuuggaaugcagaaccuucuucuugacucaaggggccuugcuaaaugacaaacauuccaauggaaccauuaaagacaggagcccauaucgaacccuaaugagcuguccuauuggugaaguucccucuccauacaacucaagauuugagucagucgcuuggucagcaagugcuugucaugauggcaucaauuggcuaacaauuggaauuucuggcccagacaauggggcaguggcuguguuaaaguacaacggcauaauaacagacacuaucaagaguuggagaaacaauauauugagaacacaagagucugaaugugcauguguaaaugguucuugcuuuacuguaaugaccgauggaccaagugauggacaggccucauacaagaucuucagaauagaaaagggaaagauagucaaaucagucgaaaugaaugccccuaauuaucacuaugaggaaugcuccuguuauccugauucuagugaaaucacaugugugugcagggauaacuggcauggcucgaaucgaccgugggugucuuucaaccagaaucuggaauaucagauaggauacauaugcagugggauuuucggagacaauccacgcccuaaugauaagacaggcaguugugguccaguaucgucuaauggagcaaauggaguaaaaggauuuucauucaaauacggcaaugguguuuggauagggagaacuaaaagcauuaguucaagaaacgguuuugagaugaucugggauccgaacggauggacugggacagacaauaacuucucaauaaagcaagauaucguaggaauaaaugaguggucaggauauagcgggaguuuuguucagcauccagaacuaacagggcuggauuguauaagaccuugcuucuggguugaacuaaucagagggcgacccaaagagaacacaaucuggacuagcggaagcagcauauccuuuugugguguaaacagugacacuguggguuggucuuggccagacggugcugaguugccauuuaccauugacaaguaa

SEQ ID NO: 54767 - RNA, 1410 nt, Artificial Sequence; identical to SEQ ID NO: 52591
  derived and/or modified CDS sequence (wt) from neuraminidase__InfluenzaA__AFN18158

SEQ ID NO: 54768 - RNA, 1410 nt, Artificial Sequence; identical to SEQ ID NO: 54729
  derived and/or modified CDS sequence (wt) from neuraminidase__InfluenzaA__AFN18160

SEQ ID NO: 54769 - RNA, 1410 nt, Artificial Sequence
  derived and/or modified CDS sequence (wt) from neuraminidase__InfluenzaA__AFN18166
augaauccaaaccaaaagauaauaaccauugguucggucuguaugacaauuggaauggcuaacuuaauauuacaaauuggaaacauaaucucaauauggauuagccacucaauucaacuugggaaucaaaaucagauugaaacaugcaaucaaagcgucauuacuuaugaaaacaagacuuggguaaaucagacauauguuaacaucagcaacgccaacuuugcugcuggacagucagugguuuccgugaaauuagcgggcaauuccucucucugcccuguuaguggaugggcuauauacaguaaagacaacaguauaagaaucgguuccaagggggauguguuugucauaagggaaccauucauaucaugcucccccuuggaaugcagaaccuucuucuugacucaaggggccuugcuaaaugacaaacauuccaauggaaccauuaaagacaggagcccauaucgaacccuaaugagcuguccuauuggugaaguucccucuccauacaacucaaaauuugagucagucgcuuggucagcaagugcuugucaugauggcaucaauuggcuaacaauuggaauuucuggcccagacaauggggcaguggcuguguuaaaguacaacggcauaauaacagacacuaucaagaguuggagaaacaauauauugagaacacaagagucugaaugugcauguguaaaugguucuugcuuuacuguaaugaccgauggaccaagugauggacaggccucauacaagaucuucagaauagaaaagggaaagauagucaaaucagucgaaaugaaugccccuaauuaucacuaugaggaaugcuccuguuauccugauucuagugaaaucacaugugugugcagggauaacuggcauggcucgaaucgaccgugggugucuuucaaccagaaucuggaauaucaaauaggauacauaugcagugggauuuucggagacaauccacgcccuaaugauaagacaggcaguugugguccaguaucgucuaauggagcaaauggaguaaaaggauuuucauucaaauacggcaaugguguuuggauagggagaacuaaaagcauuaguucaagaaacgguuuugagaugauuugggauccgaacggauggacugggacagacaauaacuucucaauaaagcaagauaucguaggaauaaaugaguggucaggauauagcgggaguuuuguucagcauccagaacuaacagggcuggauuguauaagaccuugcuucuggguugaacuaaucagagggcgacccaaagagaacacaaucuggacuagugggagcagcauauccuuuugugguguaaacagugacacuguggguuggucuuggccagacggugcugaguugccuuuuaccauugacaaguaa

SEQ ID NO: 54770 - RNA, 1410 nt, Artificial Sequence; identical to SEQ ID NO: 49786
  derived and/or modified CDS sequence (wt) from neuraminidase__InfluenzaA__AFN18172

SEQ ID NO: 54771 - RNA, 1410 nt, Artificial Sequence
  derived and/or modified CDS sequence (wt) from neuraminidase__InfluenzaA__AFN18178
augaauccaaaccaaaagauaauaaccauugguucggucuguaugacaauuggaauggcuaacuuaauauuacaaauuggaaacauaaucucaauauggauuagccacucaauucaacuugggaaucaaaaucagauugaaacaugcaaucaaagcgucauuacuuaugaaaacaacacuuggguaaaucagacauauguuaacaucagcaacaccaacuuugcugcuggacagucagugguuuccgugaaauuagcgggcaauuccucucucugcccuguuaguggaugggcuauauacaguaaagacaacaguauaagaaucgguuccaagggggauguguuugucauaagggaaccauucauaucaugcucccccuuggaaugcagaaccuucuucuugacucaaggggccuugcuaaaugacaaacauuccaauggaaccauuaaagacaggagcccauaucgaacccuaaugagcuguccuauuggugaaguucccucuccauacaacucaagauuugagucagucgcuuggucagcaagugcuugucaugauggcaucaauuggcuaacaauuggaauuucuggcccagacaauggggcaguggcugugcuaaaguacaacggcauaauaacagacacuaucaagaguuggagaaacaauauauugagaacacaagagucugaaugugcauguguaaaugguucuugcuuuacuguaaugaccgauggaccaagugauggacaggccucauacaagaucuucagaauagaaaagggaaagauagucaaaucagucgaaaugaaugccccuaauuaucacuaugaggaaugcuccuguuauccugauucuagugaaaucacaugugugugcagggauaacuggcauggcucgaaucgaccgugggugucuuucaaccagaaucuggaauaucagauaggauacauaugcagugggauuuucggagacaauccacgcccuaaugauaagacaggcaguugugguccaguaucgucuaauggagcaaauggaguaaaaggauuuucauucaaauacggcaaugguguuuggauagggagaacuaaaagcauuaguucaagaaacgguuuugagaugauuugggauccgaacggauggacugggacagacaauaacuucucaauaaagcaagauaucguaggaauaaaugaguggucaggauauagcgggaguuuuguucagcauccagaacuaacagggcugaauuguauaagaccuugcuucuggguugaacuaaucagagggcgacccaaagagaacacaaucuggacuagcgggagcagcauauccuuuugugguguaaacagugacacuguggguuggucuuggccagacggugcugaguugccauuuaccauugacaaguaa

SEQ ID NO: 54772 - RNA, 1410 nt, Artificial Sequence
  derived and/or modified CDS sequence (wt) from neuraminidase__InfluenzaA__AFN18184
augaauccaaaccaaaagauaauaaccauugguucggucuguaugacaauuggaauggcuaacuuaauauuacaaauuggaaacauaaucucaauauggauuagccacucaauucaacuugggaaucaaaaucagauugaaacaugcaaucaaagcgucauuacuuaugaaaacaacacuuggguaaaucagacauauguuaacaucagcaacaccaacuuugcugcuggacagucaaugguuuccgugaaauuagcgggcaauuccucucucugcccuguuaguggaugggcuauauacaguaaagacaacaguauaagaaucgguuccaagggggauguguuugucauaagggaaccauucauaucaugcucccccuuggaaugcagaaccuucuucuugacucaaggggccuugcuaaaugacaaacauuccaauggaaccauuaaagacaggagcccauaucgaacccuaaugagcuguccuauuggugaaguucccucuccauacaacucaagauuugagucagucgcuuggucagcaagugcuugucaugauggcaucaauuggcuaacaauuggaauuucuggcccagacaauggggcaguggcuguguuaaaguacaacggcauaauaacagacacuaucaagaguuggagaaacaauauauugagaacacaagagucugaaugugcauguguaaaugguucuugcuuuacuguaaugaccgauggaccaagugauggacaggccucauacaagaucuucagaauagaaaagggaaagauagucaaaucagucgaaaugaaugccccuaauuaucacuaugaggaaugcucauguuauccugauucuagugaaaucacaugugugugcagggauaacuggcauggcucgaaucgaccgugggugucuuucaaccagaaucuggaauaucagauaggauacauaugcagugggauuuucggagacaauccacgcccuaaugauaagacaggcaguugugguccaguaucgucuaauggagcaaauggaguaaaaggauuuucauucaaauacggcaaugguguuuggauagggagaacuaaaagcauuaguucaagaaacgguuuugagaugauuugggauccgaacggauggacugggacagacaauaacuucucaauaaagcaagauaucguaggaauaaaugaguggucaggauauagcgggaguuuuguccagcauccagaacuaacaggacuggauuguauaagaccuugcuucuggguugaacuaaucagagggcgacccaaagagaacacaaucuggacuagcgggagcagcauauccuuuugugguguaaacagugacacuguggguuggucuuggccagacggugcugaguugccauuuaccauugacaaguaa

SEQ ID NO: 54773 - RNA, 1410 nt, Artificial Sequence
  derived and/or modified CDS sequence (wt) from neuraminidase__InfluenzaA__AFN18190
augaauccaaaccaaaagauaauaaccauugguucggucuguaugacaauuggaauggcuaacuuaauauuacaaauuggaaacauaaucucaauauggauuagccacucaauucaacuugggaaucaaaaccagauugaaacaugcaaucaaagcgucauuacuuaugaaaacaacacuuggguaaaucagacauauguuaacaucagcaacaccaacuuugcugcuggacagucagugguuuccgugaaauuagcgggcaauuccucucucugcccuguuaguggaugggcuauauacaguaaagacaacaguauaagaaucgguuccaagggggauguguuugucauaagggaaccauucauaucaugcucccccuuggaaugcagaaccuucuucuugacucaaggggccuugcuaaaugacaaacauuccaauggaaccauuaaagacaggagcccauaucgaacccuaaugagcuguccuauuggugaaguucccucuccauacaacucaagauuugagucagucgcuuggucagcaagugcuugucaugauggcaucaauuggcuaacaauuggaauuucuggcccagacaauggggcaguggcuguguuaaaguacaacggcauaauaacagacacuaucaagaguuggagaaacaauauauugagaacacaagagucugaaugugcauguguaaaugguucuugcuuuacuguaaugaccgauggaccaagugauggacaggccucauacaagaucuucagaauagaaaagggaaagauagucaaaucagucgaaaugaaugccccuaauuaucacuaugaggaaugcuccuguuauccugauucuagugaaaucacaugugugugcagggauaacuggcauggcucgaaucgaccgugggugucuuucaaccagaaucuggaauaucagauaggauacauaugcagugggauuuucggagacaauccacgcccuaaugauaagacaggcaguugugguccaguaucgucuaauggagcaaauggaguaaaaggauuuucauucaaauacggcaaugguguuuggauagggagaacuaaaagcauuaguucaagaaacgguuuugagaugauuugggauccgaacggauggacugggacagacaaugacuucucaauaaagcaagauaucguaggaauaaaugaguggucaggauauagcgggaguuuuguucagcauccagaacuaacagggcuggauuguauaagaccuugcuucuggguugaacuaaucagagggcgacccaaagagaacacaaucuggacuagcgggagcagcauauccuuuugugguguaaacagugacacuguggguuggucuuggccagacggugcugaguugccauuuaccauugacaaguaa

SEQ ID NO: 54774 - RNA, 1410 nt, Artificial Sequence
  derived and/or modified CDS sequence (wt) from neuraminidase__InfluenzaA__AFN18196
augaauccaaaccaaaagauaauaaccauugguucggucuguaugacaauuggaauggcuaacuuaauauuacaaauuggaaacauaaccucaauauggauuagccacucaauucaacuugggaaucaaaaucagauugaaacaugcaaucaaagcgucauuacuuaugaaaacaacacuuggguaaaucagacauauguuaacaucagcaacaccaacuuugcugcuggacagucagugguuuccgugaaauuagcgggcaauuccucucucugcccuguuaguggaugggcuauauacaguaaagacaacaguauaagaaucgguuccaagggggauguguuugucauaagggaaccauucauaucaugcucccccuuggaaugcagaaccuucuucuugacucaaggggccuugcuaaaugacaaacauuccaauggaaccauuaaagacaggagcccauaucgaacccuaaugagcuguccuauuggugaaguucccucuccauacaacucaagauuugagucagucgcuuggucagcaagugcuugucaugauggcaucaauuggcuaacaauuggaauuucuggcccagacaauggggcaguggcuguguuaaaguacaacggcauaauaacagacacuaucaagaguuggagaaacaauauauugagaacacaagagucugaaugugcauguguaaaugguucuugcuuuacuguaaugaccgauggaccaagugauggacaggccucauacaagaucuucagaauagaaaagggaaagauagucaaaucagucgaaaugaaugccccuaauuaucacuaugaggaaugcuccuguuauccugauucuagugaaaucacaugugugugcagggauaacuggcauggcucgaaucgaccgugggugucuuucaaccagaaucuggaauaucagauaggauacauaugcagugggauuuucggagacaauccacgcccuaaugauaagacaggcaguugugguccaguaucgucuaauggagcaaauggaguaaaaggauuuucauucaaauacggcaaugguguuuggauagggagaacuaaaagcauuaguucaagaaacgguuuugagaugauuugggauccgaacggauggacugggacagacaauaacuucucaauaaagcaagauaucguaggaauuaaugaguggucaggauauagcgggaguuuuguucagcauccagaacuaacagggcuggauuguauaagaccuugcuucuggguugaacuaaucagagggcgacccaaagagaacacaaucuggacuagcgggagcagcauauccuuuugugguguaaacagugacacuguggguuggucuuggccagacggugcugaguugccauuuaccauugacaaguaa

SEQ ID NO: 54775 - RNA, 1410 nt, Artificial Sequence
  derived and/or modified CDS sequence (wt) from neuraminidase__InfluenzaA__AFN18202
augaauccaaaccaaaagauaauaaccauugguucggucuguaugacaauuggaauggcuaacuuaauauuacaaauuggaaacauaaucucaauauggauuagccacucaauucaacuugggaaucaaaaucagauugaaacaugcaaucaaagcgucauuacuuaugaaaacaacacuuggguaaaucagacauauguuaacaucagcaacaccaacuuugcugcuggacggucagugguuuccgugaaauuagcgggcaauuccucucucugcccuguuaguggaugggcuauauacaguaaagacaacaguauaagaaucgguuccaagggggauguguuugucauaagggaaccauucauaucaugcucccccuuggaaugcagaaccuucuucuugacucaaggggccuugcuaaaugacaaacauuccaauggaaccauuaaagacaggagcccauaucgaacccuaaugagcuguccuauuggugaaguucccucuccauacaacucaagauuugagucagucgcuuggucagcaagugcuugucaugauggcaucaauuggcuaacaauuggaauuucuggcccagacaauggggcaguggcuguguuaaaguacaacggcauaauaacagacacuaucaagaguuggagaaacaauauauugagaacacaagagucugaaugugcauguguaaaugguucuugcuuuacuguaaugaccgauggaccaagugauggacaggccucauacaagaucuucagaauagaaaagggaaagauagucaaaucagucgaaaugaaugccccuaauuaucacuaugaggaaugcuccuguuauccugauucuagugaaaucacaugugugugcagggauaacuggcauggcucgaaucgaccgugggugucuuucaaccagaaucuggaauaucagauaggauacauaugcagugggauuuucggagacaauccacgcccuaaugauaagacaggcaguugugguccaguaucgucuaauggagcaaauggaguaaaaggauuuucauucaaauacggcaaugguguuuggauagggagaacuaaaagcauuaguucaagaaacgguuuugagaugauuugggauccgaacggauggacugggacagacaauaacuucucaauaaagcaagauaucguaggaauaaaugaguggucaggauauagcgggaguuuuguucagcauccagaacuaacagggcuggauuguauaagaccuugcuucuggguugaacuaaucagagggcgacccaaagagaacacaaucuggacuagcgggagcagcauauccuuuugugguguaaacagugacacuguggguuggucuuggccagacggugcugaguugccauuuaccauugacaaguaa

SEQ ID NO: 54776 - RNA, 1410 nt, Artificial Sequence; identical to SEQ ID NO: 49776
  derived and/or modified CDS sequence (wt) from neuraminidase__InfluenzaA__AFN18208

SEQ ID NO: 54777 - RNA, 1410 nt, Artificial Sequence
  derived and/or modified CDS sequence (wt) from neuraminidase__InfluenzaA__AFN18210
augaauccaaaccaaaagauaauaaccauugguucggucuguaugacaauuggaauggcuaacuuaauauuacaaauuggaaacauaaucucaauauggauuagccacucaauucaacuugggaaucaaaaucagauugaaacaugcaaucaaagcgucauuacuuaugaaaacaacacuuggguaaaucagacauauguuaacaucagcaacaccaacuuugcugcuggacagucagugguuuccgugaaauuagcgggcaauuccucucucugcccuguuaguggaugggcuauauacaguaaagacaacaguauaagaaucgguuccaagggggauguguuugucauaagggaaccauucauaucaugcucccccuuggaaugcagagccuucuucuugacucaaggggccuugcuaaaugacaaacauuccaauggaaccauuaaagacaggagcccauaucgaacccuaaugagcuguccuauuggugaaguucccucuccauacaacucaagauuugagucagucgcuuggucagcaagugcuugucaugauggcaucaauuggcuaacaauuggaauuucuggcccagacaauggggcaguggcuguguuaaaguacaacggcauaauaacagacacuaucaagaguuggagaaacaauauauugagaacacaagagucugaaugugcauguguaaaugguucuugcuuuacuguaaugaccgauggaccaagugauggacaggccucauacaagaucuucagaauagaaaagggaaagauagucaaaucagucgaaaugaaugccccuaauuaucacuaugaggaaugcuccuguuauccugauucuagugaaaucacaugugugugcagggauaacuggcauggcucgaaucgaccgugggugucuuucaaccagaaucuggaauaucggauaggauacauaugcagugggauuuucggagacaauccacgcccuaaugauaagacaggcaguugugguccaguaucgucuaauggagcaaauggaguaaaaggauuuucauucaaauacggcaaugguguuuggauagggagaacuaaaagcauuaguucaagaaacgguuuugagaugauuugggauccgaacggauggacugggacagacaauaacuucucaauaaagcaagauaucguaggaauaaaugaguggucaggauauagcgggaguuuuguucagcauccagaacuaacagggcuggauuguauaagaccuugcuucuggguugaacuaaucagagggcgacucaaagagaacacaaucuggacuagcgggagcagcauauccuuuugugguguaaacagugacacuguggguuggucuuggccagacggugcugaguugccauuuaccauugacaaguaa

SEQ ID NO: 54778 - RNA, 1410 nt, Artificial Sequence; identical to SEQ ID NO: 51533
  derived and/or modified CDS sequence (wt) from neuraminidase__InfluenzaA__AFN18216

SEQ ID NO: 54779 - RNA, 1410 nt, Artificial Sequence
  derived and/or modified CDS sequence (wt) from neuraminidase__InfluenzaA__AFN18226
augaauccaaaccaaaagauaauaaccauugguucggucuguaugacaauuggaaugacuaacuuaauauuacaaauuggaaacauaaucucaauauggauuagccacucaauucaacuugggaaucaaaaucagauugaaacaugcaaucaaagcgucauuacuuaugaaaacaacacuuggguaaaucagacauauguuaacaucagcaacaccaacuuugcugcuggacagucagugguuuccgugaaauuagcgggcaauuccucucucugcccuguuaguggaugggcuauauacaguaaagacaacaguauaagaaucgguuccaagggggauguguuugucauaagggaaccauucauaucaugcucccccuuggaaugcagaaccuucuucuugacucaaggggccuugcuaaaugacaaacauuccaauggaaccauuaaagacaggagcccauaucgaacccuaaugagcuguccuauuggugaaguucccucuccauacaacucaagauuugagucagucgcuuggucagcaagugcuugucaugauggcaucaauuggcuaacaauuggaauuucuggcccagacaauggggcaguggcuguguuaaaguacaacggcauaauaacagacacuaucaagaguuggagaaacaauauauugagaacacaagagucugaaugugcauguguaaaugguucuugcuuuacuguaaugaccgauggaccaagugauggacaggccucauacaagaucuucagaauagaaaagggaaagauagucaaaucagucgaaaugaaugccccuaauuaucacuaugaggaaugcuccuguuauccugauucuagugaaaucacaugugugugcagggauaacuggcauggcucgaaucgaccgugggugucuuucaaccagaaucuggaauaucagauaggauacauaugcagugggauuuucggagacaauccacgcccuaaugauaagacaggcaguugugguccaguaucgucuaauggagcaaauggaguaaaaggauuuucauucaaauacggcaaugguguuuggauagggagaacuaaaagcauuaguucaagaaacgguuuugagaugauuugggauccgaacggauggacugggacagacaauaacuucucaauaaagcaagauaucguaggaauaaaugaguggucaggauauagcgggaguuuuguucagcauccagaacuaacagggcuggauuguauaagaccuugcuucuggguugaacuaaucagagggcgacccaaagagaacacaaucuggacuagcgggagcagcauauccuuuugugguguaaacagugacacuguggguuggucuuggccagacggugcugaguugccauuuaccauugacaaguaa

SEQ ID NO: 54780 - RNA, 1410 nt, Artificial Sequence; identical to SEQ ID NO: 50849
  derived and/or modified CDS sequence (wt) from neuraminidase__InfluenzaA__AFN18232

SEQ ID NO: 54781 - RNA, 1410 nt, Artificial Sequence; identical to SEQ ID NO: 49970
  derived and/or modified CDS sequence (wt) from neuraminidase__InfluenzaA__AFN18234

SEQ ID NO: 54782 - RNA, 1410 nt, Artificial Sequence; identical to SEQ ID NO: 53279
  derived and/or modified CDS sequence (wt) from neuraminidase__InfluenzaA__AFN18244

SEQ ID NO: 54783 - RNA, 1410 nt, Artificial Sequence
  derived and/or modified CDS sequence (wt) from neuraminidase__InfluenzaA__AFN18246
augaauccaaaccaaaagauaauaaccauugguucggucuguaugacaauuggaauggcuaacuuaauauuacaaauuggaaacauaaucucaauauggauuagccacucaauucaacuugggaaucaaaaucagauugaaacaugcaaucaaagcgucauuacuuaugaaaauaacacuuggguaaaucagacauauguuaacaucagcaacaccaacuuugcugcuggacagucagugguuuccgugaaauuagcgggcaauuccucucucugcccuguuaguggaugggcuauauacaguaaagacaacaguauaagaaucgguuccaagggggauguguuugucauaagggaaccauucauaucaugcucccccuuggaaugcagaaccuucuucuugacucaaggggccuugcuaaaugacaaacauuccaauggaaccauuaaagacaggagcccauaucgaacccuaaugagcuguccuauuggugaaguucccucuccauacaacucaagauuugagucagucgcuuggucagcaagugcuugucaugauggcauaaauuggcuaacaauuggaauuucuggcccagacaauggggcaguggcuguguuaaaguacaacggcauaauaacagacacuaucaagaguuggagaaacaauauauugagaacacaagagucugaaugugcauguguaaaugguucuugcuuuacuguaaugaccgauggaccaagugauggacaggccucauacaagaucuucagaauagaaaagggaaagauagucaaaucagucgaaaugaaugccccuaauuaucacuaugaggaaugcuccuguuacccugauucuagugaaaucacaugugugugcagggauaacuggcauggcucgaaucgaccgugggugucuuucaaccagaaucuggaauaucagauaggauacauaugcagugggauuuucggagacaauccacgcccuaaugauaagacaggcaguugugguccaguaucgucuaauggagcaaauggaguaaaaggauuuucauucaaauacggcaaugguguuuggauagggagaacuaaaagcauuaguucaagaaacgguuuugagaugauuugggauccgaacggauggacugggacagacaauaacuucucaauaaagcaagauaucguaggaauaaacgaguggucaggauauagcgggaguuuuguccagcauccagaacuaacagggcuggauuguauaagaccuugcuucuggguugaacuaaucagagggcgacccaaagagaacacaaucuggacuagcgggagcagcauauccuuuugugguguaaacagugacacuguggguuggucuuggccagacggugcugaguugccauuuaccauugacaaguaa

SEQ ID NO: 54784 - RNA, 1410 nt, Artificial Sequence; identical to SEQ ID NO: 54779
  derived and/or modified CDS sequence (wt) from neuraminidase__InfluenzaA__AFN18256

SEQ ID NO: 54785 - RNA, 1410 nt, Artificial Sequence; identical to SEQ ID NO: 53279
  derived and/or modified CDS sequence (wt) from neuraminidase__InfluenzaA__AFN18262

SEQ ID NO: 54786 - RNA, 1410 nt, Artificial Sequence; identical to SEQ ID NO: 53279
  derived and/or modified CDS sequence (wt) from neuraminidase__InfluenzaA__AFN18268

SEQ ID NO: 54787 - RNA, 1410 nt, Artificial Sequence
  derived and/or modified CDS sequence (wt) from neuraminidase__InfluenzaA__AFN18270
augaauccaaaccaaaagauaauaaccauugguucggucuguaugacaauuggaauggcuaacuuaauauuacaaauuggaaacauaaucucaauauggauuagccacucaauucaacuugggaaucaaaaucagauugaaacaugcaaucaaagcgucauuacuuaugaaaacaacacuuggguaaaucagacauauguuaacaucagcaacaccaacuuugcugcuggacagucagugguuuccgugaaauuagcgggcaauuccucucucugcccuguuaguggaugggcuauauacaguaaagacaacaguauaagaaucgguuccaagggggauguguuugucauaagggaaccauucauaucaugcucccccuuggaaugcagaaccuucuucuugacucaaggggccuugcuaaaugauaaacauuccaauggaaccauuaaagacaggagcccauaucgaacccuaaugagcuguccuauuggugaaguucccucuccauacaacucaagauuugagucagucgcuuggucagcaagugcuugucaugauggcaucaauuggcuaacaauuggaauuucuggcccagacaauggggcaguggcuguguuaaaguacaacggcauaauaacagacacuaucaagaguuggagaaacaauauauugagaacacaagagucugaaugugcauguguaaaugguucuugcuuuacuguaaugaccgauggaccaagugauggacaggccucauacaagaucuucagaauagaaaagggaaagauagucaaaucagucgaaaugaaugccccuaauuaucacuaugaggaaugcuccuguuauccugauucuagugaaaucacaugugugugcagggauaacuggcauggcucgaaucgaccgugggugucuuucaaccagaaucuggaauaucagauaggauacauaugcagugggauuuucggagacaauccacgcccuaaugauaagacaggcaguugugguccaguaucgucuaauggagcaaauggaguaaaaggauuuucauucaaauacggcaaugguguuuggauagggagaacuaaaagcauuaguucaagaaacggcuuugagaugauuugggauccgaacggauggacugggacagacaauaacuucucaauaaagcaagauaucguaggaauaaaugaguggucaggauauagcgggaguuuuguucagcauccagaacuaacagggcuggauuguauaagaccuugcuucuggguugaacuaaucagagggcgacccaaagagaacacaaucuggacuagcgggagcagcauauccuuuugugguguaaacagugacacuguggguuggucuuggccagacggugcugaguugccauuuaccauugacaaguaa

SEQ ID NO: 54788 - RNA, 1410 nt, Artificial Sequence
  derived and/or modified CDS sequence (wt) from neuraminidase__InfluenzaA__AFN18272
augaauccaaaccaaaagauaauaaccauugguucggucuguaugacaauuggaauggcuaacuuaauauuacaaauuggaaacauaaucucaauauggauuagccacucaauucaacuugggaaucaaaaucagauugaaacaugcaaucaaagcgucauuacuuaugaaaacaacacuuggguaaaucagacauauguuaacaucagcaacaccaacuuugcugcuggacagucagugguuuccgugaaauuagcgggcaauuccucucucugcccuguuaguggaugggcuauauacaguaaagacaacaguauaagaaucgguuccaagggggauguguuugucauaagggaaccauucauaucaugcucccccuuggaaugcagaaccuucuucuugacucaaggggccuugcuaaaugacaaacacuccaauggaaccauuaaagacaggagcccauaucgaacccuaaugagcuguccuauuggugaaguucccucuccauacaacucaagauuugagucagucgcuuggucagcaagugcuugucaugauggcaucaauuggcuaacaauuggaauuucuggcccagacaauggggcaguggcuguguuaaaguacaacggcauaauaacagacacuaucaagaguuggagaaacaauauauugagaacacaagagucugaaugugcauguguaaaugguucuugcuuuacuguaaugaccgauggaccaagugauggacaggccucauacaagaucuucagaauagaaaagggaaagauagucaaaucagucgaaaugaaugccccuaauuaucacuaugaggaaugcuccuguuauccugauucuagugaaaucacaugugugugcagggauaacuggcauggcucgaaucgaccgugggugucuuucaaccagaaucuggaauaucagauaggauacauaugcagugggauuuucggagacaauccacgcccuaaugauaagacaggcaguugugguccaguaucgucuaauggagcaaauggaguaaaaggauuuucauucaaauacggcaaugguguuuggauagggagaacuaaaagcauuaguucaagaaacgguuuugagaugauuugggauccgaacggauggacugggacagacaauaacuucucaauaaagcaagauaucguaggaauaaaugaguggucaggauauagcgggaguuuuguucagcauccagaacuaacagggcuggauuguauaagaccuugcuucuggguugaacuaaucagagggcgacccaaagagaacacaaucuggacuagcgggagcagcauguccuuuugugguguaaacagugacacuguggguuggucuuggccagacggugcugaguugccauuuaccauugacaaguaa

SEQ ID NO: 54789 - RNA, 1410 nt, Artificial Sequence; identical to SEQ ID NO: 50849
  derived and/or modified CDS sequence (wt) from neuraminidase__InfluenzaA__AFN18274

SEQ ID NO: 54790 - RNA, 1410 nt, Artificial Sequence; identical to SEQ ID NO: 50388
  derived and/or modified CDS sequence (wt) from neuraminidase__InfluenzaA__AFN18282

SEQ ID NO: 54791 - RNA, 1410 nt, Artificial Sequence
  derived and/or modified CDS sequence (wt) from neuraminidase__InfluenzaA__AFN18304
augaauccaaaccaaaagauaauaaccauugguucggucuguaugacaauuggaauggcuaacuuaauauuacaaauuggaaacauaaucucaauauggauuagccacucaauucaacuugggaaucaaaaucagauugaaacaugcaaucaaagcgucauuacuuaugaaaacaauacuuggguaaaucagacauauguuaacaucagcaacaccaacuuugcugcuggacagucagugguuuccgugaaauuagcgggcaauuccucucucugcccuguuaguggaugggcuauauacaguaaagacaacaguauaagaaucgguuccaagggggauguguuugucauaagggaaccauucauaucaugcucccccuuggaaugcagaaccuucuucuugacucaaggggccuugcuaaaugacaaacauuccaauggaaccauuaaagacaggagcccauaucgaacccuaaugagcuguccuauuggugaaguucccucuccauacaacucaagauuugagucagucgcuuggucagcaagugcuugucaugauggcaucaacuggcuaacaauuggaauuucuggcccagacaauggggcaguggcuguguuaaaguacaacggcauaauaacagacacuaucaagaguuggagaaacaauauauugagaacacaagagucugaaugugcauguguaaaugguucuugcuuuacuguaaugaccgacggaccaagugauggacaggccucauacaagaucuucagaauagaaaagggaaagauagucaaaucagucgaaaugaaugccccuaauuaucacuaugaggaaugcuccuguuauccugauucuagugaaaucacaugugugugcagggauaacuggcauggcucgaaucgaccgugggugucuuucaaccagaaucuggaauaucagauaggguacauaugcagugggauuuucggagacaauccacgcccuaaugauaagacaggcaguugugguccaguaucgucuaauggagcaaauggaguaaaaggauuuucauucaaauacggcaaugguguuuggauagggagaacuaaaagcauuaguucaagaaacgguuuugagaugauuugggauccgaacggauggacugggacagacaauaacuucucaauaaagcaagauaucguaggaauaaaugaguggucaggauauagcgggaguuuuguucagcauccagaacuaacagggcuggauuguauaagaccuugcuucuggguugaacuaaucagagggcgacccaaagagaacacaaucuggacuagcgggagcagcauauccuuuugcgguguaaacagugacacuguggguuggucuuggccagacggugcugaguugccauuuaccauugacaaguaa

SEQ ID NO: 54792 - RNA, 1410 nt, Artificial Sequence
  derived and/or modified CDS sequence (wt) from neuraminidase__InfluenzaA__AFN18306
augaauccaaaccaaaagauaauaaccauugguucggucuguaugacaauuggaauugcuaacuuaauauuacaaauuggaaacauaaucucaauauggauuagccacucaauucaacuugggaaucaaaaucagauugaaacaugcaaccaaagcgucauuacuuaugaaaacaacacuuggguaaaucagacauauguuaacaucagcaacaccaacuuugcugcuggacagucagugguuuccgugaaauuagcgggcaauuccucucucugcccuguuaguggaugggcuauauacaguaaagacaacaguauaagaaucgguuccaagggggauguguuugucauaagggaaccauucauaucaugcucccccuuggaaugcagaaccuucuucuugacucaaggggccuugcuaaaugacaaacauuccaauggaaccauuaaagacaggagcccauaucgaacccuaaugagcuguccuauuggugaaguucccucuccauacaacucaagauuugagucagucgcuuggucagcaagugcuugucaugauggcaucaauuggcuaacaauuggaauuucuggcccagacaauggggcaguggcuguguuaaaguacaacggcauaauaacagacacuaucaagaguuggagaaacaauauauugagaacacaagagucugaaugugcauguguaaaugguucuugcuuuacuguaaugaccgauggaccaagugauggacaggccucauacaagaucuucagaauagaaaagggaaagauagucaaaucagucgaaaugaaugccccuaauuaucacuaugaggaaugcuccuguuauccugauucuagugaaaucacaugugugugcagggauaacuggcauggcucgaaucgaccgugggugucuuucaaccagaaucuggaauaucagauaggauacauaugcagugggauuuucggagacaauccacgcccuaaugauaagacaggcaguugugguccaguaucgucuaauggagcaaauggaguaaaaggauuuucauucaaauacggcaaugguguuuggauagggagaacuaaaagcauuaguucaagaaacgguuuugagaugauuugggauccgaacggauggacugggacagacaauaacuucucaauaaagcaagauaucguaggaauaaaugaguggucaggauauagcgggaguuuuguucagcauccagaacuaacagggcuggauuguauaagaccuugcuucuggguugaacuaaucagagggcgacccaaagagaacacaaucuggacuagcgggagcagcauauccuuuugugguguaaacagugacacuguggguuggucuuggccagacggugcugaguugccauuuaccauugacaaguaa

SEQ ID NO: 54793 - RNA, 1410 nt, Artificial Sequence
  derived and/or modified CDS sequence (wt) from neuraminidase__InfluenzaA__AFN18308
augaauccaaaccaaaagauaauaaccauugguucggucuguaugacaauuggaauggcuaacuuaauauuacaaauuggaaacauaaucucaauauggauuagccacucaauucaacuugggaaucaaaaucagauugaaacaugcaaucaaagcgucauuacuuaugaaaacaacacuuggguaaaucagacauauguuaacaucagcaacaccaacuuugcugcuggacagucagugguuuccgugaaauuagcgggcaauuccucucucugcccuguuaguggaugggcuauauacaguaaagacaacaguauaagaaucgguuccaagggggauguguuugucauaagggaaccauucauaucaugcucccccuuagaaugcagaaccuucuucuugacucaaggggccuugcuaaaugacaaacauuccaauggaaccauuaaagacaggagcccauaucgaacccuaaugagcuguccuauuggugaaguucccucuccauacaacucaagauuugagucagucgcuuggucagcaagugcuugucaugauggcaucaauuggcuaacaauuggaauuucuggcccagacaauggggcaguggcuguguuaaaguacaacggcauaauaacagacacuaucaagaguuggagaaacaauauauugagaacacaagagucugaaugugcauguguaaaugguucuugcuuuacuguaaugaccgauggaccaagugauggacaggccucauacaagaucuucagaauagaaaagggaaagauagucaaaucagucgaaaugaaugccccuaauuaucacuaugaggaaugcuccuguuauccugauucuagugaaaucacaugugugugcagggauaacuggcauggcucgaaucgaccgugggugucuuucaaccagaaucuggaauaucagauaggauacauaugcagugggauuuucggagacaauccacgcccuaaugauaagacaggcaguugugguccaguaucgucuaaaggagcaaauggaguaaaaggauuuucauucaaauacggcaaugguguuuggauagggagaacuaaaagcauuaguucaagaaacgguuuugagaugauuugggauccgaacggauggacugggacagacaauaacuucucaauaaagcaagauaucguaggaauaaaugaauggucaggauauagcgggaguuuuguucagcauccagaacuaacagggcuggauuguauaagaccuugcuucuggguugaacuaaucagagggcgacccaaagagaacacaaucuggacuagcgggagcagcauauccuuuugugguguaaacagugacacuguggguuggucuuggccagacggugcugaguugccauuuaccauugacaaguaa

SEQ ID NO: 54794 - RNA, 1410 nt, Artificial Sequence
  derived and/or modified CDS sequence (wt) from neuraminidase__InfluenzaA__AFN18314
augaauccaaaccaaaagauaauaaccauugguucggucuguaugacaauuggaauggcuaacuuaauauuacaaauuggaaacauaaucucaauauggauuagccacucaauucaacuugggaaucaaaaucagauugaaacaugcaaucaaagcgucauuacuuaugaaaacaacacuuggguaaaucagacauauguuaacaucagcaacaccaacuuugcugcuggacagucagugguuuccgugaaauuagcgggcaauuccucucucugcccuguuaguggaugggcuauauacaguaaagacaacaguauaagaaucgguuccaagggggauguguuugucauaagggaaccauucauaucaugcucccccuuggaaugcagaaccuucuucuugacucaaggggccuugcuaaaugacaaacauuccaauggaaccauuaaagacaggagcccauaucgaacccuaaugagcuguccuauuggugaaguucccucuccauacaacucaagauuugagucagucgcuuggucagcaagugcuugucaugauggcaucaauuggcuaacaauuggaauuucuggcccagacaauggggcaguggcuguguuaaaguacaacggcauaauaacagacacuaucaagaguuggagaaacaauauauugagaacacaagagucugaaugugcauguguaaaugguucuugcuuuacuguaaugaccgauggaccaagugauggacaggccucauacaagaucuucagaauagaaaagggaaagauagucaaaucagucgaaaugaaugccccuaauuaucacuaugaggaaugcuccuguuauccugauucuagugaaaucacaugugugugcagggauaacuggcauggcucgaaucgaccgugggugucuuucaaccagaaucuggaauaccagauaggauacauaugcagugggauuuucggagacaauccacgcccuaaugauaagacaggcaguugugguccaguaucgucuaauggagcaaauggaguaaaaggauuuucauucaaauacggcaaugguguuuggauagggagaacuaaaagcauuaguucaagaaacgguuuugagaugauuugggauccgaacggauggacugggacagacaauaacuucucaauaaagcaagauaucguaggaauaaaugaguggucaggauauagcgggaguuuuguucagcauccagaacuaacagggcuggauuguauaagaccuugcuucuggguugaacuaaucagagggcgacccaaagagaaaacaaucuggacuagcgggagcagcauauccuuuugugguguaaacagugacacuguggguuggucuuggccagacggugcugaguugccauuuaccauugacaaguaa

SEQ ID NO: 54795 - RNA, 1410 nt, Artificial Sequence; identical to SEQ ID NO: 50388
  derived and/or modified CDS sequence (wt) from neuraminidase__InfluenzaA__AFN18320

SEQ ID NO: 54796 - RNA, 1410 nt, Artificial Sequence
  derived and/or modified CDS sequence (wt) from neuraminidase__InfluenzaA__AFN18326
augaauccaaaccaaaagauaauaaccauugguucggucuguaugacaauuggaauggcuaacuuacuauuacaaauuggaaacauaaucucaauauggauuagccacucaauucaacuugggaaucaaaaucagauugaaacaugcaaucaaagcgucauuacuuaugaaaacaacacuuggguaaaucagacauauguuaacaucagcaacaccaacuuugcugcuggacagucagugguuuccgugaaauuagcgggcaauuccucucucugcccuguuaguggaugggcuauauacaguaaagacaacaguauaagaaucgguuccaagggggauguguuugucauaagggaaccauucauaucaugcucccccuuggaaugcagaaccuucuucuugacucaaggggccuugcuaaaugacaaacauuccaauggaaccauuaaagacaggagcccauaucgaacccuaaugagcuguccuauuggugaaguucccucuccauacaacucaagauuugagucagucgcuuggucagcaagugcuugucaugauggcaucaauuggcugacaauuggaauuucuggcccagacaauggggcaguggcuguguuaaaguacaacggcauaauaacagacacuaucaagaguuggagaaacaauauauugagaacacaagagucugaaugugcauguguaaaugguucuugcuuuacuguaaugaccgauggaccaagugauggacaggccucauacaagaucuucagaauagaaaagggaaagauagucaaaucagucgaaaugaaugccccuaauuaucacuaugaggaaugcuccuguuauccugauucuagugaaaucacaugugugugcagggauaacuggcauggcucgaaucgaccgugggugucuuucaaccagaaucuggaauaucagauaggauacauaugcagugggauuuucggagacaauccacgcccuaaugauaagacaggcaguugugguccaguaucgucuaauggagcaaauggaguaaaaggauuuucauucaaauacggcaaugguguuuggauagggagaacuaaaagcauuaguucaagaaacgguuuugagaugauuugggauccgaacggauggacugggacagacaauaacuucucaauaaagcaagauaucguaggaauaaaugaguggucaggauauagcgggaguuuuguucagcauccagaacuaacagggcuggauuguauaagaccuugcuucuggguugaacuaaucagagggcgacccaaagagaacacaaucuggacuagcgggagcagcauauccuuuugugguguaaacagugacacuguggguuggucuuggccagacggugcugaguugccauuuaccauugacaaguaa

SEQ ID NO: 54797 - RNA, 1410 nt, Artificial Sequence; identical to SEQ ID NO: 48814
  derived and/or modified CDS sequence (wt) from neuraminidase__InfluenzaA__AFN18336

SEQ ID NO: 54798 - RNA, 1410 nt, Artificial Sequence; identical to SEQ ID NO: 48750
  derived and/or modified CDS sequence (wt) from neuraminidase__InfluenzaA__AFN18346

SEQ ID NO: 54799 - RNA, 1410 nt, Artificial Sequence; identical to SEQ ID NO: 54702
  derived and/or modified CDS sequence (wt) from neuraminidase__InfluenzaA__AFN18356

SEQ ID NO: 54800 - RNA, 1410 nt, Artificial Sequence
  derived and/or modified CDS sequence (wt) from neuraminidase__InfluenzaA__AFN18366
augaauccaaaccaaaagauaauaaccauugguucggucuguaugacaauuggaauggcuaacuuaauauuacaaauuggaaacauaaucucaauauggauuagccacucaauucaacuugggaaucaaaaucagauugaaacaugcaaucaaagcgucauuacuuaugaaaacaacacuuggguaaaucagacauauguuaacaucagcaacaccaacuuugcugcugaacagucagugguuuccgugaaauuagcgggcaauuccucucucugcccuguuaguggaugggcuauauacaguaaagacaacaguauaagaaucgguuccaagggggauguguuugucauaagggaaccauucauaucaugcucccccuuggaaugcagaaccuucuucuugacucaaggggccuugcuaaaugacaaacauuccaauggaaccauuaaagacaggagcccauaucgaacccuaaugagcuguccuauuggugaaguucccucuccauacaacucaagauuugagucagucgcuuggucagcaagugcuugucaugauggcaucaauuggcuaacaauuggaauuucuggcccagacaauggggcaguggcuguguuaaaguacaacggcauaauaacagacacuaucaagaguuggagaaacaauauauugagaacacaagagucugaaugugcauguguaaaugguucuugcuuuacuguaaugaccgauggaccaagugauggacaggccucauacaagaucuucagaauagaaaagggaaagauagucaaaucagucgaaaugaaugccccuaauuaucacuaugaggaaugcuccuguuauccugauucuagugaagucacaugugugugcagggauaacuggcauggcucgaaucgaccgugggugucuuucaaccagaaucuggaauaucagauaggauacauaugcagugggauuuucggagacaauccacgcccuaaugauaagacaggcaguugugguccaguaucgucuaauggagcaaauggaguaaaaggauuuucauucaaauacggcaaugguguuuggauagggagaacuaaaagcauuaguucaagaaacgguuuugaaaugauuugggauccgaacggauggacugggacagacaauaacuucucaauaaagcaagauaucguaggaauaaaugaguggucaggauauagcgggaguuuuguucagcauccagaacuaacagggcuggauuguauaagaccuugcuucuggguugaacuaaucagagggcgacccaaagagaacacaaucuggacuagcgggagcagcauauccuuuugugguguaaacagugacacuguggguuggucuuggccagacggugcugaguugccauuuaccauugacaaguaa

SEQ ID NO: 54801 - RNA, 1410 nt, Artificial Sequence; identical to SEQ ID NO: 54678
  derived and/or modified CDS sequence (wt) from neuraminidase__InfluenzaA__AFN18376

SEQ ID NO: 54802 - RNA, 1410 nt, Artificial Sequence; identical to SEQ ID NO: 48750
  derived and/or modified CDS sequence (wt) from neuraminidase__InfluenzaA__AFN18382

SEQ ID NO: 54803 - RNA, 1410 nt, Artificial Sequence; identical to SEQ ID NO: 50874
  derived and/or modified CDS sequence (wt) from neuraminidase__InfluenzaA__AFN18392

SEQ ID NO: 54804 - RNA, 1410 nt, Artificial Sequence; identical to SEQ ID NO: 48750
  derived and/or modified CDS sequence (wt) from neuraminidase__InfluenzaA__AFN18402

SEQ ID NO: 54805 - RNA, 1410 nt, Artificial Sequence; identical to SEQ ID NO: 48750
  derived and/or modified CDS sequence (wt) from neuraminidase__InfluenzaA__AFN18412

SEQ ID NO: 54806 - RNA, 1410 nt, Artificial Sequence; identical to SEQ ID NO: 48750
  derived and/or modified CDS sequence (wt) from neuraminidase__InfluenzaA__AFN18422

SEQ ID NO: 54807 - RNA, 1410 nt, Artificial Sequence; identical to SEQ ID NO: 48750
  derived and/or modified CDS sequence (wt) from neuraminidase__InfluenzaA__AFN18432

SEQ ID NO: 54808 - RNA, 1410 nt, Artificial Sequence; identical to SEQ ID NO: 48750
  derived and/or modified CDS sequence (wt) from neuraminidase__InfluenzaA__AFN18442

SEQ ID NO: 54809 - RNA, 1410 nt, Artificial Sequence; identical to SEQ ID NO: 48750
  derived and/or modified CDS sequence (wt) from neuraminidase__InfluenzaA__AFN18452

SEQ ID NO: 54810 - RNA, 1410 nt, Artificial Sequence; identical to SEQ ID NO: 48750
  derived and/or modified CDS sequence (wt) from neuraminidase__InfluenzaA__AFN18462

SEQ ID NO: 54811 - RNA, 1410 nt, Artificial Sequence
  derived and/or modified CDS sequence (wt) from neuraminidase__InfluenzaA__AFN18472
augaauccaaaccaaaagauaauaaccauugguucggucuguaugacaauuggaauggcuaacuuaauauuacaaauuggaaacauaaucucaauauggauuagccacucaauucaacuugggaaucaaaaucagauugaaacaugcaaucaaagcgucauuacuuaugaaaacaacacuuggguaaaucagacauauguuaacaucagcaacaccaacuuugcugcuggacagucagugguuuccgugaaauuagcgggcaauuccucucucugcccuguuaguggaugggcuauauacaguaaagacaacaguauaagaaucgguuccaagggggauguguuugucauaagggaaccauucauaucaugcucccccuuggaaugcagaaccuucuucuugacucaaggggccuugcuaaaugacaaacauuccaauggaaccauuaaagacaggagcccauaucgaacccuaaugagcuguccuauuggugaaguucccucuccauacaacucaagauuugagucagucgcuuggucagcaagugcuugucaugauggcaucaauuggcuaacaauuggaauuucuggcccagacaauggggcaguggcuguguuaaaguacaacggcauaauaacagacacuaucaagaguuggagaaacaauauauugagaacacaagagucugaaugugcauguguaaaugguucuugcuuuacuguaaugaccgauggaccaagugauggacaggccucauacaagaucuucagaauagaaaagggaaagauagucaaaucagucgaaaugaaugccccuaauuaucacuaugaggaaugcuccuguuauccugauucuagugaaaucacaugugugugcagggauaacuggcauggcucgaaucgaccgugggugucuuucaaccagaaucuggaauaucagauaggauacauaugcagugggauuuucggagacaauccacgcccuaaugauaagacaggcaguugugguccaguaucgucuaauggagcaaagggaguaaaaggauuuucauucaaauacggcaaugguguuuggauagggagaacuaaaagcauuaguucaagaaacgguuuugagaugauuugggauccgaacggauggacugggacagacaauaacuucucaauaaagcaagauaucguaggaauaaaugaguggucaggauauagcgggaguuuuguucagcauccagaacuaacagggcuggauuguauaagaccuugcuucuggguugaacuaaucagagggcgacccaaagagaacacaaucuggacuagcgggagcagcauauccuuuugugguguaaacagugacacuguggguuggucuuggccagacggugcugaguugccauuuaccauugacaaguaa

SEQ ID NO: 54812 - RNA, 1410 nt, Artificial Sequence; identical to SEQ ID NO: 48750
  derived and/or modified CDS sequence (wt) from neuraminidase__InfluenzaA__AFN18482

SEQ ID NO: 54813 - RNA, 1410 nt, Artificial Sequence; identical to SEQ ID NO: 49543
  derived and/or modified CDS sequence (wt) from neuraminidase__InfluenzaA__AFN18492

SEQ ID NO: 54814 - RNA, 1410 nt, Artificial Sequence
  derived and/or modified CDS sequence (wt) from neuraminidase__InfluenzaA__AFN18514
augaauccaaaccaaaagauaauaaccauugguucggucuguaugacaauuggaauggcuaacuuaauauuacaaauuggaaacauaaucucaauauggauuagccacucaauucaacuugggaaucaaaaucagauugaaacaugcaaucaaagcgucauuacuuaugaaaacaacacuuggguaaaucagacauauguuaacaucagcaacaccaacuuugcugcuggacagucagugguuuccgugaaauuagugggcaauuccucucucugcccuguuaguggaugggcuauauacaguaaagacaacaguauaagaaucgguuccaagggggauguguuugucauaagggaaccauucauaucaugcucccccuuggaaugcagaaccuucuucuugacucaaggggccuugcuaaaugacaaacauuccaauggaaccauuaaagacaggagcccauaucgaacccuaaugagcuguccuauuggugaaguucccucuccauacaacucaagauuugagucagucgcuuggucagcaagugcuugucaugauggcaucaauuggcuaacaauuggaauuucuggcccagacaauggggcaguggcuguguuaaaguacaacggcauaauaacagacacuaucaagaguuggagaaacaauauauugagaacacaagagucugaaugugcauguguaaaugguucuugcuuuacuguaaugaccgauggaccaagugauggacaggccucauacaagaucuucagaauagaaaagggaaagauagucaaaucagucgaaaugaaugccccuaauuaucacuaugaggaaugcuccuguuauccugauucuagugaaaucacaugugugugcagggauaacuggcauggcucgaaucgaccgugggugucuuucaaccagaaucuggaauaucagauaggauacauaugcagugggauuuucggagacaauccacgcccuaaugauaagacaggcaguugugguccaguaucgucuaauggagcaaauggaguaaaaggauuuucauucaaauacggcaaugguguuuggauagggagaacuaaaagcauuaguucaagaaacgguuuugagaugauuugggauccgaacggauggacugggacagacaauaacuucucaauaaagcaagauaucguaggaauaaaugaguggucaggauauagcgggaguuuuguucagcauccagaacuaacagggcuggauuguauaagaccuugcuucuggguugaacuaaucagagggcgacccaaagagaacacaaucuggacuagcgggagcagcauauccuuuugugguguaaacagugacacuguggguuggucuuggccagacggugcugaguugccauuuaccauugacaaguaa

SEQ ID NO: 54815 - RNA, 1410 nt, Artificial Sequence
  derived and/or modified CDS sequence (wt) from neuraminidase__InfluenzaA__AFN18520
augaauccaaaccaaaagauaauaaccauugguucggucuguaugacaauuggaauggccaacuuaauauuacaaauuggaaacauaaucucaauauggauuagccacucaauucaacuugggaaucaaaaucagauugaaacaugcaaucaaagcgucauuacuuaugaaaacaacacuuggguaaaucagacauauguuaacaucagcaacaccaacuuugcugcuggacagucagugguuuccgugaaauuagcgggcaauuccucucucugcccuguuaguggaugggcuauauacaguaaagacaacaguauaagaaucgguuccaagggggauguguuugucauaagggaaccauucauaucaugcucccccuuggaaugcagaaccuucuucuugacucaaggggccuugcuaaaugacaaacauuccaauggaaccauuaaagacaggagcccauaucgaacccuaaugagcuguccuauuggugaaguucccucuccauacaacucaagauuugagucagucgcuuggucagcaagugcuugucaugauggcaucaauuggcuaacaauuggaauuucuggcccagacaauggggcaguggcuguguuaaaguacaacggcguaauaacagacacuaucaagaguuggagaaacaauauauugagaacacaagagucugaaugugcauguguaaaugguucuugcuuuacuuuaaugaccgauggaccaagugauggacaggccucauacaagaucuucagaauagaaaagggaaagauagucaaaucagucgaaaugaaugccccuaauuaucacuaugaggaaugcuccuguuauccugauucuagugaaaucacaugugugugcagggauaacuggcauggcucgaaucgaccgugggugucuuucaaccagaaucuggaauaucagauaggauacauaugcagugggauuuucggagacaauccacgcccuaaugauaagacaggcaguugugguccaguaucgucuaauggagcaaauggaguaaaaggauuuucauucaaauacggcaaugguguuuggauagggagaacuaaaagcauuaguucaagaaacgguuuugagaugauuugggauccgaacggauggacugggacagacaauaacuucucaauaaagcaagauaucguaggaauaaaugaguggucaggauauagcgggaguuuuguucagcauccagaacuaacagggcuggauuguauaagaccuugcuucuggguugaacuaaucagagggcgacccaaagagaacacaaucuggacuagcgggagcagcauauccuuuugugguguaaacagugacacuguggguuggucuuggccagacggugcugaguugccauuuaccauugacaaguaa

SEQ ID NO: 54816 - RNA, 1410 nt, Artificial Sequence
  derived and/or modified CDS sequence (wt) from neuraminidase__InfluenzaA__AFN18522
augaauccaaaccaaaagauaauaaccauugguucggucuguaugacaauuggaauggcuaacuuaauauuacaaauuggaaacauaaucucaauauggauuagccacucaauucaacuugggaaucaaaaucagauugaaacaugcaaucaaagcgucauuacuuaugaaaacaacacuuggguaaaucagacauauguuaacaucagcaacaccaacuuugcugcuggacagucagugguuuccgugaaauuagcgggcaauuccucucucugcccuguuaguggaugggcuauauacaguaaagacaacaguauaagaaucgguuccaagggggauguguuugucauaagggaaccauucauaucaugcucccccuuggaaugcagaaccuucuucuugacucaaggggccuugcuaaaugacaaacauuccaauggaaccauuaaagacaggagcccauaucgaacccuaaugagcuguccuauuggugaaguucccucuccauacaacucaagauuugagucagucgcuuggucagcaagugcuugucaugauggcaucaauuggcuaacaauuggaauuucuggcccagacaauggggcaguggcuguguuaaaguacaacggcauaauaacagacacuaucaagaguuggagaaacaauauauugagaacacaagagucugaaugugcauguguaaaugguucuugcuuuacuguaaugaccgauggaccaagugauggacaggccucauacaagaucuucagaauagaaaagggaaagauagucaaaucagucgaaaugaaugccccuaauuaucacuaugaggaaugcuccuguuauccugauucuagugaaaucacaugugugugcagggauaacuggcauggcucgaaucgaccgugggugucuuucaaccagaaucuggaauaucagauaggauacauaugcagugggauuuucggagacaauccacgcccuaaugauaagacaggcaguugugguccaguaucgucuaauggagcaaauggaguaaaaggauuuucauucaaauacggcaaugguguuuggauagggagaacuaaaagcauuaguucaagaaacgguuuugagaugauuugggauccgaacggauggacugggacagacaauaacuucucaauaaagcaagauaucguaggaauaaaugaguggucaggauauagcgggaguuuuguucagcauccagaacuaacagggcuggauuguauaagaccuugcuucuggguugaacuaaucagagggcgacccaaagagaauacaaucuggacuagcgggagcagcauauccuuuugugguguaaacagugacacuguggguuggucuuggccagacggugcugaguugccauuuaccauugacaaguaa

SEQ ID NO: 54817 - RNA, 1410 nt, Artificial Sequence; identical to SEQ ID NO: 48750
  derived and/or modified CDS sequence (wt) from neuraminidase__InfluenzaA__AFN18524

SEQ ID NO: 54818 - RNA, 1410 nt, Artificial Sequence; identical to SEQ ID NO: 54702
  derived and/or modified CDS sequence (wt) from neuraminidase__InfluenzaA__AFN18530

SEQ ID NO: 54819 - RNA, 1410 nt, Artificial Sequence; identical to SEQ ID NO: 50774
  derived and/or modified CDS sequence (wt) from neuraminidase__InfluenzaA__AFN18532

SEQ ID NO: 54820 - RNA, 1410 nt, Artificial Sequence; identical to SEQ ID NO: 48750
  derived and/or modified CDS sequence (wt) from neuraminidase__InfluenzaA__AFN18538

SEQ ID NO: 54821 - RNA, 1410 nt, Artificial Sequence; identical to SEQ ID NO: 48750
  derived and/or modified CDS sequence (wt) from neuraminidase__InfluenzaA__AFN18544

SEQ ID NO: 54822 - RNA, 1410 nt, Artificial Sequence; identical to SEQ ID NO: 48750
  derived and/or modified CDS sequence (wt) from neuraminidase__InfluenzaA__AFN18546

SEQ ID NO: 54823 - RNA, 1410 nt, Artificial Sequence
  derived and/or modified CDS sequence (wt) from neuraminidase__InfluenzaA__AFN18552
augaauccaaaccaaaagauaauaaccauugguucggucuguaugacaauuggaauggcuaacuuaauauuacaaauuggaaacauaaucucaauauggauuagccacucaauucaacuugggaaucaaaaucagauugaaacaugcaaucaaagcgucauuacuuaugaaaacaacacuuggguaaaucagacauauguuaacaucagcaacaccaacuuugcugcuggacagucagugguuuccgugaaauuagcgggcaauuccucucucugcccuguuaguggaugggcuauauacaguaaagacaacaguauaagaaucgguuccaagggggauguguuugucauaagggaaccauucauaucaugcucccccuuggaaugcagaaccuucuucuugacucaaggggccuugcuaaaugacaaacauuccaauggaaccauuaaagacaggagcccauaucgaacccuaaugagcuguccuauuggugaaguucccucuccauacaacucaagauuugagucagucgcuuggucagcaagugcuugucaugauggcaucaauuggcuaacaauuggaauuucuggcccagacaauggggcaguggcuguguuaaaguacaacggcauaauaacagacacuaucaagaguuggagaaacaauauauugagaacacaagagucugaaugugcauguguaaaugguucuugcuuuacuguaaugaccgauggaccaagugauggacaggccucauacaagaucuucagaauagaaaagggaaagauagucaaaucagucgaaaugaaugccccuaauuaucacuaugaggaaugcuccuguuauccugauucuagugaaaucacaugugugugcagggauaacuggcauggcucgaaucgaccgugggugucuuucaaccagaaucuggaauaucagauaggauacauaugcagugggauuuucggagacaauccacgcccuaaugauaagacaggcaguugugguccaguaucgucuaauggagcaaauggaguaaaaggauuuucauucaaauacggcaaugguguuuggauagggagaacuaaaagcauuaguucaagaaacgguuuugagaugauuugggauccgaacggauggacugggacagacaauaacuucucaauaaagcaagauaucguaggaauaaaugaguggucaggauauagcgggagcuuuguucagcauccagaacuaacagggcuggauuguauaagaccuugcuucuggguugaacuaaucagagggcgacccaaagagaacacaaucuggacuagcgggagcagcauauccuuuugugguguaaacagugacacuguggguuggucuuggccagacggugcugaguugccauuuaccauugacaaguaa

SEQ ID NO: 54824 - RNA, 1410 nt, Artificial Sequence; identical to SEQ ID NO: 49772
  derived and/or modified CDS sequence (wt) from neuraminidase__InfluenzaA__AFN18558

SEQ ID NO: 54825 - RNA, 1410 nt, Artificial Sequence; identical to SEQ ID NO: 52985
  derived and/or modified CDS sequence (wt) from neuraminidase__InfluenzaA__AFN18560

SEQ ID NO: 54826 - RNA, 1410 nt, Artificial Sequence; identical to SEQ ID NO: 51000
  derived and/or modified CDS sequence (wt) from neuraminidase__InfluenzaA__AFN18562

SEQ ID NO: 54827 - RNA, 1410 nt, Artificial Sequence
  derived and/or modified CDS sequence (wt) from neuraminidase__InfluenzaA__AFN18564
augaauccaaaccaaaagauaauaaccauugguucggucuguaugacaauuggaauggcuaacuuaauauuacaaauuggaaacauaaucucaauauggauuagccacucaauucaacuugggaaucaaaaucagauugaaacaugcaaucaaagcgucauuacuuaugaaaacaacacuuggguaaaucagacauauguuaacaucagcaacaccaacuuugcugcuggacagucagugguuuccgugaaauuagcgggcaauuccucucucugcccuguuaguggaugggcuauauacaguaaagacaacaguauaagaaucgguuccaagggggauguguuugucauaagggaaccauucauaucaugcucccccuuggaaugcagaaccuucuucuugacucaaggggccuugcuaaaugacaaacauuccaauggaaccauuaaagacaggagcccauaucgaacccuaaugagcuguccuauuggugaaguucccucuccauacaacucaagauuugagucagucgcuuggucagcaagugcuugucaugauggcaucaauuggcuaacaauuggaauuucuggcccagacaauggggcaguggcuguguuaaaguacaacggcauaauaacagacacuaucaagaguuggagaaacaauauauugagaacacaagagucugaaugugcauguguaaaugguucuugcuuuacuguaaugaccgauggaccaagugauggacaggccucauacaagaucuucagaauagaaaagggaaagauagucaaaucagucgaaaugaaugccccuaauuaucacuaugaggaaugcuccuguuauccugauucuagugaaaucacaugugugugcagggauaacuggcauggcucgaaucgaccgugggugucuuucaaccagaaucuggaauaucagauaggauacauaugcagugggauuuucggagacaauccacgcccuaaugacaagacaggcaguugugguccaguaucgucuaauggagcaaauggaguaaaaggauuuucauucaaauacggcaaugguguuuggauagggagaacuaaaagcauuaguucaagaaacgguuuugagaugauuugggauccgaauggauggacugggacagacaauaacuucucaauaaagcaagauaucguaggaauaaaugaguggucaggauauagcgggaguuuuguucagcauccagaacuaacagggcuggauuguauaagaccuugcuucuggguugaacuaaucagagggcgacccaaagagaacacaaucuggacuagcgggagcagcauauccuuuugugguguaaacagugacacuguggguuggucuuggccagacggugcugaguugccauuuaccauugacaaguaa

SEQ ID NO: 54828 - RNA, 1410 nt, Artificial Sequence
  derived and/or modified CDS sequence (wt) from neuraminidase__InfluenzaA__AFN18566
augaauccaaaccaaaagauaauaaccauugguucggucuguaugacaauuggaauggcuaacuuaauauuacaaaucggaaacauaaucucaauauggauuagccacucaauucaacuugggaaucaaaaucagauugaaacaugcaaucaaagcgucauuacuuaugaaaacaacacuuggguaaaucagacauauguuaacaucagcaacaccaacuuugcugcuggacagucagugguuuccgugaaauuagcgggcaauuccucucucugcccuguuaguggaugggcuauauacaguaaagacaacaguauaagaaucgguuccaagggggauguguuugucauaagggaaccauucauaucaugcucccccuuggaaugcagaaccuucuucuugacucaaggggccuugcuaaaugacaaacauuccaauggaaccauuaaagacaggagcccauaucgaacccuaaugagcuguccuauuggugaaguucccucuccauacaacucaagauuugagucagucgcuuggucagcaagugcuugucaugauggcaucaauuggcuaacaauuggaauuucuggcccagacaauggggcaguggcuguguuaaaguacaacggcauaauaacagacacuaucaagaguuggagaaacaauauauugagaacacaagagucugaaugugcauguguaaaugguucuugcuuuacuguaaugaccgauggaccaagugauggacaggccucauacaagaucuucagaauagaaaagggaaagauagucaaaucagucgaaaugaaugccccuaauuaucacuaugaggaaugcuccuguuauccugauucuagugaaaucacaugugugugcagggauaacuggcauggcucgaaucgaccgugggugucuuucaaccagaaucuggaauaucagauaggauacauaugcagugggauuuucggagacaauccacgcccuaaugauaagacaggcaguugugguccaguaucgucuaauggagcaaauggaguaaaaggauuuucauucaaauacggcaaugguguuuggauagggagaacuaaaagcauuaguucaagaaacgguuuugagaugauuugggauccgaacggauggacugggacagacaauaacuucucaauaaagcaagauaucguaggaauaaaugaguggucaggauauagcgggaguuuuguucagcauccagaacuaacagggcuggauuguauaagaccuugcuucuggguugaacuaaucagagggcgacccaaagagaacacaaucuggacuagcgggagcagcauauccuuuugugguguaaacagugacacuguggguuggucuuggccagacggugcugaguugccauuuaccauugacaaguaa

SEQ ID NO: 54829 - RNA, 1410 nt, Artificial Sequence; identical to SEQ ID NO: 48750
  derived and/or modified CDS sequence (wt) from neuraminidase__InfluenzaA__AFN18572

SEQ ID NO: 54830 - RNA, 1410 nt, Artificial Sequence
  derived and/or modified CDS sequence (wt) from neuraminidase__InfluenzaA__AFN18582
augaauccaaaccaaaagauaauaaccauugguucggucuguaugacaauuggaauggcuaacuuaauauuacaaauuggaaacauaaucucaauauggauuagccacucaauucaacuugggaaucaaaaucagauugaaacaugcaaucaaagcgucauuacuuaugaaaacaacacuuggguaaaucagacauauguuaacaucagcaacaccaacuuugcugcuggacagucagugguuuccgugaaauuagcgggcaauuccucucucugcccuguuaguggaugggcuauauacaguaaagacaacaguauaagaaucgguuccaagggggauguguuugucauaagggaaccauucauaucaugcucccccuuggaaugcagaaccuucuucuugacucaaggggccuugcuaaaugacaaacauuccaauggaaccauuaaagacaggagcccauaucgaacccuaaugagcuguccuauuggugaaguucccucuccauacaacucaagauuugagucagucgcuuggucagcaagugcuugucaugauggcaucaauuggcuaacaauuggaauuucuggcccagacaauggggcaguggcuguguuaaaguacaacggcauaauaacagacacuaucaagaguuggagaaacaauauauugagaacacaagagucugaaugugcauguguaaaugguucuugcuuuacuguaaugaccgauggaccaagugauggacaggccucauacaagaucuucagaauagaaaagggaaagauagucaaaucagucgaaaugaaugccccuaauuaucacuaugaggaaugcuccuguuauccugauucuagugaaaucacaugugugugcagggauaacuggcauggcucgaaucgaccgugggugucuuucaaccagaaccuggaauaucagauaggauacauaugcagugggauuuucggagacaauccacgcccuaaugauaagacaggcaguugugguccaguaucgucuaauggagcaaauggaguaaaaggauuuucauucaaauacggcaaugguguuuggauagggagaacuaaaagcauuaguucaagaaacgguuuugagaugauuugggauccgaacggauggacugggacagacaauaacuucucaauaaagcaagauaucguaggaauaaaugaguggucaggauauagcgggaguuuuguucagcauccagaacuaacagggcuggauuguauaagaccuugcuucuggguugaacuaaucagagggcgacccaaagagaacacaaucuggacuagcgggagcagcauauccuuuugugguguaaacagugacacuguggguuggucuuggccagacggugcugaguugccauuuaccauugacaaguaa

SEQ ID NO: 54831 - RNA, 1410 nt, Artificial Sequence; identical to SEQ ID NO: 48750
  derived and/or modified CDS sequence (wt) from neuraminidase__InfluenzaA__AFN18592

SEQ ID NO: 54832 - RNA, 1410 nt, Artificial Sequence
  derived and/or modified CDS sequence (wt) from neuraminidase__InfluenzaA__AFN18602
augaauccaaaccaaaagauaauaaccauugguucggucuguaugacaauuggaauggcuaacuuaauauuacaaauuggaaacauaaucucaauauggauuagccacucaauucaacuugggaaucaaaaucagauugaaacaugcaaucaaagcgucauuacuuaugaaaacaacacuuggguaaaucaaacauauguuaacaucagcaacaccaacuuugcugcuggacagucagugguuuccgugaaauuagcgggcaauuccucucucugcccuguuaguggaugggcuauauacaguaaagacaacaguauaagaaucgguuccaagggggauguguuugucauaagggaaccauucauaucaugcucccccuuggaaugcagaaccuucuucuugacucaaggggccuugcuaaaugacaaacauuccaauggaaccauuaaagacaggagcccauaucgaacccuaaugagcuguccuauuggugaaguucccucuccauacaacucaagauuugagucagucgcuuggucagcaagugcuugucaugauggcaucaauuggcuaacaauuggaauuucuggcccagacaauggggcaguggcuguguuaaaguacaacggcauaauaacagacacuaucaagaguuggagaaacaauauauugagaacacaagagucugaaugugcauguguaaaugguucuugcuuuacuuuaaugaccgauggaccaagugauggacaggccucauacaagaucuucagaauagaaaagggaaagauagucaaaucagucgaaaugaaugccccuaauuaucacuaugaggaaugcuccuguuauccugauucuagugaaaucacaugugugugcagggauaacuggcauggcucgaaucgaccgugggugucuuucaaccagaaucuggaauaucagauaggauacauaugcagugggauuuucggagacaauccacgcccuaaugauaagacaggcaguugugguccaguaucgucuaauggagcaaauggaguaaaaggauuuucauucaaauacggcaaugguguuuggauagggagaacuaaaagcauuaguucaagaaacgguuuugagaugauuugggauccgaacggauggacugggacagacaauaacuucucaauaaagcaagauaucguaggaauaaaugaguggucaggauauagcgggaguuuuguucagcauccagaacuaacagggcuggauuguauaagaccuugcuucuggguugaacuaaucagagggcgacccaaagagaacacaaucuggacuagcgggagcagcauauccuuuugugguguaaacagugacacuguggguuggucuuggccagacggugcugaguugccauuuaccauugacaaguaa

SEQ ID NO: 54833 - RNA, 1410 nt, Artificial Sequence
  derived and/or modified CDS sequence (wt) from neuraminidase__InfluenzaA__AFN18612
augaauccaaaccaaaagauaauaaccauugguucggucuguaugacaauuggaauggcuaacuuaauauuacaaauuggaaacauaaucucaauauggauuagccacucaauucaacuugggaaucaaaaucagauugaaacaugcaaucaaagcgucauuacuuaugaaaacaacacuuggguaaaucagacauauguuaacaucagcaacaccaacuuugcugcuggacagucagugguuuccgugaaauuagcgggcaauuccucucucugcccuguuaguggaugggcuauauacaguaaagacaacaguauaagaaucgguuccaagggggauguguuugucauaagggaaccauucauaucaugcucccccuuggaaugcagaaccuucuucuugacucaaggggccuugcuaaaugacaaacauuccaauggaaccauuaaagacaggagcccauaucgaacccuaaugagcuguccuauuggugaaguucccucuccauacaacucaagauuugagucagucgcuuggucagcaagugcuugucaugauggcaucaauuggcuaacaauuggaauuucuggcccagacaauggggcaguggcuguguuaaaguacaacggcauaauaacagacacuaucaagaguuggagaaacaauauauugagaacacaagagucugaaugugcauguguaaaugguucuugcuuuacugugaugaccgauggaccaagugauggacaggccucauacaagaucuucagaauagaaaagggaaagauaaucaaaucagucgaaaugaaugccccuaauuaucacuaugaggaaugcuccuguuauccugauucuagugaaaucacaugugugugcagggauaacuggcauggcucgaaucgaccgugggugucuuucaaccagaaucuggaauaucagauaggauacauaugcagugggauuuucggagacaauccacgcccuaaugauaagacaggcaguugugguccaguaucgucuaauggagcaaauggaguaaaaggauuuucauucaaauacggcaaugguguuuggauagggagaacuaaaagcauuaguucaagaaacgguuuugagaugauuugggauccgaacggauggacugggacagacaauaacuucucaauaaagcaagauaucguaggaauaaaugaguggucaggauauagcgggaguuuuguucagcauccagaacuaacagggcuggauuguauaagaccuugcuucuggguugaacuaaucagagggcgacccaaagagaacacaaucuggacuagcgggagcagcauauccuuuugugguguaaacagugacacuguggguuggucuuggccagacggugcugaguugccauuuaccauugacaaguaa

SEQ ID NO: 54834 - RNA, 1410 nt, Artificial Sequence
  derived and/or modified CDS sequence (wt) from neuraminidase__InfluenzaA__AFN18618
augaauccaaaccaaaagauaauaaccauugguucggucuguaugacaauuggaauggcuaacuuaauauuacaaauuggaaacauaaucucaauauggauuagccacucaauucaacuugggaaucaaaaucagauugaaacaugcaaucaaagcgucauuacuuaugaaaacaacacuuggguaaaucagacauauguuaacaucagcaacaccaacuuugcugcuggacagucagugguuuccgugaaauuagcgggcaauuccucucucugcccuguuaguggaugggcuauauacaguaaagacaacaguauaagaaucgguuccaagggggauguguuugucauaagggaaccauucauaucaugcucccccuuggaaugcagaaccuucuucuugacucaaggggccuugcuaaaugacaaacauuccaauggaaccauuaaagacaggagcccauaucgaacccuaaugagcuguccuauuggugaaguucccucuccauacaacucaagauuugagucagucgcuuggucagcaagugcuugucaugauggcaucaauuggcuaacaauuggaauuucuggcccagacaauggggcaguggcuguguuaaaguacaacggcauaauaacagacacuaucaagaguuggagaaacaauauauugagaacacaagagucugaaugugcauguguaaaugguucuugcuuuacuguaaugaccgauggaccaagugauggacaggccucauacaagaucuucagaauagaaaagggaaagauagucaaaucagucgaaaugaaugccccuaauuaucacuaugaggaaugcuccuguuauccugauucuagugaaaucacaugugugugcagggauaacuggcauggcucgaaucgaccgugggugucuuucaaccagaaucuggaauaucagauaggauacauaugcagugggauuuucggagacaauccacgcccuaaugauaagacaggcaguugugguccaguaucgucuaauggagcaaauggaguaaaaggauuuucauucaaauacggcaaugguguuuggauagggagaacuaaaagcauuaguucaagaaacgguuuugagaugauuugggauccgaacggauggacugggacagacaauaacuucucaauaaagcaagauaucguaggaauaaaugaguggucaggauauagcgggaguuuuguucagcacccagaacuaacagggcuggauuguauaagaccuugcuucuggguugaacuaaucagagggcgacccaaagagaacacaaucuggacuagcgggagcagcauauccuuuugugguguaaacagugacacuguggguuggucuuggccagacggugcugaguugccauuuaccauugacaaguaa

SEQ ID NO: 54835 - RNA, 1410 nt, Artificial Sequence
  derived and/or modified CDS sequence (wt) from neuraminidase__InfluenzaA__AFN18624
augaauccaaaccaaaagauaauaaccauugguucggucuguaugacaauuggaauggcuaacuuaauauuacaaauuggaaacauaaucucaauauggauuagccacucaauucaacuugggaaucaaaaucagauugaaacaugcaaucaaagcgucauuacuuaugaaaacaacacuuggguaaaucagacauauguuaacaucagcaacaccaacuuugcugcuggacagucagugguuuccgugaaauuagcgggcaauuccucucucugcccuguuaguggaugggcuauauacaguaaagacaacaguauaagaaucgguuccaagggggauguguuugucauaagggaaccauucauaucaugcucccccuuggaaugcagaaccuucuucuugacucaaggggccuugcuaaaugacaaacauuccaauggaaccauuaaagacaggagcccauaucgaacccuaaugagcuguccuauuggugaaguucccucuccauacaacucaagauuugagucagucgcuuggucagcaagugcuugucaugauggcaucaauuggcuaacaauuggaauuucuggcccaaacaauggggcaguggcuguguuaaaguacaacggcauaauaacagacacuaucaagaguuggagaaacaauauauugagaacacaagagucugaaugugcauguguaaaugguucuugcuuuacuguaaugaccgauggaccaagugauggacaggccucauacaagaucuucagaauagaaaagggaaagauagucaaaucagucgaaaugaaugccccuaauuaucacuaugaggaaugcuccuguuauccugauucuagugaaaucacaugugugugcagggauaacuggcauggcucgaaucgaccgugggugucuuucaaccagaaucuggaauaucagauaggauacauaugcagugggauuuucggagacaauccacgcccuaaugauaagacaggcaguugugguccaguaucgucuaauggagcaaauggaguaaaaggauuuucauucaaauacgguaaugguguuuggauagggagaacuaaaagcauuaguucaagaaacgguuuugagaugauuugggauccgaacggauggacugggacagacaauaacuucucaauaaagcaagauaucguaggaauaaaugaguggucaggauauagcgggaguuuuguucagcauccagaacuaacagggcuggauuguauaagaccuugcuucuggguugaacuaaucagagggcgacccaaagagaacacaaucuggacuagcgggagcagcauauccuuuugugguguaaacagugacacuguggguuggucuuggccagacggugcugaguugccauuuaccauugacaaguaa

SEQ ID NO: 54836 - RNA, 1410 nt, Artificial Sequence
  derived and/or modified CDS sequence (wt) from neuraminidase__InfluenzaA__AFN18630
augaauccaaaccaaaagauaauaaccauugguucggucuguaugacaauuggaauggcuaacuuaauauuacaaauuggaaacauaaucucaauauggauuagccacucaauucaacuugggaaucaaaaucagauugaaacaugcaaucaaagcgucauuacuuaugaaaacaacacauggguaaaucagacauauguuaacaucagcaacaccaacuuugcugcuggacagucagugguuuccgugaaauuagcgggcaauuccucucucugcccuguuaguggaugggcuauauacaguaaagacaacaguauaagaaucgguuccaagggggauguguuugucauaagggaaccauucauaucaugcucccccuuggaaugcagaaccuucuucuugacucaaggggccuugcuaaaugacaaacauuccaauggaaccauuaaagacaggagcccauaucgaacccuaaugagcuguccuauuggugaaguucccucuccauacaacucaagauuugagucagucgcuuggucagcaagugcuugucaugauggcaucaauuggcuaacaauuggaauuucuggcccagacaauggggcaguggcuguguuaaaguacaacggcauaauaacagacacuaucaagaguuggagaaacaauauauugagaacacaagagucugaaugugcauguguaaaugguucuugcuuuacuguaaugaccgauggaccaagugauggacaggccucauacaagaucuucagaauagaaaagggaaagauagucaaaucagucgaaaugaaugccccuaauuaucacuaugaggaaugcuccuguuauccugauucuagugaaaucacaugugugugcagggauaacuggcauggcucgaaucgaccgugggugucuuucaaccagaaucuggaauaucagauaggauacauaugcagugggaucuucggagacaauccacgcccuaaugauaagacaggcaguugugguccaguaucgucuaauggagcaaauggaguaaaaggauuuucauucaaauacggcaaugguguuuggauagggagaacuaaaagcauuaguucaagaaacgguuuugagaugauuugggauccgaacggauggacugggacagacaauaacuucucaauaaagcaagauaucguaggaauaaaugaguggucaggauauagcgggaguuuuguucagcauccagaacuaacagggcuggguuguauaagaccuugcuucuggguugaacuaaucagagggcgacccaaagagaacacaaucuggacuagcgggagcagcauauccuuuugugguguaaacagugacacuguggguuggucuuggccagacggugcugaguugccauuuaccauugacaaguaa

SEQ ID NO: 54837 - RNA, 1410 nt, Artificial Sequence
  derived and/or modified CDS sequence (wt) from neuraminidase__InfluenzaA__AFN18636
augaauccaaaccaaaagauaauaaccauugguucggucuguaugacaauuggaauggcuaacuuaauauuacaaauuggaaacauaaucucaauauggauuagccacucaauucaacuugggaaucaaaaucagauugaaacaugcaaucaaagcgucauuacuuaugaaaacaacacuuggguaaaucagacauauguuaacaucagcaacaccaacuuugcugcuggacagucagugguuuccgugaaauuagcgggcaauuccucucucugcccuguuaguggaugggcuauauacaguaaagacaacaguauaagaaucgguuccaagggggauguguuugucauaagggaaccauucauaucaugcucccccuuggaaugcagaaccuucuucuugacucaaggggccuugcuaaaugacaaacauuccaauggaaccauuaaagacaggagcccauaucgaacccuaaugagcuguccuauuggugaaguucccucuccauacaacucaagauuugagucagucgcuuggucagcaagugcuugucaugauggcaucaauuggcuaacaauuggaauuucuggcccagacaauggggcaguggcuguguuaaaguacaacggcauaauaacagacacuaucaagaguuggagaaacaauauauugagaacacaagagucugaaugugcauguguaaaugguucuugcuuuacuguaaugaccgauggaccaagugauggacaggccucauacaagaucuucagaauagaaaagggaaagauagucaaaucagucgaaaugaaugccccuaauuaucacuaugaggaaugcuccuguuauccugauucuagugaaaucacaugugugugcagggauaacuggcauggcucgaaucgaccgugggugucuuucaaccagaaucuggaauaucggauaggauacauaugcagugggauuuucggagacaauccacgcccuaaugauaagacaggcaguugugguccaguaucgucuaauggagcaaauggaguaaaaggauuuucauucaaauacggcaaugguguuuggauagggagaacuaaaagcauuaguucaagaaacgguuuugagaugauuugggauccgaacggauggacugggacagacaauaacuucucaauaaagcaagauaucguaggaauaaaugaguggucaggauauagcgggaguuuuguucagcauccagaacuaacagggcuggauuguauaagaccuugcuucuggguugaacuaaucagagggcgauccaaagagaacacaaucuggacuagcgggagcagcauauccuuuugugguguaaacagugacacuguggguuggucuuggccagacggugcugaguugccauuuaccauugacaaguaa

SEQ ID NO: 54838 - RNA, 1410 nt, Artificial Sequence; identical to SEQ ID NO: 48750
  derived and/or modified CDS sequence (wt) from neuraminidase__InfluenzaA__AFN18646

SEQ ID NO: 54839 - RNA, 1410 nt, Artificial Sequence; identical to SEQ ID NO: 48750
  derived and/or modified CDS sequence (wt) from neuraminidase__InfluenzaA__AFN18656

SEQ ID NO: 54840 - RNA, 1410 nt, Artificial Sequence
  derived and/or modified CDS sequence (wt) from neuraminidase__InfluenzaA__AFN18666
augaauccaaaccaaaagauaauaaccauugguucggucuguaugacaauuggaauggcuaacuuaauauuacaaauuggaaacauaaucucaauauggauuagccacucaauucaacuugggaaucaaaaucagauugaaacaugcaaucaaagcgucauuacuuaugaaaacaacacuuggguaaaucagacauauguuaacaucagcaacaccaacuuugcugcuggacagucagugguuuccgugaaauuagcgggcaauuccucucucugcccuguuaguggaugggcuauauacaguaaagacaacaguauaagaaucgguuccaagggggauguguuugucauaagggaaccauucauaucaugcucccccuuggaaugcagaaccuucuucuugacucaaggggccuugcuaaaugacaaacauuccaauggaaccauuaaagacaggagcccauaucgaacccuaaugagcuguccuauuggugaaguucccucuccauacaacucaagauuugagucagucgcuuggucagcaagugcuugucaugauggcaucaauuggcuaacaauuggaauuucuggcccagacaauggggcaguggcuguguuaaaguacaacggcauaauaacagacacuaucaagaguuggagaaacaauauauugagaacacaagagucugaaugugcauguguaaaugguucuugcuuuacuguaaugaccgauggaccaagugauggacaggccucauacaagaucuucagaauagaaaagggaaagauagucaaaucagucgaaaugaaugccccuaauuaucacuaugaggaaugcuccuguuauccugauucuagugaaaucacaugugugugcagggauaacuggcauggcucgaaucgaccgugggugucuuucaaccagaaucuggaauaucagauaggauacauaugcagugggauuuucggagacaauccacgcccuaaugauaagacaggcaguugugguccaguaucgucuaauggagcaaauggaguaaaaggauuuucauucaaauacggcaaugguguuuggauagggagaacuaaaagcauuaguucaagaaacgguuuugagaugauuugggauccgaacggauggacugggacagacaauaacuucucaauaaagcaagauaucguaggaauaaaugaguggucaggauauagcgggaguuuuguucagcauccagaacuaacagggcuggauuguauaagaccuugcuucuggguugaacuaaucagagggcgacccaaagagaacacaaucuggacuagcgggagcagcauauccuuuugugguguaaacagugacacuguggguuggucuuggccagacggugcugaguugccauuuaucauugacaaguaa

SEQ ID NO: 54841 - RNA, 1410 nt, Artificial Sequence
  derived and/or modified CDS sequence (wt) from neuraminidase__InfluenzaA__AFN18676
augaauccaaaccaaaagauaauaaccauugguucggucuguaugacaauuggaauggcuaacuuaauauuacaaauuggaaacauaaucucaauauggauuagccacucaauucaacuugggaaucaaaaucagauugaaacaugcaaucaaagcgucauuacuuaugaaaacaacacuuggguaaaucagacauauguuaacaucagcaacaccaacuuugcugcuggacagucagugguuuccgugaaauuagcgggcaauuccucucucugcccuguuaguggaugggcuauauacaguaaagacaacaguauaagaaucgguuccaagggggauguguuugucauaagggaaccauucauaucaugcucccccuuggaaugcagaaccuucuucuugacucaaggggccuugcuaaaugacaaacauuccaauggaaccauuaaagacaggagcccauaucgaacccuaaugagcuguccuauuggugaaguucccucuccauacaacucaagauuugagucagucgcuuggucagcaagugcuugucaugauggcaucaauuggcuaacaauuggaauuucuggcccagacaauggggcaguggcuguguuaaaguacaacggcauaauaacagacacuaucaagaguuggagaaacaauauauugagaacacaagagucugaaugugcauguguaaaugguucuugcuuuacuguaaugaccgauggaccaagugauggacaggccucauacaagaucuucagaauagaaaagggaaagauagucaaaucagucgaaaugaaugccccuaauuaucacuaugaggaaugcuccuguuauccugauucuagugaaaucacaugugugugcagggauaacuggcauggcucgaaucgaccgugggugucuuucaaccagaaucuggaauaucggauaggauacauaugcagugggauuuucggagacaauccacgcccuaaugauaagacaggcaguugugguccaguaucgucuaauggagcaaauggaguaaaaggauuuucauucaaauacggcaaugguguuuggauagggagaacuaaaagcauuaguucaagaaacgguuuugagaugauuugggauccgaacggauggacugagacagacaauaacuucucaauaaagcaagauaucguaggaauaaaugaguggucaggauauagcgggaguuuuguucagcauccagaacuaacagggcuggauuguauaagaccuugcuucuggguugaacuaaucagagggcgacccaaagagaacacaaucuggacuagcgggagcagcauauccuuuugugguguaaacagugacacuguggguuggucuuggccagacggugcugaguugccauuuaccauugacaaguaa

SEQ ID NO: 54842 - RNA, 1410 nt, Artificial Sequence
  derived and/or modified CDS sequence (wt) from neuraminidase__InfluenzaA__AFN18686
augaauccaaaccaaaagauaauaaccauugguucggucuguaugacaauuggaauggcuaacuuaauauuacaaauuggaaacauaaucucaauauggauuagccacucaauucaacuugggaaucaaaaucagauugaaacaugcaaucaaagcgucauuacuuaugaaaacaacacuuggguaaaucagacauauguuaacaucagcagcaccaacuuugcugcuggacagucagugguuuccgugaaauuagcgggcaauuccucucucugcccuguuaguggaugggcuauauacaguaaagacaacaguauaagaaucgguuccaagggggauguguuugucauaagggaaccauucauaucaugcucccccuuggaaugcagaaccuucuucuugacucaaggggccuugcuaaaugacaaacauuccaauggaaccauuaaagacaggagcccauaucgaacccuaaugagcuguccuauuggugaaguucccucuccauacaacucaagauuugagucagucgcuuggucagcaagugcuugucaugauggcaucaauuggcuaacaauuggaauuucuggcccagacaauggggcaguggcuguguuaaaguacaacggcauaauaacagacacuaucaagaguuggagaaacaauauauugagaacacaagaguccgaaugugcauguguaaaugguucuugcuuuacuuuaaugaccgauggaccaagugauggacaggccucauacaagaucuucagaauagaaaagggaaagauagucaaaucagucgaaaugaaugccccuaauuaucacuaugaggaaugcuccuguuauccugauucuagugaaaucacaugugugugcagggauaacuggcauggcucgaaucgaccgugggugucuuucaaccagaaucuggaauaucagauaggauacauaugcagugggauuuucggagacaauccacgcccuaaugauaagacaggcaguugugguccaguaucgucuaauggagcaaauggaguaaaaggauuuucauucaaauacggcaaugguguuuggauagggagaacuaaaagcauuaguucaagaaacgguuuugagaugauuugggauccgaacggauggacugggacagacaauaacuucucaauaaagcaagauaucguaggaauaaaugaguggucaggauauagcgggaguuuuguucagcauccagaacuaacagggcuggauuguauaagaccuugcuucuggguugaacuaaucagagggcgacccaaagagaacacaaucuggacuagcgggagcagcauauccuuuugugguguaaacagugacacuguggguuggucuuggccagacggugcugaguugccauuuaccauugacaaguaa

SEQ ID NO: 54843 - RNA, 1410 nt, Artificial Sequence; identical to SEQ ID NO: 48750
  derived and/or modified CDS sequence (wt) from neuraminidase__InfluenzaA__AFN18696

SEQ ID NO: 54844 - RNA, 1410 nt, Artificial Sequence; identical to SEQ ID NO: 51337
  derived and/or modified CDS sequence (wt) from neuraminidase__InfluenzaA__AFN18706

SEQ ID NO: 54845 - RNA, 1410 nt, Artificial Sequence; identical to SEQ ID NO: 48750
  derived and/or modified CDS sequence (wt) from neuraminidase__InfluenzaA__AFN18716

SEQ ID NO: 54846 - RNA, 1410 nt, Artificial Sequence; identical to SEQ ID NO: 48750
  derived and/or modified CDS sequence (wt) from neuraminidase__InfluenzaA__AFN18727

SEQ ID NO: 54847 - RNA, 1410 nt, Artificial Sequence
  derived and/or modified CDS sequence (wt) from neuraminidase__InfluenzaA__AFN18737
augaauccaaaccaaaagauaauaaccauugguucggucuguaugacaauuggaauggcuaacuuaauauuacaaauuggaaacauaaucucaauauggauuagccacucaauucaacuugggaaucaaaaucagauugaaacaugcaaucaaagcgucauuacuuaugaaaacaacacuuggguaaaucagacauauguuaacaucagcaacaccaacuuugcugcuggacagucagugguuuccgugaaauuagcgggcaauuccucucucugcccuguuaguggaugggcuauauacaguaaagacaacaguauaagaaucgguuccaagggggauguguuugucauaagggaaccauucauaucaugcucccccuuggaaugcagaaccuucuucuugacucaaggggccuugcuaaaugacaaacauuccaauggaaccauuaaagacaggagcccauaucgaacccuaaugagcuguccuauuggugaaguucccucuccauacaacucaagauuugagucagucgcuuggucagcaagugcuugucaugauggcaucaauuggcuaacaaucggaauuucuggcccagacaauggggcaguggcuguguuaaaguacaacggcauaauaacagacacuaucaagaguuggagaaacaauauauugagaacacaagagucugaaugugcauguguaaaugguucuugcuuuacuguaaugaccgauggaccaagugauggacaggccucauacaagaucuucagaauagaaaagggaaagauagucaaaucagucgaaaugaaugccccuaauuaucacuaugaggaaugcuccuguuauccugauucuagugaaaucacaugugugugcagggauaacuggcauggcucgaaucgaccgugggugucuuucaaccagaaucuggaauaucagauaggauacauaugcagugggauuuucggagacaauccacgcccuaaugauaagacaggcaguugugguccaguaucgucuaauggagcaaauggaguaaaaggauuuucauucaaauacggcaaugguguuuggauagggagaacuaaaagcauuaguucaagaaacgguuuugagaugguuugggauccgaacggauggacugggacagacaauaacuucucaauaaagcaagauaucguaggaauaaaugaguggucaggauauagcgggaguuuuguucagcauccagaacuaacagggcuggauuguauaagaccuugcuucuggguugaacuaaucagagggcgacccaaagagaacacaaucuggacuagcgggagcagcauauccuuuugugguguaaacagugacacuguggguuggucuuggccagacggugcugaguugccauuuaccauugacaaguaa

SEQ ID NO: 54848 - RNA, 1410 nt, Artificial Sequence
  derived and/or modified CDS sequence (wt) from neuraminidase__InfluenzaA__AFN18743
augaauccaaaccaaaagauaauaaccauugguucggucuguaugacaauuggaauggcuaacuuaauauuacaaauuggaaacauaaucucaauauggauuagccacucaauucaacuugggaaucaaaaucagauugaaacaugcaaucaaagcgucauuacuuaugaaaacaacacuuggguaaaucagacauauguuaacaucagcaacaccaacuuugcugcuggacagucagugguuuccgugaaauuagcgggcaauuccucucucugcccuguuaguggaugggcuauauacaguaaagacaacaguauaagaaucgguuccaagggggauguguuugucauaagggaaccauucauaucaugcucccccuuggaaugcagaaccuuuuucuugacucaaggggccuugcuaaaugacaaacauuccaauggaaccauuaaagacaggagcccauaucgaacccuaaugagcuguccuauuggugaaguucccucuccauacaacucaagauuugagucagucgcuuggucagcaagugcuugucaugauggcaucaauuggcuaacaauuggaauuucuggcccagacaauggggcaguggcuguguuaaaguacaacggcauaauaacagacacuaucaagaguuggagaaacaauauauugagaacacaagagucugaaugugcauguguaaaugguucuugcuuuacuguaaugaccgauggaccaagugauggacaggccucauacaagaucuucagaauagaaaagggaaagauagucaaaucagucgaaaugaaugccccuaauuaucacuaugaggaaugcuccuguuauccugauucuagugaaaucacaugugugugcagggauaacuggcauggcucgaaucgaccgugggugucuuucaaccagaaucuggaauaucagauaggauacauaugcagugggauuuucggagacaauccacgcccuaaugauaagacaggcaguugugguccaguaucgucuaauggagcaaauggaguaaaaggauuuucauucaaauacggcaaugguguuuggauagggagaacuaaaagcauuaguucaagaaacgguuuugagaugauuugggauccgaacggauggacugggacagacaauaacuucucaauaaagcaagauaucguaggaauaaaugaguggucaggauauagcgggaguuuuguucagcauccagaacuaacagggcuggauuguauaagaccuugcuucuggguugaacuaaucagagggcgacccaaagagaacacaaucuggacuagcgggagcagcauauccuuuugugguguaaacagugacacuguggguuggucuuggccagacggugcugaguugccauuuaccauugacaaguaa

SEQ ID NO: 54849 - RNA, 1410 nt, Artificial Sequence
  derived and/or modified CDS sequence (wt) from neuraminidase__InfluenzaA__AFN18749
augaauccaaaccaaaagauaauaaccauugguucggucuguaugacaauuggaauggcuaacuuaauauuacaaauuggaaacauaaucucaauauggauuagccacucaauucaacuugggaaucaaaaucagauugaaacaugcaaucaaagcgucauuacuuaugaaaacaacaccuggguaaaucagacauauguuaacaucagcaacaccaacuuugcugcuggacagucagugguuuccgugaaauuagcgggcaauuccucucucugcccuguuaguggaugggcuauauacaguaaagacaacaguauaagaaucgguuccaagggggauguguuugucauaagggaaccauucauaucaugcucccccuuggaaugcagaaccuucuucuugacucaaggggccuugcuaaaugacaaacauuccaauggaaccauuaaagacaggagcccauaucgaacccuaaugagcuguccuauuggugaaguucccucuccauacaacucaagauuugagucagucgcuuggucagcaagugcuugucaugauggcaucaauuggcuaacaauuggaauuucuggcccagacaauggggcaguggcuguguuaaaguacaacggcauaauaacagacacuaucaagaguuggagaaacaauauauugagaacacaagagucugaaugugcauguguaaaugguucuugcuuuacuguaaugaccgauggaccaagugauggacaggccucauacaagaucuucagaauagaaaagggaaagauagucaaaucagucgaaaugaaugccccuaauuaucacuaugaggaaugcuccuguuauccugauucuagugaaaucacaugugugugcagggauaacuggcauggcucgaaucgaccgugggugucuuucaaccagaaucuggaauaucagauaggauacauaugcagugggauuuucggagacaauccacgcccuaaugacaagacaggcaguugugguccaguaucgucuaauggagcaaauggaguaaaaggauuuucauucaaauacggcaaugguguuuggauagggagaacuaaaagcauuaguucaagaaacgguuuugagaugauuugggauccgaacggauggacugggacagacaauaacuucucaauaaagcaagauaucguaggaauaaaugaguggucaggauauagcgggaguuuuguucagcauccagaacuaacagggcuggauuguauaagaccuugcuucuggguugaacuaaucagagggcgacccaaagagaacacaaucuggacuagcgggagcagcauauccuuuugugguguaaacagugacacuguggguuggucuuggccagacggugcugaguugccauuuaccauugacaaguaa

SEQ ID NO: 54850 - RNA, 1410 nt, Artificial Sequence; identical to SEQ ID NO: 48750
  derived and/or modified CDS sequence (wt) from neuraminidase__InfluenzaA__AFN18759

SEQ ID NO: 54851 - RNA, 1410 nt, Artificial Sequence
  derived and/or modified CDS sequence (wt) from neuraminidase__InfluenzaA__AFN18769
augaauccaaaccaaaagauaauaaccauugguucggucuguaugacaauuggaauggccaacuuaauauuacaaauuggaaacauaaucucaauauggauuagccacucaauucaacuugggaaucaaaaucagauugaaacaugcaaucaaagcgucauuacuuaugaaaacaacacuuggguaaaucagacauauguuaacaucagcaacaccaacuuugcugcuggacagucagugguuuccgugaaauuagcgggcaauuccucucucugcccuguuaguggaugggcuauauacaguaaagacaacaguauaagaaucgguuccaagggggauguguuugucauaagggaaccauucauaucaugcucccccuuggaaugcagaaccuucuucuugacucaaggggccuugcuaaaugacaaacauuccaauggaaccauuaaagacaggagcccauaucgaacccuaaugagcuguccuauuggugaaguucccucuccauacaacucaagauuugagucagucgcuuggucagcaagugcuugucaugauggcaucaauuggcuaacaauuggaauuucuggcccagacaauggggcaguggcuguguuaaaguacaacggcauaauaacagacacuaucaagaguuggagaaacaauauauugagaacacaagagucugaaugugcauguguaaaugguucuugcuuuacuuuaaugaccgauggaccaagugauggacaggccucauacaagaucuucagaauagaaaagggaaagauagucaaaucagucgaaaugaaugccccuaauuaucacuaugaggaaugcuccuguuauccugauucuaaugaaaucacaugugugugcagggauaacuggcauggcucgaaucgaccgugggugucuuucaaccagaaucuggaauaucagauaggauacauaugcagugggauuuucggagacaauccacgcccuaaugauaagacaggcaguugugguccaguaucgucuaauggagcaaauggaguaaaaggauuuucauucaaauacggcaaugguguuuggauagggagaacuaaaagcauuaguucaagaaacgguuuugagaugauuugggauccgaacggauggacugggacagacaauaacuucucaauaaagcaagauaucguaggaauaaaugaguggucaggauauagcgggaguuuuguucagcauccagaacuaacagggcuggauuguauaagaccuugcuucuggguugaacuaaucagagggcgacccaaagagaacacaaucuggacuagcgggagcagcauauccuuuugugguguaaacagugacacuguggguuggucuuggccagacggugcugaguugccauuuaccauugacaaguaa

SEQ ID NO: 54852 - RNA, 1410 nt, Artificial Sequence
  derived and/or modified CDS sequence (wt) from neuraminidase__InfluenzaA__AFN18775
augaauccaaaccaaaagauaauaaccauugguucggucuguaugacaauuggaauggccaacuuaauauuacaaauuggaaacauaaucucaauauggauuagccacucaauucaacuugggaaucaaaaucagauugaaacaugcaaucaaagcgucauuacuuaugaaaacaacacuuggguaaaucagacauauguuaacaucagcaacaccaacuuugcugcuggacagucagugguuuccgugaaauuagcgggcaauuccucucucugcccuguuaguggaugggcuauauacaguaaagacaacaguauaagaaucgguuccaagggggauguguuugucauaagggaaccauucauaucaugcucccccuuggaaugcagaaccuucuucuugacucaaggggccuugcuaaaugacaaacauuccaauggaaccauuaaagacaggagcccauaucgaacccuaaugagcuguccuauuggugaaguucccucuccauacaacucaagauuugagucagucgcuuggucagcaagugcuugucaugauggcaucaauuggcuaacaauuggaauuucuggcccagacaauggggcaguggcuguguuaaaguacaacggcauaauaacagacacuaucaagaguuggagaaacaauauauugagaacacaagagucugaaugugcauguguaaaugguucuugcuuuacuguaaugaccgauggaccaagugauggacaggccucauacaagaucuucaaaauagaaaagggaaagauagucaaaucagucgaaaugaaugccccuaauuaucacuaugaggaaugcuccuguuauccugauucuagugaaaucacaugugugugcagggauaacuggcauggcucgaaucgaccgugggugucuuucaaccagaaucuggaauaucagauaggauacauaugcagugggauuuucggagacaauccacgcccuaaugauaagacaggcaguugugguccaguaucgucuaauggagcaaauggaguaaaaggauuuucauucaaauacggcaaugguguuuggauagggagaacuaaaagcauuaguucaagaaacgguuuugagaugauuugggauccgaacggauggacugggacagacaauaacuucucaauaaagcaagauaucguaggaauaaaugaguggucaggauauagcgggaguuuuguucagcauccagaacuaacagggcuggauuguauaagaccuugcuucuggguugaacuaaucagagggcgacccaaagagaacacaaucuggacuagcgggagcagcauauccuuuugugguguaaacagugacacuguggguuggucuuggccagacggugcugaguugccauuuaccauugacaaguaa

SEQ ID NO: 54853 - RNA, 1410 nt, Artificial Sequence
  derived and/or modified CDS sequence (wt) from neuraminidase__InfluenzaA__AFN18777
augaauccaaaccaaaagauaauaaccauugguucggucuguaugacaauuggaauggcuaacuuaauauuacaaauuggaaacauaaucucaauauggauuagccacucaauucaacuuggaaaucaaaaucagauugaaacaugcaaucaaagcgucauuacuuaugaaaacaacacuuggguaaaucagacauauguuaacaucagcaacaccaacuuugcugcuggacagucagugguuuccgugaaauuagcgggcaauuccucucucugcccuguuaguggaugggcuauauacaguaaagacaacaguauaagaaucgguuccaagggggauguguuugucauaagggaaccauucauaucaugcucccccuuggaaugcagaaccuucuucuugacucaaggggccuugcuaaaugacaaacauuccaauggaaccauuaaagacaggagcccauaucgaacccuaaugagcuguccuauuggugaaguucccucuccauacaacucaagauuugagucagucgcuuggucagcaagugcuugucaugauggcaucaauuggcuaacaauuggaauuucuggcccagacaauggggcaguggcuguguuaaaguacaacggcauaauaacagacacuaucaagaguuggagaaacaauauauugagaacacaagagucugaaugugcauguguaaaugguucuugcuuuacuguaaugaccgauggaccaagugauggacaggccucauacaagaucuucagaauagaaaagggaaagauagucaaaucagucgaaaugaaugccccuaauuaucacuaugaggaaugcuccuguuauccugauucuagugaaaucacaugugugugcagggauaacuggcauggcucgaaucgaccgugggugucuuucaaccagaaucuggaauaucagauaggauacauaugcagugggauuuucggagacaauccacgcccuaaugauaagacaggcaguugugguccaguaucgucuaauggagcaaauggaguaaaaggauuuucauucaaauauggcaaugguguuuggauagggagaacuaaaagcauuaguucaagaaacgguuuugagaugauuugggauccgaacggauggacugggacagacaauaacuucucaauaaagcaagauaucguaggaauaaaugaguggucaggauauagcgggaguuuuguucagcauccagaacuaacagggcuggauuguauaagaccuugcuucuggguugaacuaaucagagggcgacccaaagagaacacaaucuggacuagcgggagcagcauauccuuuugugguguaaacagugacacuguggguuggucuuggccagacggugcugaguugccauuuaccauugacaaguaa

SEQ ID NO: 54854 - RNA, 1410 nt, Artificial Sequence; identical to SEQ ID NO: 51000
  derived and/or modified CDS sequence (wt) from neuraminidase__InfluenzaA__AFN18779

SEQ ID NO: 54855 - RNA, 1410 nt, Artificial Sequence
  derived and/or modified CDS sequence (wt) from neuraminidase__InfluenzaA__AFN18785
augaauccaaaccaaaagauaauaaccauugguucggucuguaugacaauuggaauggcuaacuuaauauuacaaauuggaaacauaaucucaauauggauuagccacucaauucaacuugggaaucaaaaucagauugaaacaugcaaucaaagcgucauuacuuaugaaaacaacacuuggguaaaucagacauauguuaacaucagcaacaccaacuuugcugcuggacagucagugguuuccgugaaauuagcgggcaauuccucucucugcccuguuaguggaugggcuauauacaguaaagacaacaguauaagaaucgguuccaagggggauguguuugucauaagggaaccauucauaucaugcucccccuuggaaugcagaaccuucuucuugacucaaggggccuugcuaaaugacaaacauuccaauggaaccauuaaagacaggaguccauaucgaacccuaaugagcuguccuauuggugaaguucccucuccauacaacucaagguuugagucagucgcuuggucagcaagugcuugucaugauggcaucaauuggcuaacaauuggaauuucuggcccagacaauggggcaguggcuguguuaaaguacaacggcauaauaacagacacuaucaagaguuggagaaacaauauauugagaacacaagagucugaaugugcauguguaaaugguucuugcuuuacuguaaugaccgauggaccaagugauggacaggccucauacaagaucuucagaauagaaaagggaaagauagucaaaucagucgaaaugaaugccccuaauuaucacuaugaggaaugcuccuguuauccugauucuagugaaaucacaugugugugcagggauaacuggcauggcucgaaucgaccgugggugucuuucaaccagaaucuggaauaucagauaggauacauaugcagugggauuuucggagacaauccacgcccuaaugauaagacaggcaguugugguccaguaucgucuaauggagcaaauggaguaaaaggauuuucauucaaauacggcaaugguguuuggauagggagaacuaaaagcauuaguucaagaaacgguuuugagaugauuugggauccgaacggauggacugggacagacaauaacuucucaauaaggcaagauaucguaggaauaaaugaguggucaggauauagcgggaguuuuguucagcauccagaacuaacagggcuggauuguauaagaccuugcuucuggguugaacuaaucagagggcgacccaaagagaacacaaucuggacuagcgggagcagcauauccuuuugugguguaaacagugacacuguggguuggucuuggccagacggugcugaguugccauuuaccauugacaaguaa

SEQ ID NO: 54856 - RNA, 1410 nt, Artificial Sequence
  derived and/or modified CDS sequence (wt) from neuraminidase__InfluenzaA__AFN18791
augaauccaaaccaaaagauaauaaccauugguucggucuguaugacaauuggaauggcuaacuuaauauuacaaauuggaaacauaaucucaauauggauuagccacucaauucaacuugggaaucaaaaucagauugaaacaugcaaucaaagcgucauuacuuaugaaaacaacacuuggguaaaucagacauauguuaacaucagcaacaccaacuuugcugcuggacagucagugguuuccgugaaauuagcgggcaauuccucucucugcccuguuaguggaugggcuauauacaguaaagacaacaguauaagaaucgguuccaagggggauguguuugucauaagggaaccauucauaucaugcucccccuuggaaugcagaaccuucuucuugacucaaggggccuugcuaaaugacaaacauuccaauggaaccaucaaagacaggagcccauaucgaacccuaaugagcuguccuauuggugaaguucccucuccauacaacucaagauuugagucagucgcuuggucagcaagugcuugucaugauggcaucaauuggcuaacaauuggaauuucuggcccagacaauggggcaguggcuguguuaaaguacaacggcauaauaacagacacuaucaagaguuggagaaacaauauauugagaacacaagagucugaaugugcauguguaaaugguucuugcuuuacuguaaugaccgauggaccaagugauggacaggccucauacaagaucuucagaauagaaaagggaaagauagucaaaucagucgaaaugaaugccccuaauuaucacuaugaggaaugcuccuguuauccugaaucuagugaaaucacaugugugugcagggauaacuggcauggcucgaaucgaccgugggugucuuucaaccagaaucuggaauaucagauaggauacauaugcagugggauuuucggagacaauccacgcccuaaugauaagacaggcaguugugguccaguaucgucuaauggagcaaauggaguaaaaggauuuucauucaaauacggcaaugguguuuggauagggagaacuaaaagcauuaguucaagaaacgguuuugagaugauuugggauccgaacggauggacugggacagacaauaacuucucaauaaagcaagauaucguaggaauaaaugaguggucaggauauagcgggaguuuuguccagcauccagaacuaacagggcuggauuguauaagaccuugcuucuggguugaacuaaucagagggcgacccaaagagaacacaaucuggacuagcgggagcagcauauccuuuugugguguaaacagugacacuguggguuggucuuggccagacggugcugaguugccauuuaccauugacaaguaa

SEQ ID NO: 54857 - RNA, 1410 nt, Artificial Sequence; identical to SEQ ID NO: 50344
  derived and/or modified CDS sequence (wt) from neuraminidase__InfluenzaA__AFN18801

SEQ ID NO: 54858 - RNA, 1410 nt, Artificial Sequence
  derived and/or modified CDS sequence (wt) from neuraminidase__InfluenzaA__AFN18811
augaauccaaaccaaaagauaauaaccauugguucgaucuguaugacaauuggaauggcuaacuuaauauuacaaauuggaaacauaaucucaauauggauuagccacucaauucaacuugggaaucaaaaucagauugaaacaugcaaucaaagcgucauuacuuaugaaaacaacacuuggguaaaucagacauauguuaacaucagcaacaccaacuuugcugcuggacagucagugguuuccgugaaauuagcgggcaauuccucucucugcccuguuaguggaugggcuauauacaguaaagacaacaguauaagaaucgguuccaagggggauguguuugucauaagggaaccauucauaucaugcucccccuuggaaugcagaaccuucuucuugacucaaggggccuugcuaaaugacaaacauuccaauggaaccauuaaagacaggagcccauaucgaacccuaaugagcuguccuauuggugaaguucccucuccauacaacucaagauuugagucagucgcuuggucagcaagugcuugucaugauggcaucaauuggcuaacaauuggaauuucuggcccagacaauggggcaguggcuguguuaaaguacaacggcauaauaacagacacuaucaagaguuggagaaacaauauauugagaacacaagagucugaaugugcauguguaaaugguucuugcuuuacuguaaugaccgauggaccaagugauggacaggccucauacaagaucuucagaauagaaaagggaaagauagucaaaucagucgaaaugaaugccccuaauuaucacuaugaggaaugcuccuguuauccugauucuagugaaaucacaugugugugcagggauaacuggcauggcucgaaucgaccgugggugucuuucaaccagaaucuggaauaucagauaggauacauaugcagugggauuuucggagacaauccacgcccuaaugauaagacaggcaguugugguccaguaucgucuaauggagcaaauggaguaaaaggauuuucauucaaauacggcaaugguguuuggauagggagaacuaaaagcauuaguucaagaaacgguuuugagaugauuugggauccgaacggauggacugggacagacaauaacuucucaauaaagcaagauaucguaggaauaaaugaguggucaggauauagcgggaguuuuguucagcauccagaacuaacagggcuggauuguauaagaccuugcuucuggguugaacuaaucagagggcgacccaaagagaacacaaucuggacuagcgggagcagcauauccuuuugugguguaaacagugacacuguggguuggucuuggccagacggugcugaguugccauuuaccauugacaaguaa

SEQ ID NO: 54859 - RNA, 1410 nt, Artificial Sequence; identical to SEQ ID NO: 54849
  derived and/or modified CDS sequence (wt) from neuraminidase__InfluenzaA__AFN18817

SEQ ID NO: 54860 - RNA, 1410 nt, Artificial Sequence; identical to SEQ ID NO: 48750
  derived and/or modified CDS sequence (wt) from neuraminidase__InfluenzaA__AFN18819

SEQ ID NO: 54861 - RNA, 1410 nt, Artificial Sequence; identical to SEQ ID NO: 51742
  derived and/or modified CDS sequence (wt) from neuraminidase__InfluenzaA__AFN18821

SEQ ID NO: 54862 - RNA, 1410 nt, Artificial Sequence; identical to SEQ ID NO: 48806
  derived and/or modified CDS sequence (wt) from neuraminidase__InfluenzaA__AFN18823

SEQ ID NO: 54863 - RNA, 1410 nt, Artificial Sequence; identical to SEQ ID NO: 48750
  derived and/or modified CDS sequence (wt) from neuraminidase__InfluenzaA__AFN18825

SEQ ID NO: 54864 - RNA, 1410 nt, Artificial Sequence
  derived and/or modified CDS sequence (wt) from neuraminidase__InfluenzaA__AFN18827
augaauccaaaccaaaagauaauaaccauugguucggucuguaugacaauuggaauggcuaacuuaauauuacaaauuggaaacauaaucucaauauggauuagccacucaauucagcuugggaaucaaaaucagauugaaacaugcaaucaaagcgucauuacuuaugaaaacaacacuuggguaaaucagacauauguuaacaucagcaacaccaacuuugcugcuggacagucggugguuuccgugaaauuagcgggcaauuccucucucugcccuguuaguggaugggcuauauacaguaaagacaacaguauaagaaucgguuccaagggggauguguuugucauaagggaaccauucauaucaugcucccccuuggaaugcagaaccuucuucuugacucaaggggccuugcuaaaugacaaacauuccaauggaaccauuaaagacaggagcccauaucgaacccuaaugagcuguccuauuggugaaguucccucuccauacaacucaagauuugagucagucgcuuggucagcaagugcuugucaugauggcaucaauuggcuaacaauuggaauuucuggcccagacaauggggcaguggcuguguuaaaguacaacggcauaauaacagacacuaucaagaguuggagaaacaauauauugagaacacaagagucugaaugugcauguguaaaugguucuugcuuuacuguaaugaccgauggaccaagugauggacaggccucauacaagaucuucagaauagaaaagggaaagauagucaaaucagucgaaaugaaugccccuaauuaucacuaugaggaaugcuccuguuauccugauucuagugaaaucacaugugugugcagggauaacuggcauggcucgaaucgaccgugggugucuuucaaccagaaucuggaauaucagauaggauacauaugcagugggauuuucggagacaauccacgcccuaaugauaagacaggcaguugugguccaguaucgucuaauggagcaaauggaguaaaaggauuuucauucaaauacggcaaugguguuuggauagggagaacuaaaagcauuaguucaagaaacgguuuugagaugauuugggauccgaacggauggacugggacagacaauaacuucucaauaaagcaagauaucguaggaauaaaugaguggucaggauauagcgggaguuuuguucagcauccagaacuaacagggcuggauuguauaagaccuugcuucuggguugaacuaaucagagggcgacccaaagagaacacaaucuggacuagcgggagcagcauauccuuuugugguguaaacagugacacuguggguuggucuuggccagacggugcugaguugccauuuaccauugacaaguaa

SEQ ID NO: 54865 - RNA, 1410 nt, Artificial Sequence; identical to SEQ ID NO: 49483
  derived and/or modified CDS sequence (wt) from neuraminidase__InfluenzaA__AFN18829

SEQ ID NO: 54866 - RNA, 1410 nt, Artificial Sequence; identical to SEQ ID NO: 48750
  derived and/or modified CDS sequence (wt) from neuraminidase__InfluenzaA__AFN18831

SEQ ID NO: 54867 - RNA, 1410 nt, Artificial Sequence; identical to SEQ ID NO: 49887
  derived and/or modified CDS sequence (wt) from neuraminidase__InfluenzaA__AFN18833

SEQ ID NO: 54868 - RNA, 1410 nt, Artificial Sequence
  derived and/or modified CDS sequence (wt) from neuraminidase__InfluenzaA__AFN18835
augaauccaaaccaaaagauaauaaccauugguucggucuguaugacaauuggaauggcuaacuuaauauuacaaauuggaaacauaaucucaauauggauuagccacucaauucaacuugggaaucaaaaucagauugaaacaugcaaucaaagcgucauuacuuaugaaaacaacacuuggguaaaucagacauauguuaacaucagcaacaccaacuuugcugcuggacagucagugguuuccgugaaauuagcgggcaauuccucucucugcccuguuaguggaugggcuauauacaguaaagacaacaguauaagaaucgguuccaagggggauguguuugucauaagggaaccauucauaucaugcucccccuuggaaugcagaaccuucuucuugacucaaggggccuugcuaaaugacaaacauuccaauggaaccaucaaagacaggagcccauaucgaacccuaaugagcuguccuauuggugaaguucccucuccauacaacucaagauuugagucagucgcuuggucagcaagugcuugucaugauggcaucaauuggcuaacaauuggaauuucuggcccagacaauggggcaguggcuguguuaaaguacaacggcauaauaacagacacuaucaagaguuggagaaacaauauauugagaacacaagagucugaaugugcauguguaaaugguucuugcuuuacuguaaugaccgauggaccaagugauggacaggccucauacaagaucuucagaauagaaaagggaaagguagucaaaucagucgaaaugaaugccccuaauuaucacuaugaggaaugcuccuguuauccugauucuagugaaaucacaugugugugcagggauaacuggcauggcucgaaucgaccgugggugucuuucaaccagaaucuggaauaucagauaggauacauaugcagugggauuuucggagacaauccacgcccuaaugauaagacaggcaguugugguccaguaucgucuaauggagcaaauggaguaaaaggauuuucauucaaauacggcaaugguguuuggauagggagaacuaaaagcauuaguucaagaaacgguuuugagaugauuugggauccgaacggauggacugggacagacaauaacuucucaauaaagcaagauaucguaggaauaaaugaguggucaggauauagcgggaguuuuguccagcauccagaacuaacagggcuggauuguauaagaccuugcuucuggguugaacuaaucagagggcgacccaaagagaacacaaucuggacuagcgggagcagcauauccuuuugugguguaaacagugacacuguggguuggucuuggccagacggugcugaguugccauuuaccauugacaaguaa

SEQ ID NO: 54869 - RNA, 1410 nt, Artificial Sequence; identical to SEQ ID NO: 48750
  derived and/or modified CDS sequence (wt) from neuraminidase__InfluenzaA__AFN18841

SEQ ID NO: 54870 - RNA, 1410 nt, Artificial Sequence
  derived and/or modified CDS sequence (wt) from neuraminidase__InfluenzaA__AFN18851
augaauccaaaccaaaagauaauaaccauugguucggucuguaugacaauuggaauggcuaacuuaauauuacaaauuggaaacaugaucucaauauggauuagccacucaauucaacuugggaaucaaaaucagauugaaacaugcaaucaaagcgucauuacuuaugaaaacaacacuuggguaaaucagacauauguuaacaucagcaacaccaacuuugcugcuggacagucagugguuuccgugaaauuagcgggcaauuccucucucugcccuguuaguggaugggcuauauacaguaaagacaacaguauaagaaucgguuccaagggggauguguuugucauaagggaaccauucauaucaugcucccccuuggaaugcagaaccuucuucuugacucaaggggccuugcuaaaugacaaacauuccaauggaaccauuaaagacaggagcccauaucgaacccuaaugagcuguccuauuggugaaguucccucuccauacaacucaagauuugagucagucgcuuggucagcaagugcuugucaugauggcaucaauuggcuaacaauuggaauuucuggcccagacaauggggcaguggcuguguuaaaguacaacggcauaauaacagacacuaucaagaguuggagaaacaauauauugagaacacaagagucugaaugugcauguguaaaugguucuugcuuuacuguaaugaccgauggaccaagugauggacaggccucauacaagaucuucagaauagaaaagggaaagauagucaaaucagucgaaaugaaugccccuaauuaucacuaugaggaaugcuccuguuauccugauucuagugaaaucacaugugugugcagggauaacuggcauggcucgaaucgaccgugggugucuuucaaccagaaucuggaauaucagauaggauacauaugcagugggauuuucggagacaauccacgcccuaaugauaagacaggcaguugugguccaguaucgucuaauggagcaaauggaguaaaaggauuuucauucaaauacggcaaugguguuuggauagggagaacuaaaagcauuaguucaagaaacgguuuugagaugauuugggauccgaacggauggacugggacagacaauaacuucucaauaaagcaagauaucguaggaauaaaugaguggucaggauauagcgggaguuuuguucagcauccagaacuaacagggcuggauuguauaagaccuugcuucuggguugaacuaaucagagggcgacccaaagagaacacaaucuggacuagcgggagcagcauauccuuuugugguguaaacagugacacuguggguuggucuuggccagacggugcugaguugccauuuaccauugacaaguaa

SEQ ID NO: 54871 - RNA, 1410 nt, Artificial Sequence
  derived and/or modified CDS sequence (wt) from neuraminidase__InfluenzaA__AFN18857
augaauccaaaccaaaagauaauaaccauugguucggucuguaugacaauuggaauggcuaacuuaauauuacaaauuggaaacauaaucucaauauggauuagccacucaauucaacuugggaaucaaaaucagauugaaacaugcaaucaaagcgucauuacuuaugaaaacaacacuuggguaaaucagacauauguuaacaucagcaacaccaacuuugcugcuggacagucagugguuuccgugaaauuagcgggcaauuccucucucugcccuguuaguggaugggcuauauacaguaaagacaacaguauaagaaucgguuccaagggggauguguuugucauaagggaaccauucauaucaugcucccccuuggaaugcagaaccuucuucuugacucaaggggccuuguuaaaugacaaacauuccaauggaaccauuaaagacaggagcccauaucgaacccuaaugagcuguccuauuggugaaguucccucuccauacaacucaagauuugagucagucgcuuggucagcaagugcuugucaugauggcaucaauuggcuaacaauuggaauuucuggcccagacaauggggcaguggcuguguuaaaguacaacggcauaauaacagacacuaucaagaguuggagaaacaauauauugagaacacaagagucugaaugugcauguguaaaugguucuugcuuuacuguaaugaccgauggaccaagugauggacaggccucauacaagaucuucagaauagaaaagggaaagauagucaaaucagucgaaaugaaugccccuaauuaucacuaugaggaaugcuccuguuauccugauucuagugaaaucacaugugugugcagggauaacuggcauggcucgaaucgaccgugggugucuuucaaccagaaucuggaauaucagauaggauacauaugcagugggauuuucggagacaauccacgcccuaaugauaagacaggcaguugugguccaguaucgucuaauggagcaaauggaguaaaaggauuuucauucaaauacggcaaugguguuuggauagggagaacuaaaagcauuaguucaagaaacgguuuugagaugauuugggauccgaacggauggacugggacagacaauaacuucucaauaaagcaagauaucguaggaauaaaugaguggucaggauauagcgggaguuuuguucagcauccagaacuaacagggcuggauuguauaagaccuugcuucuggguugaacuaaucagagggcgacccaaagagaacacaaucuggacuagcgggagcagcauauccuuuugugguguaaacagugacacuguggguuggucuuggccagacggugcugaguugccauuuaccauugacaaguaa

SEQ ID NO: 54872 - RNA, 1410 nt, Artificial Sequence
  derived and/or modified CDS sequence (wt) from neuraminidase__InfluenzaA__AFN18859
augaauccaaaccaaaagauaauaaccauugguucggucuguaugacaauuggacuggcuaacuuaauauuacaaauuggaaacauaaucucaauauggauuagccacucaauucaacuugggaaucaaaaucagauugaaacaugcaaucaaagcgucauuacuuaugaaaacaacacuuggguaaaucagacauauguuaacaucagcaacaccaacuuugcugcuggacagucagugguuuccgugaaauuagcgggcaauuccucucucugcccuguuaguggaugggcuauauacaguaaagacaacaguauaagaaucgguuccaagggggauguguuugucauaagggaaccauucauaucaugcucccccuuggaaugcagaaccuucuucuugacucaaggggccuugcuaaaugacaaacauuccaauggaaccauuaaagacaggagcccauaucgaacccuaaugagcuguccuauuggugaaguucccucuccauacaacucaagauuugagucagucgcuuggucagcaagugcuugucaugauggcaucaauuggcuaacaauuggaauuucuggcccagacaauggggcaguggcuguguuaaaguacaacggcauaauaacagacacuaucaagaguuggagaaacaauauauugagaacacaagagucugaaugugcauguguaaaugguucuugcuuuacuguaaugaccgauggaccaagugauggacaggccucauacaagaucuucagaauagaaaagggaaagauagucaaaucagucgaaaugaaugccccuaauuaucacuaugaggaaugcuccuguuauccugauucuagugaaaucacaugugugugcagggauaacuggcauggcucgaaucgaccgugggugucuuucaaccagaaucuggaauaucagauaggauacauaugcagugggauuuucggagacaauccacgcccuaaugauaagacaggcaguugugguccaguaucgucuaauggagcaaauggaguaaaaggauuuucauucaaauacggcaaugguguuuggauagggagaacuaaaagcauuaguucaagaaacgguuuugagaugauuugggauccgaacggauggacugggacagacaauaacuucucaauaaagcaagauaucguaggaauaaaugaguggucaggauauagcgggaguuuuguucagcauccagaacuaacagggcuggauuguauaagaccuugcuucuggguugaacuaaucagagggcgacccaaagagaacacaaucuggacuagcgggagcagcauauccuuuugugguguaaacagugacacuguggguuggucuuggccagacggugcugaguugccauuuaccauugacaaguaa

SEQ ID NO: 54873 - RNA, 1410 nt, Artificial Sequence
  derived and/or modified CDS sequence (wt) from neuraminidase__InfluenzaA__AFN18861
augaauccaaaccaaaagauaauaaccauugguucggucuguaugacaauuggaauggcuaacuuaauauuacaaauuggaaacauaaucucaauauggauuagccacucaauucaacuugggaaucaaaaucagauugaaacaugcaaucaaagcgucauuacuuaugaaaacaacacuuggguaaaucagacauauguuaacaucagcaacaccaacuuugcugcuggacagucagugguuuccgugaaauuagcgggcaauuccucucucugcucuguuaguggaugggcuauauacaguaaagacaacaguauaagaaucgguuccaagggggauguguuugucauaagggaaccauucauaucaugcucccccuuggaaugcagaaccuucuucuugacucaaggggccuugcuaaaugacaaacauuccaauggaaccauuaaagacaggagcccauaucgaacccuaaugagcuguccuauuggugaaguucccucuccauacaacucaagauuugagucagucgcuuggucagcaagugcuugucaugauggcaucaauuggcuaacaauuggaauuucuggcccagacaauggggcaguggcuguguuaaaguacaacggcauaauaacagacacuaucaagaguuggagaaacaauauauugagaacacaagagucugaaugugcauguguaaaugguucuugcuuuacuguaaugaccgauggaccaagugauggacaggccucauacaagaucuucagaauagaaaagggaaagauagucaaaucagucgaaaugaaugccccuaauuaucacuaugaggaaugcuccuguuauccugauucuagugaaaucacaugugugugcagggauaacuggcauggcucgaaucgaccgugggugucuuucaaccagaaucuggaauaucagauaggauacauaugcagugggauuuucggagacaauccacgcccuaaugauaagacaggcaguugugguccaguaucgucuaauggagcaaauggaguaaaaggauuuucauucaaauacggcaaugguguuuggauagggagaacuaaaagcauuaguucaagaaacgguuuugagaugauuugggauccgaacggauggacugggacagacaauaacuucucaauaaagcaagauaucguaggaauaaaugaguggucaggauauagcgggaguuuuguucagcauccagaacuaacagggcuggauuguauaagaccuugcuucuggguugaacuaaucagagggcgacccaaagagaacacaaucuggacuagcgggagcagcauauccuuuugugguguaaacagugacacuguggguuggucuuggccagacggugcugaguugccauuuaccauugacaaguaa

SEQ ID NO: 54874 - RNA, 1410 nt, Artificial Sequence; identical to SEQ ID NO: 48750
  derived and/or modified CDS sequence (wt) from neuraminidase__InfluenzaA__AFN18867

SEQ ID NO: 54875 - RNA, 1410 nt, Artificial Sequence
  derived and/or modified CDS sequence (wt) from neuraminidase__InfluenzaA__AFN18877
augaauccaaaccaaaagauaauaaccauugguucggucuguaugacaauuggaauggcuaacuuaauauuacaaauuggaaacauaaucucaauauggauuagccacucaauucaacuugggaaucaaaaucagauugaaacaugcaaucaaagcgucauuacuuaugaaaacaacacuuggguaaaucagacauauguuaacaucagcaacaccaacuuugcugcuggacagucagugguuuccgugaaauuagcgggcaauuccucucucugcccuguuaguggaugggcuauauacaguaaagacaacaguauaagaaucgguuccaagggggauguguuugucauaagggaaccauucauaucaugcucccccuuggaaugcagaaccuucuucuugacucaaggggccuugcuaaaugacaaacauuccaauggaaccauuaaagacaggagcccauaucgaacccuaaugagcuguccuauuggugaaguucccucuccauacaacucaagauuugagucagucgcuuggucagcaagugcuugucaugauggcaucaauuggcuaacaauuggaauuucuggcccagacaauggggcaguggcuguguuaaaguacaacggcauaauaacagacacuaucaagaguuggagaaacaauauauugagaacacaagagucugaaugugcauguguaaaugguucuugcuuuacuguaaugaccgauggaccaagugauggacaggccucauacaagaucuucagaauagaaaagggaaagauagucaaaucagucgaaaugaaugccccuaauuaucacuaugaggaaugcuccuguuauccugauucuagugaaaucacaugugugugcagggauaacuggcauggcucgaaucgaccgugggugucuuucaaccagaaucuggaauaucggauaggauacauaugcagugggauuuucggagacaauccacgcccuaaugauaagacaggcaguugugguccaguaucgucuaauggagcaaauggaguaaaaggauuuucauucaaauacggcaaugguguuuggauagggagaacuaaaagcauuaguucaagaaacgguuuugagaugauuugggauccgaacggauggacugggacagacaauaacuucucaauaaagcaagauaucguaggaauaaaugaguggucaggauauagcgggaguuuuguucagcauccagaacuaacagggcuggauuguauaagaccuugcuucuggguugaacuaaucagagggcgacccaaagagaacacuaucuggacuagcgggagcagcauauccuuuugugguguaaacagugacacuguggguuggucuuggccagacggugcugaguugccauuuaccauugacaaguaa

SEQ ID NO: 54876 - RNA, 1410 nt, Artificial Sequence; identical to SEQ ID NO: 48750
  derived and/or modified CDS sequence (wt) from neuraminidase__InfluenzaA__AFN18887

SEQ ID NO: 54877 - RNA, 1410 nt, Artificial Sequence
  derived and/or modified CDS sequence (wt) from neuraminidase__InfluenzaA__AFN18893
augaauccaaaccaaaagauaauaaccauugguucggucuguaugacaauuggaauggcuaacuuaauauuacaaauuggaaacauaaucucaauauggauuagccacucaauucagcuugggaaucaaaaucagauugaaacaugcaaucaaagcgucauuacuuaugaaaacaacacuuggguaaaucagacauauguuaacaucagcaacaccaacuuugcugcuggacagucggugguuuccgugaaauuagcgggcaauuccucucucugcccuguuaguggaugggcuauauacaguaaagacaacaguauaagaaucgguuccaagggggauguguuugucauaagggaaccauucauaucaugcucccccuuggaaugcagaaccuucuucuugacucaaggggccuugcuaaaugacaaacauuccaauggaaccauuaaagacaggagcccauaucgaacccuaaugagcuguccuauuggugaaguucccucuccauacaacucaagauuugagucagucgcuuggucagcaagugcuugucaugauggcaucaauuggcuaacaauuggaauuucuggcccagacaauggggcaguggcuguguuaaaguacaacggcauaauaacagacacuaucaagaguuggagaaacaauauauugagaacacaagagucugaaugugcauguguaaaugguucuugcuuuacuguaaugaccgauggaccaagugauggacaggccucauacaagaucuucagaauagaaaagggaaagauagucaaaucagucgaaaugaaugccccuaauuaucacuaugaggaaugcuccuguuauccugauucuagugaaaucacaugugugugcagggauaacuggcauggcucgaaucgaccgugggugucuuucaaccagaaucuggaauaucagauaggauacauaugcagugggauuuucggagacaauccacgcccuaaugauaagacaggcaguugugguccaguaucgucuaauggagcaaauggaguaaaaggauuuucauucaaauacggcaaugguguuuggauagggagaacuaaaagcauuaguucaagaaacgguuuugagaugauuugggauccgaacggauggacugggacagacaauaacuucucaauaaagcaagauaucguaggaauaaaugaguggucaggauauagcgggaguuuuguucagcauccagaacuaacagggcugaauuguauaagaccuugcuucuggguugaacuaaucagagggcgacccaaagagaacacaaucuggacuagcgggagcagcauauccuuuugugguguaaacagugacacuguggguuggucuuggccagacggugcugaguugccauuuaccauugacaaguaa

SEQ ID NO: 54878 - RNA, 1410 nt, Artificial Sequence
  derived and/or modified CDS sequence (wt) from neuraminidase__InfluenzaA__AFN18895
augaauccaaaccaaaagauaauaaccauugguucggucuguaugacaauuggaauggcuaacuuaauauuacaaauuggaaacauaaucucaauauggauuagccacucaauucaacuugggaaucaaaaucagauugaaacaugcaaucaaagcgucauuacuuaugaaaacaacacuuggguaaaucagacauauguuaacaucagcaacaccaacuuugcugcuggacagucagugguuuccgugaaauuagcaggcaauuccucucucugcccuguuaguggaugggcuauauacaguaaagacaacaguauaagaaucgguuccaagggggauguguuugucauaagggaaccauucauaucaugcucccccuuggaaugcagaaccuucuucuugacucaaggggccuugcuaaaugacaaacauuccaauggaaccauuaaagacaggagcccauaucgaacccuaaugagcuguccuauuggugaaguucccucuccauacaacucaagauuugagucagucgcuuggucagcaagugcuugucaugauggcaucaauuggcuaacaauuggaauuucuggcccagacaauggggcaguggcuguguuaaaguacaacggcauaauaacagacacuaucaagaguuggagaaacaauauauugagaacacaagagucugaaugugcauguguaaaugguucuugcuuuacuguaaugaccgauggaccaagugauggacaggccucauacaagaucuucagaauagaaaagggaaagauagucaaaucagucgaaaugaaugccccuaauuaucacuaugaggaaugcuccuguuauccugauucuagugaaaucacaugugugugcagggauaacuggcauggcucgaaucgaccgugggugucuuucaaccagaaucuggaauaucggauaggauacauaugcagugggauuuucggagacaauccacgcccuaaugauaagacaggcaguugugguccaguaucgucuaauggagcaaauggaguaaaaggauuuucauucaaauacggcaaugguguuuggauagggagaacuaaaagcauuaguucaagaaacgguuuugagaugauuugggauccgaacggauggacugggacagacaauaacuucucaauaaagcaagauaucguaggaauaaaugaguggucaggauauagcgggaguuuuguucagcauccagaacuaacagggcuggauuguauaagaccuugcuucuggguugaacuaaucaaagggcgacccaaagagaacacaaucuggacuagcgggagcagcauauccuuuugugguguaaacagugacacuguggguuggucuuggccagacggugcugaguugccauuuaccauugacaaguaa

SEQ ID NO: 54879 - RNA, 1410 nt, Artificial Sequence; identical to SEQ ID NO: 51633
  derived and/or modified CDS sequence (wt) from neuraminidase__InfluenzaA__AFN18905

SEQ ID NO: 54880 - RNA, 1410 nt, Artificial Sequence; identical to SEQ ID NO: 54729
  derived and/or modified CDS sequence (wt) from neuraminidase__InfluenzaA__AFN18913

SEQ ID NO: 54881 - RNA, 1410 nt, Artificial Sequence
  derived and/or modified CDS sequence (wt) from neuraminidase__InfluenzaA__AFN18919
augaauccaaaccaaaagauaauaaccauugguucggucuguaugacaauuggaauggcuaacuuaauauuacaaauuggaaacauaaucucaauauggauuagccacucaauucaacuugggaaucaaaaucagauugaaacaugcaaucaaagcgucauuacuuaugaaaacaacaccuggguaaaucagacauauguuaacaucagcaacaccaacuuugcugcuggacagucagugguuuccgugaaauuagcgggcaauuccucucucugcccuguuaguggaugggcuauauacaguaaagacaacaguauaagaaucgguuccaagggggauguguuugucauaagggaaccauucauaucaugcucccccuuggaaugcagaaccuucuucuugacucaaggggccuugcuaaaugacaaacauuccaauggaaccauuaaagacaggagcccauaucgaacccuaaugagcuguccuauuggugaaguucccucuccauacaacucaagauuugagucagucgcuuggucagcaagugcuugucaugauggcaucaauuggcuaacaauuggaauuucuggcccagacaauggggcaguggcuguguuaaaguacaacggcauaauaacagacacuaucaagaguuggagaaacaauauauugagaacacaagagucugaaugugcauguguaaaugguucuugcuuuacuguaaugaccgauggaccaagugauggacaggccucauacaagaucuucagaauagaaaagggaaagauagucaaaucagucgaaaugaaugccccuaauuaucacuaugaggaaugcuccuguuauccugauucuagugaaaucacaugugugugcagggauaacuggcauggcucgaaucgaccgugggugucuuucaaccagaaucuggaauaucagauaggauacauaugcagugggauuuucggagacaauccacgcccuaaugacaagacaggcaguugugguccaguaucgucuaauggagaaaauggaguaaaaggauuuucauucaaauacggcaaugguguuuggauagggagaacuaaaagcauuaguucaagaaacgguuuugagaugauuugggauccgaacggauggacugggacagacaauaacuucucaauaaagcaagauaucguaggaauaaaugaguggucaggauauagcgggaguuuuguucagcauccagaacuaacagggcuggauuguauaagaccuugcuucuggguugaacuaaucagagggcgacccaaagagaacacaaucuggacuagcgggagcagcauauccuuuugugguguaaacagugacacuguggguuggucuuggccagacggugcugaguugccauuuaccauugacaaguaa

SEQ ID NO: 54882 - RNA, 1410 nt, Artificial Sequence
  derived and/or modified CDS sequence (wt) from neuraminidase__InfluenzaA__AFN18929
augaauccaaaccaaaagauaauaaccauugguucggucuguaugacaauuggaauggccaacuuaauauuacaaauuggaaacauaaucucaauauggauuagccacucaauucaacuugggaaucaaaaucagauugaaacaugcaaucaaagcgucauuacuuaugaaaacaacacuuggguaaaucagacauauguuaacaucagcaacaccaacuuugcugcuggacagucagugguuuccgugaaauuagcgggcaauuccucucucugcccuguuaguggaugggcuauauacaguaaagacaacaguauaagaaucgguuccaagggggauguguuugucauaagggaaccauucauaucaugcucccccuuggaaugcagaaccuucuucuugacucaaggggccuugcuaaaugacaaacauuccaauggaaccauuaaagacaggagcccauaucgaacccuaaugagcuguccuauuggugaaguucccucuccauacaacucaagauuugagucagucgcuuggucagcaagugcuugucaugauggcaucaauuggcuaacaauuggaauuucuggcccagacaauggggcaguggcuguguuaaaguacaacggcauaauaacagacacuaucaagaguuggagaaacaauauauugagaacacaagagucugaaugugcauguguaaaugguucuugcuuuacuuuaaugaccgauggaccaagugauggacaggccucauacaagaucuucagaauagaaaagggaaagauagucaaaucagucgaaaugaaugccccuaauuaucacuaugaggaaugcuccuguuauccugauucuagugaaaucacaugugugugcagggauaacuggcauggcucgaaucgaccgugggugucuuucaaccagaaucuggaauaucagauaggauacauaugcagugggauuuucggagacaauccacgcccuaaugauaagacaggcaguugugguccaguaucgucuaauggagcaaauggaguaaaaggauuuucauucaaauacggcaaugguguuuggauagggagaacuaaaagcauuaguucaagaaacgguuuugagaugauuugggauccgaacggauggacugggacagacaauaacuucucaauaaagcaagauaucguaggaauaaaugaguggucaggauauagcgggaguuuuguucagcauccagaacuaacagggcuggauuguauaagaccuugcuucuggguugaacuaaucagagggcgacccaaagagaacacaaucuggacuagcgggagcagcauauccuuuugugguguaaacagugacacuguggguuggucuuggucagacggugcugaguugccauuuaccauugacaaguaa

SEQ ID NO: 54883 - RNA, 1410 nt, Artificial Sequence; identical to SEQ ID NO: 48750
  derived and/or modified CDS sequence (wt) from neuraminidase__InfluenzaA__AFN18939

SEQ ID NO: 54884 - RNA, 1410 nt, Artificial Sequence; identical to SEQ ID NO: 49215
  derived and/or modified CDS sequence (wt) from neuraminidase__InfluenzaA__AFN18953

SEQ ID NO: 54885 - RNA, 1410 nt, Artificial Sequence; identical to SEQ ID NO: 49483
  derived and/or modified CDS sequence (wt) from neuraminidase__InfluenzaA__AFN18959

SEQ ID NO: 54886 - RNA, 1410 nt, Artificial Sequence; identical to SEQ ID NO: 54783
  derived and/or modified CDS sequence (wt) from neuraminidase__InfluenzaA__AFN18965

SEQ ID NO: 54887 - RNA, 1410 nt, Artificial Sequence
  derived and/or modified CDS sequence (wt) from neuraminidase__InfluenzaA__AFN18975
augaauccaaaccaaaagauaauaaccauugguucggucuguaugacaauuggaauggcuaacuuaauauuacaaauuggaaacauaaucucaauauggauuagccacucaauucaacuugggaaucaaaaucagauugaaacaugcaaucaaagcgucauuacuuaugaaaacaacacuuggguaaaucagacauauguuaacaucagcaacaccaacuuugcugcuggacagucagugguuuccgugaaauuagcgggcaauuccucucucugcccuguuaguggaugggcuauauacaguaaagacaacaguauaagaaucgguuccaagggggauguguuugucauaagggaaccauucauaucaugcucccccuuggaaugcagaaccuucuucuugacucaaggggccuugcuaaaugacaaacauuccaauggaaccauuaaagacaggagcccauaucgaacccuaaugagcuguccuauuggugaaguucccucuccauacaacucaagauuugagucagucgcuuggucagcaagugcuugucaugauggcaucaauuggcuaacaauuggaauuucuggcccagacaauggggcaguggcuguguuaaaguacaacggcauaauaacagacacuaucaagaguuggagaaacaauauauugagaacacaagagucugaaugugcauguguaaaugguucuugcuuuacuguaaugaccgauggaccaagugauggacaggccucauacaagaucuucagaauagaaaagggaaagauaguuaaaucagucgaaaugaaugccccuaauuaucacuaugaggaaugcuccuguuauccugauucuagugaaaucacaugugugugcagggauaacuggcauggcucgaaucgaccgugggugucuuucaaccagaaucuggaauaucagauaggguacauaugcagugggauuuucggagacaauccacgcccuaaugauaagacaggcaguugugguccaguaucgucuaauggagcaaauggaguaaaaggauuuucauucaaauacggcaaugguguuuggauagggagaacuaaaagcauuaguucaagaaacgguuuugagaugauuugggauccgaacggauggacugggacagacaauaacuucucaauaaagcaagauaucguaggaauaaaggaguggucaggauauagcgggaguuuuguucagcauccagaacuaacagggcuggauuguauaagaccuugcuucuggguugaacuaaucagagggcgacccaaagagaacacaaucuggacuagcgggagcagcauauccuuuugcgguguaaacagugacacuguggguuggucuuggccagacggugcugaguugccauuuaccauugacaaguaa

SEQ ID NO: 54888 - RNA, 1410 nt, Artificial Sequence; identical to SEQ ID NO: 50849
  derived and/or modified CDS sequence (wt) from neuraminidase__InfluenzaA__AFN18981

SEQ ID NO: 54889 - RNA, 1410 nt, Artificial Sequence
  derived and/or modified CDS sequence (wt) from neuraminidase__InfluenzaA__AFN18983
augaauccaaaccaaaagauaauaaccauugguucggucuguaugacaauuggaauggcuaacuuaauauuacaaauuggaaacauaaucucaauauggauuagccacucaauucaacuugggaaucaaaaucagauugaaacaugcaaucaaagcgucauuacuuaugaaaacaacacuuggguaaaccagacauauguuaacaucagcaacaccaacuuugcugcuggacagucagugguuuccgugaaauuagcgggcaauuccucucucugcccuguuaguggaugggcuauauacaguaaagacaacaguauaagaaucgguuccaagggggauguguuugucauaagggaaccauucauaucaugcucccccuuggaaugcagaaccuucuucuugacucaaggggccuugcuaaaugacaaacauuccaauggaaccauuaaagacaggagcccauaucgaacccuaaugagcuguccuauuggugaaguucccucuccauacaacucaagauuugagucagucgcuuggucagcaagugcuugucaugauggcaucaauuggcuaacaauuggaauuucuggcccagacaauggggcaguggcuguguuaaaguacaacggcauaauaacagacacuaucaagaguuggagaaacaauauauugagaacacaagagucugaaugugcauguguaaaugguucuugcuuuacuguaaugaccgauggaccaagugauggacaggccucauacaagaucuucagaauagaaaagggaaagauagucaaaucagucgaaaugaaugccucuaauuaucacuaugaggaaugcuccuguuauccugauucuagugaaaucacaugugugugcagggauaacuggcauggcucgaaucgaccguggguaucuuucaaccagaaucuggaauaucagauaggauacauaugcagugggauuuucggagacaauccacgcccuaaugauaagacaggcaguugugguccaguaucgucuaauggagcaaauggaguaaaaggauuuucauucaaauacggcaaugguguuuggauagggagaacuaaaagcauuaguucaagaaacgguuuugagaugauuugggauccgaacggauggacagggacagacaauaacuucucaauaaagcaagauaucguaggaauaaaugaguggucaggauauagcgggaguuuuguucagcauccagaacuaacagggcuggauuguauaagaccuugcuucuggguugaacuaaucagagggcgacccaaagagaacacaaucuggacuagcgggagcaucauauccuuuugugguguaaacagugacacuguggguuggucuuggccggacggugcugaguugccauuuaccauugacaaguaa

SEQ ID NO: 54890 - RNA, 1410 nt, Artificial Sequence; identical to SEQ ID NO: 53279
  derived and/or modified CDS sequence (wt) from neuraminidase__InfluenzaA__AFN18985

SEQ ID NO: 54891 - RNA, 1410 nt, Artificial Sequence
  derived and/or modified CDS sequence (wt) from neuraminidase__InfluenzaA__AFN18987
augaauccaaaccaaaagauaauaaccauugguucggucuguaugacaauuggaauggcuaacuuaauauuacaaauuggaaacauaaucucaauauggauuagccacucaauucagcuugggaaucaaaaucagauugaaacaugcaaucaaagcgucauuacuuaugaaaacaacacuuggguaaaucagacauauguuaacaucagcaacaccaacuuugcugcuggacagucggugguuuccgugaaauuagcgggcaauuccucucucugcccuguuaguggaugggcuauauacaguaaagacaacaguauaagaaucgguuccaagggggauguguuugucauaagggaaccauucauaucaugcucccccuuggaaugcagaaccuucuucuugacucaaggggccuugcuaaaugacaaacauuccaauggaaccauuaaagacaggagcccauaucgaacccuaaugagcuguccuauuggugaaguucccucuccauacaacucaagauuugagucagucgcuuggucagcaagugcuugucaugauggcaucaauuggcuaacaauuggaauuucuggcccagacaauggggcaguggcuguguuaaaguacaacggcauaauaacagacacuaucaagaguuggagaaacaauauauugagaacacaagagucugaaugugcauguguaaaugguucuugcuuuacuguaaugaccgauggaccaagugauggacaggccucauacaagaucuucagaauagaaaagggaaagauagucaaaucagucgaaaugaaugccccuaauuaucacuaugaggaaugcuccuguuauccugauucuagugaaaucacaugugugugcagggauaacuggcauggcucgaaucgaccgugggugucuuucaaccagaaucuggaauaucagauaggauacauaugcagugggauuuucggagacaacccacgcccuauugauaagacaggcaguugugguccaguaucgucuaauggagcaaauggaguaaaaggauuuucauucaaauacggcaaugguguuuggauagggagaacuaaaagcauuaguucaagaaacgguuuugagaugauuugggauccgaacggauggacugggacagacaauaacuucucaauaaagcaagauaucguaggaauaaaugaguggucaggauauagcgggaguuuuguucagcauccagaacuaacagggcuggauuguauaagaccuugcuucuggguugaacuaaucagagggcgacccaaagagaacacaaucuggacuagcgggagcagcauauccuuuugugguguaaacagugacacuguggguuggucuuggccagacggugcugaguugccauuuaccauugacaaguaa

SEQ ID NO: 54892 - RNA, 1410 nt, Artificial Sequence; identical to SEQ ID NO: 48750
  derived and/or modified CDS sequence (wt) from neuraminidase__InfluenzaA__AFN18989

SEQ ID NO: 54893 - RNA, 1410 nt, Artificial Sequence; identical to SEQ ID NO: 48750
  derived and/or modified CDS sequence (wt) from neuraminidase__InfluenzaA__AFN18995

SEQ ID NO: 54894 - RNA, 1410 nt, Artificial Sequence
  derived and/or modified CDS sequence (wt) from neuraminidase__InfluenzaA__AFN19001
augaauccaaaccaaaagauaauaaccauugguucggucuguaugacaauuggauuggcuaacuuaauauuacaaauuggaaacauaaucucaauauggauuagccacucaauucaacuugggaaucaaaaucagauugaaacaugcaaucaaagcgucauuacuuaugaaaacaacacuuggguaaaucagacauauguuaacaucagcaacaccaacuuugcugcuggacagucagugguuuccgugaaauuagcgggcaauuccucucucugcccuguuaguggaugggcuauauacaguaaagacaacaguauaagaaucgguuccaagggggauguguuugucauaagggaaccauucauaucaugcucccccuuggaaugcagaaccuucuucuugacucaaggggccuugcuaaaugacaaacauuccaauggaaccauuaaagacaggagcccauaucgaacccuaaugagcuguccuauuggugaaguucccucuccauacaacucaagauuugagucagucgcuuggucagcaagugcuugucaugauggcaucaauuggcuaacaauuggaauuucuggcccagacaauggggcaguggcuguguuaaaguacaacggcauaauaacagacacuaucaagaguuggagaaacaauauauugagaacacaagagucugaaugugcauguguaaaugguucuugcuuuacuguaaugaccgauggaccaagugauggacaggccucauacaagaucuucagaauagaaaagggaaagauagucaaaucagucgaaaugaaugccccuaauuaucacuaugaggaaugcuccuguuauccugauucuagugaaaucacaugugugugcagggauaacuggcauggcucgaaucgaccgugggugucuuucaaccagaaucuggaauaucagauaggauacauaugcagugggauuuucggagacaauccacgcccuaaugauaagacaggcaguugugguccaguaucgucuaauggagcaaauggaguaaaaggauuuucauucaaauacggcaaugguguuuggauagggagaacuaaaagcauuaguucaagaaacgguuuugagaugauuugggauccgaacggauggacugggacagacaauaacuucucaauaaagcaagauaucguaggaauaaaugaauggucaggauauagcgggaguuuuguucagcauccagaacuaacagggcuggauuguauaagaccuugcuucuggguugaacuaaucagagggcgacccaaagagaacacaaucuggacuagcgggagcagcauauccuuuugugguguaaacagugacacuguggguuggucuuggccagacggugcugaguugccauuuaccauugacaaguaa

SEQ ID NO: 54895 - RNA, 1410 nt, Artificial Sequence; identical to SEQ ID NO: 49970
  derived and/or modified CDS sequence (wt) from neuraminidase__InfluenzaA__AFN19007

SEQ ID NO: 54896 - RNA, 1410 nt, Artificial Sequence; identical to SEQ ID NO: 48750
  derived and/or modified CDS sequence (wt) from neuraminidase__InfluenzaA__AFN19024

SEQ ID NO: 54897 - RNA, 1410 nt, Artificial Sequence
  derived and/or modified CDS sequence (wt) from neuraminidase__InfluenzaA__AFN19025
augaauccaaaccaaaagauaauaaccauugguucggucuguaugacaauuggaauggcuaacuuaauauuacaaauuggaaacauaaucucaauauggauuagccacucaauucaacuugggaaucaaaaucagauugaaacaugcaaucaaagcgucauuacuuaugaaaacaacacuuggguaaaucagacauauguuaacaucagcaacaccaacuuugcugcuggacagucagugguuuccgugaaauuagcgggcaauuccucucucugcccuguuaguggaugggcuauauacaguaaagacaacaguauaagaaucgguuccaagggggauguguuugucauaagggaaccauucauaucaugcucccccuuggaaugcagaaccuucuucuugacucaaggggccuugcuaaaugacaaacauucuaauggaaccauuaaagacaggagcccauaucgaacccuaaugagcuguccuauuggugaaguucccucuccauacaacucaagauuugagucagucgcuuggucagcaagugcuugucaugauggcaucaauuggcuaacaauuggaauuucuggcccagacaauggggcaguggcuguguuaaaguacaacggcauaauaacagacacuaucaagaguuggagaaacaaaauauugagaacacaagagucugaaugugcauguguaaaugguucuugcuuuacuguaaugaccgauggaccaagugauggacaggccucauacaagaucuucagaauagaaaagggaaagauagucaaaucagucgaaaugaaugccccuaauuaucacuaugaggaaugcuccuguuauccugauucuagugaaaucacaugugugugcagggauaacuggcauggcucgaaucgaccgugggugucuuucaaccagaaucuggaauaucagauaggauacauaugcagugggauuuucggagacaauccacgcccuaaugauaagacaggcaguugugguccaguaucgucuaauggagcaaauggaguaaaaggauuuucauucaaauacggcaaugguguuuggauagggagaacuaaaagcauuaguucaagaaacgguuuugagaugauuugggauccgaacggauggacugggacagacaauaacuucucaauaaagcaagauaucguaggaauaaaugaguggucaggauauagcgggaguuuuguucagcauccagaacuaacagggcuggauuguauaagaccuugcuucuggguugaacuaaucagagggcgacccaaagagaacacaaucuggacuagcgggagcagcauauccuuuugugguguaaacagugacacuguggguuggucuuggccagacggugcugaguugccauuuaccauugacaaguaa

SEQ ID NO: 54898 - RNA, 1410 nt, Artificial Sequence; identical to SEQ ID NO: 48750
  derived and/or modified CDS sequence (wt) from neuraminidase__InfluenzaA__AFN19027

SEQ ID NO: 54899 - RNA, 1410 nt, Artificial Sequence; identical to SEQ ID NO: 49794
  derived and/or modified CDS sequence (wt) from neuraminidase__InfluenzaA__AFN19032

SEQ ID NO: 54900 - RNA, 1410 nt, Artificial Sequence; identical to SEQ ID NO: 48750
  derived and/or modified CDS sequence (wt) from neuraminidase__InfluenzaA__AFN19038

SEQ ID NO: 54901 - RNA, 1410 nt, Artificial Sequence; identical to SEQ ID NO: 54702
  derived and/or modified CDS sequence (wt) from neuraminidase__InfluenzaA__AFN19049

SEQ ID NO: 54902 - RNA, 1410 nt, Artificial Sequence; identical to SEQ ID NO: 48750
  derived and/or modified CDS sequence (wt) from neuraminidase__InfluenzaA__AFN19055

SEQ ID NO: 54903 - RNA, 1410 nt, Artificial Sequence; identical to SEQ ID NO: 48750
  derived and/or modified CDS sequence (wt) from neuraminidase__InfluenzaA__AFN19065

SEQ ID NO: 54904 - RNA, 1410 nt, Artificial Sequence; identical to SEQ ID NO: 48750
  derived and/or modified CDS sequence (wt) from neuraminidase__InfluenzaA__AFN19071

SEQ ID NO: 54905 - RNA, 1410 nt, Artificial Sequence
  derived and/or modified CDS sequence (wt) from neuraminidase__InfluenzaA__AFN19077
augaauccaaaccaaaagauaauaaccauugguucggucuguaugacaauuggaauggcuaacuuaauauuacaaauuggaaacauaaucucaauauggauuagccacucaauucaacuugggaaucaaaaucagauugaaacaugcaaucaaagcgucauuacuuaugaaaacaacacuuggguaaaucagacauauguuaacaucagcaacaccaacuuugcugcuggacagucagugguuuccgugaaauuagcgggcaauuccucucucugcccuguuaguggaugggcuauauacaguaaagacaacaguauaagaaucgguuccaagggggauguguuugucauaagggaaccauucauaucaugcucccccuuggaaugcagaaccuucuucuugacucaaggggccuugcuaaaugacaaacauuccaauggaaccauuaaagacaggagcccauaucgaacccuaaugagcuguccuauuggugaaguucccucuccauacaacucaagauuugagucagucgcuuggucagcaagugcuugucaugauggcaucaauuggcuaacaauuggaauuucuggcccagacaauggggcaguggcuguguuaaaguacaacggcauaauaacagacacuaucaagaguuggagaaacaauauauugagaacacaagagucugaaugugcauguguaaaugguucuugcuuuacuguaaugaccgauggaccaagugauggacaggccucauacaagaucuucagaauagaaaagggaaagauagucaaaucagucgaaaugaaugccccuaauuaucacuaugaggaaugcuccuguuauccugauucuagugaaaucacaugugugugcagggauaacuggcauggcucgaaucgaccgugggugucuuucaaccagaaucuggaauaucagauaggauacauaugcagugggauuuucggggacaauccacgcccuaaugauaagacaggcaguugugguccaguaucgucuaauggagcaaauggaguaaaaggauuuucauucaaauacggcaaugguguuuggauagggagaacuaaaagcauuaguucaagaaacgguuuugagaugauuugggauccgaacggauggacugggacagacaauaacuucucaauaaagcaagauaucguaggaauaaaugaguggucaggauauagcgggaguuuuguucagcauccagaacuaacagggcuggauuguauaagaccuugcuucuggguugaacuaaucagagggcgacccaaagagaacacaaucuggacuagcgggagcagcauauccuuuugugguguaaacagugacacuguggguuggucuuggccagacggugcugaguugccauuuaccauugacaaguaa

SEQ ID NO: 54906 - RNA, 1410 nt, Artificial Sequence; identical to SEQ ID NO: 48750
  derived and/or modified CDS sequence (wt) from neuraminidase__InfluenzaA__AFN19083

SEQ ID NO: 54907 - RNA, 1410 nt, Artificial Sequence; identical to SEQ ID NO: 48750
  derived and/or modified CDS sequence (wt) from neuraminidase__InfluenzaA__AFN19089

SEQ ID NO: 54908 - RNA, 1410 nt, Artificial Sequence; identical to SEQ ID NO: 48750
  derived and/or modified CDS sequence (wt) from neuraminidase__InfluenzaA__AFN19099

SEQ ID NO: 54909 - RNA, 1410 nt, Artificial Sequence; identical to SEQ ID NO: 48750
  derived and/or modified CDS sequence (wt) from neuraminidase__InfluenzaA__AFN19105

SEQ ID NO: 54910 - RNA, 1410 nt, Artificial Sequence; identical to SEQ ID NO: 48750
  derived and/or modified CDS sequence (wt) from neuraminidase__InfluenzaA__AFN19114

SEQ ID NO: 54911 - RNA, 1410 nt, Artificial Sequence; identical to SEQ ID NO: 48750
  derived and/or modified CDS sequence (wt) from neuraminidase__InfluenzaA__AFN19126

SEQ ID NO: 54912 - RNA, 1410 nt, Artificial Sequence; identical to SEQ ID NO: 48750
  derived and/or modified CDS sequence (wt) from neuraminidase__InfluenzaA__AFN19136

SEQ ID NO: 54913 - RNA, 1410 nt, Artificial Sequence; identical to SEQ ID NO: 48750
  derived and/or modified CDS sequence (wt) from neuraminidase__InfluenzaA__AFN19146

SEQ ID NO: 54914 - RNA, 1410 nt, Artificial Sequence; identical to SEQ ID NO: 48750
  derived and/or modified CDS sequence (wt) from neuraminidase__InfluenzaA__AFN19156

SEQ ID NO: 54915 - RNA, 1410 nt, Artificial Sequence; identical to SEQ ID NO: 48750
  derived and/or modified CDS sequence (wt) from neuraminidase__InfluenzaA__AFN19166

SEQ ID NO: 54916 - RNA, 1410 nt, Artificial Sequence; identical to SEQ ID NO: 48750
  derived and/or modified CDS sequence (wt) from neuraminidase__InfluenzaA__AFN19186

SEQ ID NO: 54917 - RNA, 1410 nt, Artificial Sequence; identical to SEQ ID NO: 54702
  derived and/or modified CDS sequence (wt) from neuraminidase__InfluenzaA__AFN19196

SEQ ID NO: 54918 - RNA, 1410 nt, Artificial Sequence; identical to SEQ ID NO: 48750
  derived and/or modified CDS sequence (wt) from neuraminidase__InfluenzaA__AFN19205

SEQ ID NO: 54919 - RNA, 1410 nt, Artificial Sequence; identical to SEQ ID NO: 48750
  derived and/or modified CDS sequence (wt) from neuraminidase__InfluenzaA__AFN19215

SEQ ID NO: 54920 - RNA, 1410 nt, Artificial Sequence; identical to SEQ ID NO: 48750
  derived and/or modified CDS sequence (wt) from neuraminidase__InfluenzaA__AFN19225

SEQ ID NO: 54921 - RNA, 1410 nt, Artificial Sequence; identical to SEQ ID NO: 48750
  derived and/or modified CDS sequence (wt) from neuraminidase__InfluenzaA__AFN19235

SEQ ID NO: 54922 - RNA, 1410 nt, Artificial Sequence; identical to SEQ ID NO: 48750
  derived and/or modified CDS sequence (wt) from neuraminidase__InfluenzaA__AFN19245

SEQ ID NO: 54923 - RNA, 1410 nt, Artificial Sequence
  derived and/or modified CDS sequence (wt) from neuraminidase__InfluenzaA__AFN19251
augaauccaaaccaaaagauaauaaccauugguucggucuguaugacaauuggaauggcuaacuuaauauuacaaauuggaaacauaaucucaauauggauuagccacucaauucaacuugggaaucaaaaucagauugaaacaugcaaucaaagcgucauuacuuaugaaaacaacacuuggguaaaucagacauauguuaacaucagcaacaccaacuuugcugcuggacagucagugguuuccgugaaauuagcgggcaauuccucucucugcccuguuaguggaugggcuauauacaguaaagacaacaguauaagaaucgguuccaagggggauguguuugucauaagggaaccauucauaucaugcucccccuuggaaugcagaaccuucuucuugacucaaggggccuugcuaaaugacaaacauuccaauggaaccauuaaagacaggagcccauaucgaacccuaaugagcuguccuauuggugaaguucccucuccauacaacucaagauuugagucagucgcuuggucagcaagugcuugucaugauggcaucaauuggcuaacaauuggaauuucuggcccagacaauggggcaguggcuguguuaaaguacaacggcauaauaacagacacuaucaagaguuggagaaacaauauauugagaacacaagagucugaaugugcauguguaaaugguucuugcuuuacuguaaugaccgauggaccaagugauggacaggccucauacaagaucuucagaauagaaaagggaaagauagucaaaucagucgaaaugaaugccccuaauuaucacuaugaggaaugcuccuguuauccugauucuagugaaaucacaugugugugcagggacaacuggcauggcucgaaucgaccgugggugucuuucaaccagaaucuggaauaucagauaggauacauaugcagugggauuuucggagacaauccacgcccuaaugauaagacaggcaguugugguccaguaucgucuaauggagcaaauggaguaaaaggauuuucauucaaauacggcaaugguguuuggauagggagaacuaaaagcauuaguucaagaaacgguuuugagaugauuugggauccgaacggauggacugggacagacaauaacuucucaauaaagcaagauaucguaggaauaaaugaguggucaggauauagcgggaguuuuguucagcauccagaacuaacagggcuggauuguauaagaccuugcuucuggguugaacuaaucagagggcgacccaaagagaacacaaucuggacuagcgggagcagcauauccuuuugugguguaaacagugacacuguggguuggucuuggccagacggugcugaguugccauuuaccauugacaaguaa

SEQ ID NO: 54924 - RNA, 1410 nt, Artificial Sequence
  derived and/or modified CDS sequence (wt) from neuraminidase__InfluenzaA__AFN19261
augaauccaaaccaaaagauaauaaccauugguucggucuguaugacaauuggaauggcuaacuuaauauuacaaauuggaaacauaaucucaauauggauuagccacucaauucaacuugggaaucaaaaucagauugaaacaugcaaucaaagcgucauuacuuaugaaaacaacacuuggguaaaucagacauauguuaacaucagcaacaccaacuuugcugcuggacagucagugguuuccgugaaauuagcgggcaauuccucucucugcccuguuaguggaugggcuauauacaguaaagacaacaguauaagaaucgguuccaagggggauguguuugucauaagggaaccauucauaucaugcucccccuuggaaugcagaaccuucuucuugacucaaggggccuugcuaaaugacaaacauuccaauggaaccauuaaagacaggagcccauaucgaacccuaaugagcuguccuauuggugaaguucccucuccauacaacucaagauuugagucagucgcuuggucagcaagugcuugucaugauggcaucaauuggcuaacaauuggaauuucuggcccagacaauggggcaguggcuguguuaaaguacaacggcauaauaacagacacuaucaagaguuggagaaacaauauauugagaacacaagagucugaaugugcauguguaaaugguucuugcuuuacuguaaugaccgauggaccaagcgauggacaggccucauacaagaucuucagaauagaaaagggaaagauagucaaaucagucgaaaugaaugccccuaauuaucacuaugaggaaugcuccuguuauccugauucuagugaaaucacaugugugugcagggauaacuggcauggcucgaaucgaccgugggugucuuucaaccagaaucuggaauaucagauaggauacauaugcagugggauuuucggagacaauccacgcccuaaugauaagacaggcaguugugguccaguaucgucuaauggagcaaauggaguaaaaggauuuucauucaaauacggcaaugguguuuggauagggagaacuaaaagcauuaguucaagaaacgguuuugagaugauuugggauccgaacggauggacugggacagacaauaacuucucaauaaagcaagauaucguaggaauaaaugaguggucaggauauagcgggaguuuuguucagcauccagaacuaacagggcuggauuguauaagaccuugcuucuggguugaacuaaucagagggcgacccaaagagaacacaaucuggacuagcgggagcagcauauccuuuugugguguaaacagugacacuguggguuggucuuggccagacggugcugaguugccauuuaccauugacaaguaa

SEQ ID NO: 54925 - RNA, 1410 nt, Artificial Sequence; identical to SEQ ID NO: 54702
  derived and/or modified CDS sequence (wt) from neuraminidase__InfluenzaA__AFN19271

SEQ ID NO: 54926 - RNA, 1410 nt, Artificial Sequence; identical to SEQ ID NO: 53642
  derived and/or modified CDS sequence (wt) from neuraminidase__InfluenzaA__AFN19281

SEQ ID NO: 54927 - RNA, 1410 nt, Artificial Sequence
  derived and/or modified CDS sequence (wt) from neuraminidase__InfluenzaA__AFN19287
augaauccaaaccaaaagauaauaaccauugguucggucuguaugacaauuggaauggcuaacuuaauauuacaaauuggaaacauaaucucaauauggauuagccacucaauucaacuugggaaucaaaaucagauugaaacaugcaaucaaagcgucauuacuuaugaaaacaacacuuggguaaaucagacauauguuaacaucagcaacaccaacuuugcugcuggacagucagugguuuccgugaaauuagcgggcaauuccucucucugcccuguuaguggaugggcuauauacaguaaagacaacaguauaagaaucgguuccaagggggauguguuugucauaagggaaccauucauaucaugcucccccuuggaaugcagaaccuucuucuugacucaaggggccuugcuaagugacaaacauuccaauggaaccauuaaagacaggagcccauaucgaacccuaaugagcuguccuauuggugaaguucccucuccauacaacucaagauuugagucagucgcuuggucagcaagugcuugucaugauggcaucaauuggcuaacaauuggaauuucuggcccagacaauggggcaguggcuguguuaaaguacaacggcauaauaacagacacuaucaagaguuggagaaacaauauauugagaacacaagagucugaaugugcauguguaaaugguucuugcuuuacuguaaugaccgauggaccaagugauggacaggccucauacaagaucuucagaauagaaaagggaaagauagucaaaucagucgaaaugaaugccccuaauuaucacuaugaggaaugcuccuguuauccugauucuagugaaaucacaugugugugcagggauaacuggcauggcucgaaucgaccgugggugucuuucaaccagaaccuggaauaucagauaggauacauaugcagugggauuuucggagacaauccacgcccuaaugauaagacaggcaguugugguccaguaucgucuaauggagcaaauggaguaaaaggauuuucauucaaauacggcaaugguguuuggauagggagaacuaaaagcauuaguucaagaaacgguuuugagaugauuugggauccgaacggauggacugggacagacaauaacuucucaauaaagcaagauaucguaggaauaaaugaguggucaggauauagcgggaguuuuguucagcauccagaacuaacagggcuggauuguauaagaccuugcuucuggguugaacuaaucagagggcgacccaaagagaacacaaucuggacuagcgggagcagcauauccuuuugugguguaaacagugacacuguggguuggucuuggccagacggugcugaguugccauuuaccauugacaaguaa

SEQ ID NO: 54928 - RNA, 1410 nt, Artificial Sequence; identical to SEQ ID NO: 48750
  derived and/or modified CDS sequence (wt) from neuraminidase__InfluenzaA__AFN19297

SEQ ID NO: 54929 - RNA, 1410 nt, Artificial Sequence; identical to SEQ ID NO: 48750
  derived and/or modified CDS sequence (wt) from neuraminidase__InfluenzaA__AFN19307

SEQ ID NO: 54930 - RNA, 1410 nt, Artificial Sequence; identical to SEQ ID NO: 51000
  derived and/or modified CDS sequence (wt) from neuraminidase__InfluenzaA__AFN19317

SEQ ID NO: 54931 - RNA, 1410 nt, Artificial Sequence; identical to SEQ ID NO: 54702
  derived and/or modified CDS sequence (wt) from neuraminidase__InfluenzaA__AFN19327

SEQ ID NO: 54932 - RNA, 1410 nt, Artificial Sequence; identical to SEQ ID NO: 48750
  derived and/or modified CDS sequence (wt) from neuraminidase__InfluenzaA__AFN19346

SEQ ID NO: 54933 - RNA, 1410 nt, Artificial Sequence
  derived and/or modified CDS sequence (wt) from neuraminidase__InfluenzaA__AFN19352
augaauccaaaucaaaagauaauaacgauuggcucuguuucucucaccauuuccacaauaugcuucuucaugcaaauugccaucuugauaacuacuguaacauugcauuucaagcaauaugaauucaacucccccccaaacaaccaagugaugcugugugaaccaacaauaauagaaagaaacaugacagagauaguguaucugaccaacaccaccauagagaaggaaauaugccccaaaccagcagaauacagaaauuggucaaaaccgcaaugugacauuacaggauuugcaccuuuuucuaaggacaauucgauuaggcuuuccgcugguggggacaucugggugacaagagaaccuuaugugucaugcgauccugacaaguguuaucaauuugcccuuggacagggaacaacacuaaacaacgugcauucaaauaacacaguacgugauaggaccccuuaucggacucuauugaugaaugaguuagguguuccuuuucaucuggggaccaagcaagugugcauagcaugguccagcucaaguugucacgauggaaaagcauggcugcauguuuguauaacgggggaugauaaaaaugcaacugcuagcuucaucuacaaugggaggcuuguagauaguguuguuucaugguccaaagaaauucucaggacccaggagucagaaugcguuuguaucaauggaacuuguacaguaguaaugacugauggaagugcuucaggaaaagcugauacuaaaauacuauucauugaggaggggaaaaucguucauacuagcacauugucaggaagugcucagcaugucgaggagugcucuugcuauccucgauauccuggugucagaugugucugcagagacaacuggaaaggcuccaauaggcccaucguagauauaaacauaaaggaucauagcauuguuuccaguuauguguguucaggacuuguuggagacacacccagaaaaaacgacagcucaagcaguggccauuguuuggauccuaacaaugaagaagguggucauggagugaaaggcugggccuuugaugauggaaaugacguguggaugggaagaacaaucaacgagacgucacgcuuaggguaugaaaccuucaaagucauugaaggcugguccaacccuaaguccaaauugcagauaaauaggcaagucauaguugacagaagugauagguccgguuauucugguauuuucucuguugaaggcaaaagcugcaucaaucggugcuuuuauguggaguugauuaggggaagaaaagaggaaacugaagucuuguggaccucaaacaguauuguuguguuuuguggcaccucagguacauauggaacaggcucauggccugauggggcggaccucaaucucaugccuauauaa

SEQ ID NO: 54934 - RNA, 1410 nt, Artificial Sequence
  derived and/or modified CDS sequence (wt) from neuraminidase__InfluenzaA__AFN19354
augaauccaaaucaaaagauaauaacgauuggcucuguuucucucaccauuuccacaauaugcuucuucaugcaaauugccaucuugauaacuacuguaacauugcauuucaagcaauaugaauucaacucccccccaaacaaccaagugaugcugugugaaccaacaauaauagaaagaaacauaacagagauaguguaucugaccaacaccaccauagagaaggaaauaugccccaaaccagcagaauacagaaauuggucaaaaccgcaaugugacauuacaggauuugcaccuuuuucuaaggacaauucgauuaggcuuuccgcugguggggacaucugggugacaagagaaccuuaugugucaugcgauccugacaaguguuaucaauuugcccuuggacagggaacaacacuaaacaaugugcauucaaauaacacaguacgugauaggaccccuuaucggacuuuauugaugaaugaguuagguguuccuuuucaucuggggaccaagcaagugugcauagcaugguccagcucaaguugucacgauggaaaagcauggcugcauguuuguauaacgggggaugauaaaaaugcaacugcuagcuucauuuacaaugggaggcuuguagauaguguuguuucaugguccaaagaaauucucaggacccaggagucagaaugcguuuguaucaauggaacuuguacaguaguaaugacugauggaagugcuucaggaaaagcugauacuaaaauacuauucauugaggaggggaaaaucguucauacuagcacauugucaggaagugcucagcaugucgaggagugcucuugcuauccucgauauccuggugucagaugugucugcagagacaacuggaaaggcuccaauaggcccaucguagauauaaacauaaaggaucauagcauugucuccaguuauguguguucaggacuuguuggagacacacccagaaaaaacgacagcuccagcaguagccauuguuuggauccuaacaaugaagaagguggucauggagugaaaggcugggccuuugaugauggaaaugacguguggaugggaagaacaaucaacgagacgucacgcuuaggguaugaaaccuucaaagucauugaaggcugguccaacccuaaguccaaauugcagauaaauaggcaagucauaguugacagaggugauaggucugguuauucugguauuuucucuguugaaggcaaaagcugcaucaaucggugcuuuuauguggaguugauuaggggaagaaaagaggaaacugaagucuuguggaccucaaacaguauuguuguguuuuguggcaccucagguacauauggaacaggcucauggccugauggggcggaccucaaucucaugccuauauaa

SEQ ID NO: 54935 - RNA, 1410 nt, Artificial Sequence
  derived and/or modified CDS sequence (wt) from neuraminidase__InfluenzaA__AFN19356
augaauccaaaucaaaagauaauaacgauuggcucuguuucucucaccauuuccacaauaugcuucuucaugcaaauugccaucuugauaacuacuguaacauugcauuucaagcaauaugaauucaacucccccccaaacaaccaagugaugcugugugaaccaacaauaauagaaagaaacauaacagagauaguguaucugaccaacaccaccauagagaaggaaauaugccccaaaccagcagaauacagaaauuggucaaaaccgcaaugugacauuacaggauuugcaccuuuuucuaaggacaauucgauuaggcuuuccgcugguggggacaucugggugacaagagaaccuuaugugucaugcgauccugacaaauguuaucaauuugcccuuggacagggaacaacacuaaacaaugugcauucaaauaacacaguacgugauaggaccccuuaucggacuuuauugaugaaugaguuagguguuccuuuucaucuggggaccaagcaagugugcauagcaugguccagcucaaguugucacgauggaaaagcauggcugcauguuuguauaacgggggaugauaaaaaugcaacugcuagcuucauuuacaaugggaggcuuguagauaguguuguuucaugguccaaagaaauucucaggacccaggagucagaaugcguuuguaucaauggaacuuguacaguaguaaugacugauggaagugcuucaggaaaagcugauacuaaaauacuauucauugaggaggggaaaaucguucauacuagcacauugucaggaagugcucagcaugucgaggagugcucuugcuauccucgauauccuggugucagaugugucugcagagacaauuggaaaggcuccaauaggcccaucguagauauaaacauaaaggaucauagcauugucuccaguuauguguguucaggacuuguuggagacacacccagaaaaaacgacagcuccagcaguagccauuguuuggauccuaacaaugaagaagguggucauggagugaaaggcugggccuuugaugauggaaaugacguguggaugggaagaacaaucaacgagacgucacgcuuaggguaugaaaccuucaaagucauugaaggcugguccaacccuaaguccaaauugcagauaaauaggcaagucauaguugacagaggugauagguccgguuauucugguauuuucucuguugaaggcaaaagcugcaucaaucggugcuuuuauguggaguugauuaggggaagaaaagaggaaacugaagucuuguggaccucaaacaguauuguuguguuuuguggcaccucagguacauauggaacaggcucauggccugauggggcggaccucaaucucaugccuauauaa

SEQ ID NO: 54936 - RNA, 1410 nt, Artificial Sequence
  derived and/or modified CDS sequence (wt) from neuraminidase__InfluenzaA__AFN19358
augaauccaaaucaaaagauaauaacgauuggcucuguuucucucaccauuuccacaauaugcuucuucaugcaaauugccaucuugauaacuacuguaacauugcauuucaagcaauaugaauucaacucccccccaaacaaccaagugaugcugugugaaccaacaauaauagaaagaaacauaacagagauaguguaucugaccaacaccaccauagagaaggaaauaugccccaaaccagcagaauacagaaauuggucaaaaccgcaaugugacauuacaggauuugcaccuuuuucuaaggacaauucgauuaggcuuuccgcugguggggacaucugggugacaagagaaccuuaugugucaugcgauccugacaaguguuaucaauuugcccuuggacagggaacaacacuaaacaaugugcauucaaauaacacaguacgugauaggaccccuuaucggacuuuauugaugaaugaguuagguguuccuuuucaucuggggaccaagcaagugugcauagcaugguccagcucaaguugucacgauggaaaagcauggcugcauguuuguauaacgggggaugauaaaaaugcaacugcuagcuucauuuacaaugggagacuuguagauaguguuguuucaugguccaaagaaauucucaggacccaggagucagaaugcguuuguaucaauggaacuuguacaguaguaaugacugauggaagugcuucaggaaaagcugauacuaaaauacuauucauugaggaggggaaaaucguucauacuagcacauugucaggaagugcucagcaugucgaggagugcucuugcuauccucgauauccuggugucagaugugucugcagagacaacuggaaaggcuccaauaggcccaucguagauauaaacauaaaggaucauagcauugucuccaguuauguguguucaggacuuguuggagacacacccagaaaaaacgacagcuccagcaguagccauuguuuggauccuaacaaugaagaagguggucauggagugaaaggcugggccuuugaugauggaaaugacguguggaugggaagaacaaucaacgagacgucacgcuuaggguaugaaaccuucaaagucauugaaggcugguccaacccuaaguccaaauugcagauaaauaggcaagucauaguugacagaggugauagguccgguuauucugguauuuucucuguugaaggcaaaagcugcaucaaucggugcuuuuauguggaguugauuaggggaagaaaagaggaaacugaagucuuguggaccucaaacaguauuguuguguuuuguggcaccucagguacauauggaacaggcucauggccugauggggcggaccucaaucucaugccuauauaa

SEQ ID NO: 54937 - RNA, 1410 nt, Artificial Sequence
  derived and/or modified CDS sequence (wt) from neuraminidase__InfluenzaA__AFN19360
augaauccaaaucaaaagauaauaacgauuggcucuguuucucucaccauuuccacaauaugcuucuucaugcaaauugccaucuugauaacuacuguaacauugcauuucaagcaauaugaauucaacucccccccaaacaaccaagugaugcugugugaaccaacaauaauagaaagaaacauaacagagauaguguaucugaccaacaccaccauagagaaggaaauaugccccaaaccagcagaauacagaaauuggucaaaaccgcaaugugacauuacaggauuugcaccuuuuucuaaggacaauucgauuaggcuuuccgcugguggggacaucugggugacaagagaaccuuaugugucaugcgauccugacaaguguuaucaauuugcccuuggacagggaacaacacuaaacaaugugcauucaaauaacacaguacgugauaggaccccuuaucggacuuuauugaugaaugaguuagguguuccuuuucaucuggggaccaagcaagugugcauagcaugguccagcucaaguugucacgauggaaaagcauggcugcauguuuguauaacgggggaugauaaaaaugcaacugcuagcuucauuuacaaugggaggcuuguagauaguguuguuucaugguccaaagaaauucucaggacccaggagucagaaugcguuuguaucaauggaacuuguacaguaguaaugacugauggaagugcuucaggaaaagcugauacuaaaauacuauucauugaggaggggaaaaucguucauacuagcacauugucaggaagugcucagcaugucgaggagugcucuugcuauccucgauauccuggugucagaugugucugcagagacaacuggaaaggcuccaauaggcccaucguagauauaaacauaaaggaucauagcauugucuccaguuauguguguucaggacuuguuggagacacacccagaaaaaacgacagcuccagcaguagccauuguuuggauccuaacaaugaagaagguggucauggagugaaaggcugggccuuugaugauggaaaugacguguggaugggaagaacaaucaacgagacgucacgcuuaggguaugaaaccuucaaagucauugaaggcugguccaacccuaaguccaaauugcagauaaauaggcaagucauaguugacagaggugauagguccgguuauucugguauuuucucuguugaaggcaaaagcugcaucaaucggugcuuuuauguggaguugauuaggggaagaaaagaggaaacugaagucuuguggaccucaaacaguauuguuguguuuuguggcaccucagguacauauggaacaggcucauggccugauggggcggaccucaaucucaugccuauauaa

SEQ ID NO: 54938 - RNA, 1410 nt, Artificial Sequence
  derived and/or modified CDS sequence (wt) from neuraminidase__InfluenzaA__AFN19362
augaauccaaaucaaaagauaauaacgauuggcucuguuucucucaccauuuccacaauaugcuucuucaugcaaauugccaucuugauaacuacuguaacauugcauuucaagcaauaugaauucaacucccccccaaacaaccaagugaugcugugugaaccaacaauaauagaaagaaacauaacagagauaguguaucugaccaacaccaccauagagaaggaaauaugccccaaaccagcagaauacagaaauuggucaaaaccgcaaugugacauuacaggauuugcaccuuuuucuaaggacaauucgauuaggcuuuccgcugguggggacaucugggugacaagagaaccuuaugugucaugcgauccugacaaguguuaucaauuugcccuuggacagggaacaacacuaaacaaugugcauucaaauaacacaguacgugauaggaccccuuaucggacuuuauugaugaaugaguuagguguuccuuuucaucuggggaccaagcaagugugcauagcaugguccagcucaaguugucacgauggaaaagcauggcugcauguuuguauaacgggggaugauaaaaaugcaacugcuagcuucauuuacaaugggaggcuuguagauaguguuguuucaugguccaaagaaauucucaggacccaggagucagaaugcguuuguaucaauggaacuuguacaguaguaaugacugauggaagugcuucaggaaaagcugauacuaaaauacuauucauugaggaggggaaaaucguucauacuagcacauugucaggaagugcucagcaugucgaggagugcucuugcuauccucgauauccuggugucagaugugucugcagagacaacuggaaaggcuccaauaggcccaucguagauauaaacauaaaggaucacagcauugucuccaguuauguguguucaggacuuguuggagacacacccagaaaaaacgacagcuccagcaguagccauuguuuggauccuaacaaugaagaagguggucauggagugaaaggcugggccuuugaugauggaaaugacguguggaugggaagaacaaucaacgagacgucacgcuuaggguaugaaaccuucaaagucauugaaggcugguccaacccuaaguccaaauugcagauaaauaggcaagucauaguugacagaggugauagguccgguuauucugguauuuucucuguugaaggcaaaagaugcaucaaucggugcuuuuauguggaguugauuaggggaagaaaagaggaaacugaagucuuguggaccucaaacaguauuguuguguuuuguggcaccucagguacauauggaacaggcucauggccugauggggcggaccucaaucucaugccuauauaa

SEQ ID NO: 54939 - RNA, 1410 nt, Artificial Sequence
  derived and/or modified CDS sequence (wt) from neuraminidase__InfluenzaA__AFN19364
augaauccaaaucaaaagauaauaacgauuggcucuguuucucucaccauuuccacaauaugcuucuucaugcaaauugccaucuugauaacuacuguaacauugcauuucaagcaauaugaauucaacucccccccaaacaaccaagugaugcugugugaaccaacgauaauagaaagaaacauaacagagauaguguaucugaccaacaccaccauagagaaggaaauaugccccaaaccagcagaauacagaaauuggucaaaaccgcaaugugacauuacaggauuugcaccuuuuucuaaggacaauucgauuaggcuuuccgcugguggggacaucugggugacaagagaaccuuaugugucaugcgauccugacaaguguuaucaauuugcccuuggacagggaacaacacuaaacaaugugcauucaaauaacacaguacgugauaggaccccuuaucggacuuuauugaugaaugaguuagguguuccuuuucaucuggggaccaagcaagugugcauagcaugguccagcucaaguugucacgauggaaaagcauggcugcauguuuguauaacgggggaugauaaaaaugcaacugcuagcuucauuuacaaugggaggcuuguagauaguguuguuucaugguccaaagaaauucucaggacccaggagucagaaugcguuuguaucaauggaacuuguacaguaguaaugacugauggaagugcuucaggaaaagcugauacuaaaauacuauucauugaggaggggaaaaucguucauacuagcacauugucaggaagugcucagcaugucgaggagugcucuugcuauccucgauauccuggugucagaugugucugcagagacaacuggaaaggcuccaauaggcccaucguagauauaaacauaaaggaucauagcauugucuccaguuauguguguucaggacuuguuggagacacacccagaaaaaacgacagcuccagcaguagccauuguuuggauccuaacaaugaagaagguggucauggagugaaaggcugggccuuugaugauggaaaugacguguggaugggaagaacaaucaacgagacgucacgcuuaggguaugaaaccuucaaagucauugaaggcugguccaacccuaaguccaaauugcagauaaauaggcaagucauaguugacagaggugauagguccgguuauucugguauuuucucuguugaaggcaaaagcugcaucaaucggugcuuuuauguggaguugauuaggggaagaaaagaggaaacugaagucuuguggaccucaaacaguauuguuguguuuuguggcaccucagguacauauggaacaggcucauggccugauggggcggaccucaaucucaugccuauauaa

SEQ ID NO: 54940 - RNA, 1410 nt, Artificial Sequence
  derived and/or modified CDS sequence (wt) from neuraminidase__InfluenzaA__AFN19366
augaauccaaaucaaaagauaauaacgauuggcucuguuucucucaccauuuccacaauaugcuucuucaugcaaauugccaucuugauaacuacuguaacauugcauuucaagcaauaugaauucaacucccccccaaacaaccaagugaugcugugugaaccaacaauaauagaaagaaacauaacagaaauaguguaucugaccaacaccaccauagagaaggaaauaugccccaaacuagcagaauacagaaauuggucaaagccgcaaugugacauuacaggauuugcaccuuuuucuaaggacaauucgauuaggcuuuccgcugguggggacaucugggugacaagagaaccuuaugugucaugcgauccugacaaguguuaucaauuugcucuuggacagggaacaacacuaaacaacgugcauucaaauaacacaguacgugauaggaccccuuaucggacccuauugaugaaugaguuagguguuccuuuucaucuggggaccaagcaagugugcauagcaugguccagcucaaguugucacgauggaaaagcauggcugcauguuuguauaacgggggaugauaaaaaugcaacugcuagcuucauuuacaaugggaggcuuguagauaguguuguuucaugguccaaagaaauccucaggacccaggagucagaaugcguuuguaucaauggaacuuguacaguaguaaugacugaugggagugcuucaggaaaagcugauacuaagauacuauucauugaggaggggaaaaucguucauacuagcacauugucaggaagugcucagcaugucgaggagugcucuugcuauccucgauauccuggugucagaugugucugcagagacaacuggaaaggcuccaauaggcccaucguagauauaaacauaaaggaucauagcauuguuuccaguuauguguguucaggacuuguuggagacacacccagaaaaaacgacagcuccagcaguagccauuguuuggauccuaacaaugaagaagguggucauggagugaaaggcugggccuuugaugauggaaaugacguguggaugggaagaacgaucaacgagacgucacguuuaggguaugaaaccuucaaagucauugaaggcugguccaacccuaaguccaaauugcagauaaauaggcaagucauaguugacagagguaauagguccgguuauucugguauuuucucuguugaaggcaaaagcugcaucaaucggugcuuuuauguggaguugauuaggggaagaaaagaggaaacugaagucuuguggaccucaaacaguauuguuguguuuuguggcaccucagguacauauggaacaggcucauggccugauggggcggaccucaaucucaugccuauauaa

SEQ ID NO: 54941 - RNA, 1410 nt, Artificial Sequence
  derived and/or modified CDS sequence (wt) from neuraminidase__InfluenzaA__AFN19370
augaauccaaaucaaaagauaauaacgauuggcucuguuucucucaccauuuccacaauaugcuucuucaugcaaauugccaucuugauaacuacuguaacauugcauuucaagcaauaugaauucaacucccccccaaacaaccaagugaugcugugugaaccaacaauaauagaaagaaacauaacagagauaguguaucugaccaacaccaccauagagaaggaaauaugccccaaaccagcagaauacagaaauuggucaaaaccgcaaugugacauuacaggauuugcaccuuuuucuaaggacaauucgauuaggcuuuccgcugguggggacaucugggugacaagagaaccuuaugugucaugcgauccugacaaguguuaucaauuugcccuuggacagggaacaacacuaaacaaugugcauucaaauaacacaguacgugauaggaccccuuaucggacucuauugaugaaugaguuagguguuccuuuucaucuggggaccaagcaagugugcauagcaugguccagcucaaguugucacgauggaaaagcauggcugcauguuuguauaacgggggaugauaaaaaugcaacugcuagcuucauuuacaaugggaggcuuguagauaguguuguuucaugguccaaagaaauucucaggacccaggagucagaaugcguuuguaucaauggaacuuguacaguaguaaugacugauggaagugcuucaggaaaagcugauacuaaaauacuauucauugaggaggggaaaaucguucauacuagcacauugucaggaagugcucagcaugucgaggagugcucuugcuauccucgauauccuggugucagaugugucugcagagacaacuggaaaggcuccaauaggcccaucguagauauaaacauaaaggaucauagcauugucuccaguuauguguguucaggacuuguuggagacacgcccagaaaaaacgacagcuccagcaguagccauuguuuggauccuaacaaugaagaagguggucauggagugaaaggcugggccuuugaugauggaaaugacguuuggaugggaagaacaaucaacgagacgucacgcuuaggguaugaaaccuucaaagucauugaaggcugguccaacccuaaguccaaauugcagauaaauaggcaagucauaguugacagaggugauagguccgguuauucugguauuuucucuguugaaggcaaaagcugcaucaaucggugcuuuuauguggaguugauuaggggaagaaaagaggaaacugaagucuuguggaccucaaacaguauuguuguguuuuguggcaccucagguacauauggaacaggcucauggccugauggggcggaccucaaucucaugccuauauaa

SEQ ID NO: 54942 - RNA, 1410 nt, Artificial Sequence
  derived and/or modified CDS sequence (wt) from neuraminidase__InfluenzaA__AFN19374
augaauccaaaucaaaagauaauaacgauuggcucuguuucucucaccauuucuacaauaugcuucuucaugcaaauugccaucuugauaacuacuguaacauugcauuucaagcaauaugaauucaacucccccccaaacaaccaagugaugcugugugaaccaacaauaauagaaagaaacauaacagagauaguguaucugaccaauaccaccauagagaaggaaauaugccccaaaccagcagaauacagaaauuggucaaaaccgcaauguggcauuacaggauuugcaccuuucucuaaggacaauucgaucaggcuuuccgcugguggggacaucugggugacaagagaaccuuaugugucaugcgauccugacaaguguuaucaauuugcccuuggacagggaacaacacuaaacaacgugcauucaaauaacacaguacgugauaggaccccuuaucggacucuauugaugaaugaguuggguguuccuuuucaucuggggaccaagcaagugugcauagcaugguccagcucaaguugucacgauggaaaagcauggcugcauguuuguauaacgggggaugauaaaaaugcaacugcuagcuucauuuacaaugggaggcuuguagauaguguuguuucaugguccaaagaaauucucaggacccaggagucagaaugcguuuguaucaauggaacuuguacaguaguaaugacugauggaagugcuucaggaaaagcugauacuaaaauacuauucauuaaggaggggaaaaucguucauacuagcacauugucaggaagugcucagcaugucgaagagugcucuugcuauccucgauauccuggugucagaugugucugcagagacaacuggaaaggcuccaauaggcccaucguagauauaaacauaaaggaucauagcauuguuuccaguuauguguguucaggacuuguuggagacacacccagaaaaaccgacagcuccagcaguagccauuguuuggauccuaacaaugaagaagguggucauggagugaaaggcugggccuuugaugauggaaaugacguguggaugggaagaacaaucaacgagacgucacgcuuaggguaugaaaccuucaaagucauugaaggcugguccaacccuaaguccaaauugcagauaaauaggcaagucauaguugacagaggugauagguccgguuauucugguauuuucucuguugaaggcaaaagcugcaucaaucggugcuuuuauguggaguugauuaggggaagaaaagaggaaacugaagucuuguggaccucaaacaguauuguuguguuuuguggcaccucagguacauauggaacaggcucauggccugauggggcggaccucaaucucaugccuauauaa

SEQ ID NO: 54943 - RNA, 1410 nt, Artificial Sequence; identical to SEQ ID NO: 54937
  derived and/or modified CDS sequence (wt) from neuraminidase__InfluenzaA__AFN19376

SEQ ID NO: 54944 - RNA, 1410 nt, Artificial Sequence; identical to SEQ ID NO: 54941
  derived and/or modified CDS sequence (wt) from neuraminidase__InfluenzaA__AFN19378

SEQ ID NO: 54945 - RNA, 1410 nt, Artificial Sequence
  derived and/or modified CDS sequence (wt) from neuraminidase__InfluenzaA__AFN19380
augaauccaaaucaaaagauaauaacgauuggcucuguuucucucaccauuuccacaauaugcuucuucaugcaaauugccaucuugauaacuacuguaacauugcauuucaagcaauaugaauucaacucccccccaaacaaccaagugaugcugugugaaccaacaauaauagaaagaaacauaacagagauaguguaucugaccaacaccaccauagagaaggaaauaugccccaaaccaucagaauacagaaauuggucaaaaccgcaaugugacauuacaggauuugcaccuuuuucuaaggacaauucgauuaggcuuuccgcugguggggacaucugggugacaagagaaccuuaugugucaugcgauccugacaaguguuaucaauuugcccuuggacagggaacaacacuaaacaaugugcauucaaauaacacaguacgugauaggaccccuuaucggacuuuauugaugaaugaguuagguguuccuuuucaucuggggaccaagcaagugugcauagcaugguccagcucaaguugucacgauggaaaagcauggcugcauguuuguauaacgggggaugauaaaaaugcaacugcuagcuucauuuacaaugggaggcuuguagauaguguuguuucaugguccaaagaaauucucaggacccaggagucagaaugcguuuguaucaauggaacuuguacaguaguaaugacugauggaagugcuucaggaaaagcugauacuaaaauacuauucauugaggaggggaaaaucguucauacuagcacauugucaggaagugcucagcaugucgaggagugcucuugcuauccucgauauccuggugucagaugugucugcagagacaacuggaaaggcuccaauaggcccaucguagauauaaacauaaaggaucauagcauugucuccaguuauguguguucaggacuuguuggagacacacccagaaaaaacgacagcuccagcaguagccauuguuuggauccuaacaaugaagaagguggucauggagugaaaggcugggccuuugaugauggaaaugacguguggaugggaagaacaaucaacgagacgucacgcuuaggguaugaaaccuucaaagucauugaaggcugguccaacccuaaguccaaauugcagauaaauaggcaagucauaguugacagaggugauagguccgguuauucugguauuuucucuguugaaggcaaaagcugcaucaaucggugcuuuuauguggaguugauuaggggaagaaaagaggaaacugaagucuuguggaccucaaacaguauuguuguguuuuguggcaccucagguacauauggaacaggcucauggccugauggggcagaccucaaucucaugccuauauaa

SEQ ID NO: 54946 - RNA, 1410 nt, Artificial Sequence
  derived and/or modified CDS sequence (wt) from neuraminidase__InfluenzaA__AFN19382
augaauccaaaucaaaagauaauaacgauuggcucuguuucucucaccauuucuacaauaugcuucuucaugcaaauugccaucuugauaacuacuguaacauugcauuucaagcaauaugaauucaacucccccccaaacaaccaagugaugcugugugaaccaacaauaauagaaagaaacauaacagagauaguguaucugaccaacaccaccauagagaaggaaauaugccccaaaccagcagaauacagaaauuggucaaaaccgcaauguggcauuacaggauuugcaccuuucucuaaggacaauucgaucaggcuuuccgcugguggggacaucugggugacaagagaaccuuaugugucaugcgauccugacaaguguuaucaauuugcccuuggacagggaacaacacuaaacaacgugcauucaaauaacacaguacgugauaggaccccuuaucggacucuauugaugaaugaguuggguguuccuuuucaucuggggaccaagcaagugugcauagcaugguccagcucaaguugucacgauggaaaagcauggcugcauguuuguauaacgggggaugauaaaaaugcaacugcuagcuucauuuacaaugggaggcuuguagauaguguuguuucaugguccaaagaaauucucaggacccaggagucagaaugcguuuguaucaauggaacuuguacaguaguaaugacugauggaagugcuucaggaaaagcugauacuaaaauacuauucauuaaggaggggaaaaucguucauacuagcacauugucaggaagugcucagcaugucgaagagugcucuugcuauccucgauauccuggugucagaugugucugcagagacaacuggaaaggcuccaauaggcccaucguagauauaaacauaaaggaucauagcauuguuuccaguuauguguguucaggacuuguuggagacacacccagaaaaaccgacagcuccagcaguagccauuguuuggauccuaacaaugaagaagguggucauggagugaaaggcugggccuuugaugauggaaaugacguguggaugggaagaacaaucaacgagacgucacgcuuaggguaugaaaccuucaaagucauugaaggcugguccaacccuaaguccaaauugcagauaaauaggcaagucauaguugacagaggugauagguccgguuauucugguauuuucucuguugaaggcaaaagcugcaucaaucggugcuuuuauguggaguugauuaggggaagaaaagaggaaacugaagucuuguggaccucaaacaguauuguuguguuuuguggcaccucagguacauauggaacaggcucauggccugauggggcggaccucaaucucaugccuauauaa

SEQ ID NO: 54947 - RNA, 1410 nt, Artificial Sequence
  derived and/or modified CDS sequence (wt) from neuraminidase__InfluenzaA__AFN19384
augaauccaaaucaaaagauaauaacgauuggcucuguuucucucaccauuuccacaauaugcuucuucaugcaaauugccaucuugauaacuacuguaacauugcauuucaagcaauaugaauucaacucccccccaaacaaccaagugaugcugugugaaccaacaauaauagaaagaaacauaacagagauaguguaucugaccaacaccaccauagagaaggaaauaugccccaaaccagcagaauacagaaauuggucaaaaccgcaaugugacauuacaggauuugcaccuuuuucuaaggacaauucgauuaggcuuuccgcugguggggacaucugggugacaagagaaccuuaugugucaugcgauccugacaaguguuaucaauuugcccuuggacagggaacaacacuaaacaaugugcauucaaauaacacaguacgugauaggaccccuuaucggacucuauugaugaaugaguuagguguuccuuuucaucuggggaccaagcaagugugcauagcaugguccagcucaaguugucacgauggaaaagcauggcugcauguuuguauaacgggggaugauaaaaaugcaacugcuagcuucauuuacaaugggaggcuuguagauaguguuguuucaugguccaaagaaauucucagaacccaggagucagaaugcguuuguaucaauggaacuuguacaguaguaaugacugauggaagugcuucaggaaaagcugauacuaaaauacuauucauugaggaggggaaaaucguucauacuagcacauugucaggaagugcucagcaugucgaggagugcucuugcuauccucgauauccuggugucagaugugucugcagagacaacuggaaaggcuccaauaggcccaucguagauauaaacauaaaggaucauagcauugucuccaguuauguguguucaggacuuguuggagacacgcccagaaaaaacgacagcuccagcaguagccauuguuuggauccuaacaaugaagaagguggucauggagugaaaggcugggccuuugaugauggaaaugacguuuggaugggaagaacaauuaacgagacgucacgcuuaggguaugaaaccuucaaagucauugaaggcugguccaacccuaaguccaaauugcagauaaauaggcaagucauaguugacagaggugauagguccgguuauucugguauuuucucuguugaaggcaaaagcugcaucaaucggugcuuuuauguggaguugauuaggggaagaaaagaggaaacugaagucuuguggaccucaaacaguauuguuguguuuuguggcaccucagguacauauggaacaggcucauggccugauggggcggaccucaaucucaugccuauauaa

SEQ ID NO: 54948 - RNA, 1410 nt, Artificial Sequence
  derived and/or modified CDS sequence (wt) from neuraminidase__InfluenzaA__AFN19386
augaauccaaaucaaaagauaauaacgauuggcucuguuucucucaccauuuccacaauaugcuucuucaugcaaauugccaucuugauaacuacuguaacauugcauuucaagcaauaugaauucaacucccccccaaacaaccaagugaugcugugugaaccaacaauaauagaaagaaacauaacagagauaguguaucugaccaacaccaccauagagaaggaaauaugccccaaaccagcagaauacagaaauuggucaaaaccgcaaugugacauuacaggauuugcaccuuuuucuaaggacaauucgauuaggcuuuccgcugguggggacaucugggugacaagagaaccuuaugugucaugcgauccugacaaguguuaucaauuugcccuuggacagggaacaacacuaaacaaugugcauucaaauaacacaguacgugauaggaccccuuaucggacucuauugaugaaugaguuagguguuccuuuucaucuggggaccaagcaagugugcauagcaugguccagcucaaguugucacgauggaaaagcauggcugcauguuuguauaacgggggaugauaaaaaugcaacugcuagcuucauuuacaaugggaggcuuguagauaguguuguuucaugguccaaagaaauucucagaacccaggagucagaaugcguuuguaucaauggaacuuguacaguaguaaugacugauggaagugcuucaggaaaagcugauacuaaaauacuauucauugaggaggggaaaaucguucauacuagcacauugucaggaagugcucagcaugucgaggagugcucuugcuauccucgauauccuggugucagaugugucugcagagacaacuggaaaggcuccaauaggcccaucguagauauaaacauaaaggaucauagcauugucuccaguuauguguguucaggacuuguuggagacacgcccagaaaaaacgacagcuccagcaguagccauuguuuggauccuaacaaugaagaagguggucauggagugaaaggcugggccuuugaugauggaaaugacguuuggaugggaagaacaaucaacgagacgucacgcuuaggguaugaaaccuucaaagucauugaaggcugguccaacccuaaguccaaauugcagauaaauaggcaaaucauaguugacagaggugauagguccgguuauucugguauuuucucuguugaaggcaaaagcugcaucaaucggugcuuuuauguggaguugauuaggggaagaaaagaggaaacugaagucuuguggaccucaaacaguauuguuguguuuuguggcaccucagguacauauggaacaggcucauggccugauggggcggaccucaaucucaugccuauauaa

SEQ ID NO: 54949 - RNA, 1410 nt, Artificial Sequence; identical to SEQ ID NO: 54941
  derived and/or modified CDS sequence (wt) from neuraminidase__InfluenzaA__AFN19388

SEQ ID NO: 54950 - RNA, 1410 nt, Artificial Sequence; identical to SEQ ID NO: 54937
  derived and/or modified CDS sequence (wt) from neuraminidase__InfluenzaA__AFN19390

SEQ ID NO: 54951 - RNA, 1410 nt, Artificial Sequence
  derived and/or modified CDS sequence (wt) from neuraminidase__InfluenzaA__AFN19392
augaauccaaaucaaaagauaauaacgauuggcucuguuucucucaccauuuccacaauaugcuucuucaugcaaauugccgucuugauaacuacuguaacauugcauuucaagcaauaugaauucaacucccccccaaacaaccaagugaugcugugugaaccaacaauaauagaaagaaacauaacagagauaguguaucugaccaacaccaccauagagaaggaaauaugccccaaaccagcagaauacagaaauuggucaaaaccgcaaugugacauuacaggauuugcaccuuuuucuaaggacaauucgauuaggcuuuccgcugguggggacaucugggugacaagagaaccuuaugugucgugcgauccugacaaguguuaucaauuugcccuuggacagggaacaacacuaaacaaugugcauucaaauaacacaguacgugauaggaccccuuaucggacuuuauugaugaaugaguuagguguuccuuuucaucuggggaccaagcaagugugcauagcaugguccagcucaaguugucacgauggaaaagcauggcugcauguuuguauaacgggggaugauaaaaaugcaacugcuagcuucauuuacaaugggaggcuuguagauaguguuguuucaugguccaaagaaauucucaggacccaggagucagaaugcguuuguaucaauggaacuuguacaguaguaaugacugauggaagugcuucaggaaaagcugauacuaaaauacuauucauugaggaggggaaaaucguucauacuagcacauugucaggaagugcucagcaugucgaggagugcucuugcuauccucgauauccuggugucagaugugucugcagagacaacuggaaaggcuccaauaggcccaucguagauauaaacauaaaggaucauagcauugucuccaguuauguguguucaggacuuguuggagacacacccagaaaaaacgacagcuccagcaguagccauuguuuggauccuaacaaugaagaagguggucauggagugaaaggcugggccuuugaugauggaaaugacguguggaugggaagaacaaucaacgagacgucacgcuuaggguaugaaaccuucaaagucauugaaggcugguccaaccccaaguccaaauugcagauaaauaggcaagucauaguugacagaggugauagguccgguuauucugguauuuucucuguugaaggcaaaagcugcaucaaucggugcuuuuauguggaguugauuaggggaagaaaagaggaaacugaagucuuguggaccucaaacaguauuguuguguuuuguggcaccucagguacauauggaacaggcucauggccugauggggcggaccucaaucucaugccuauauaa

SEQ ID NO: 54952 - RNA, 1410 nt, Artificial Sequence; identical to SEQ ID NO: 53811
  derived and/or modified CDS sequence (wt) from neuraminidase__InfluenzaA__AFN19394

SEQ ID NO: 54953 - RNA, 1410 nt, Artificial Sequence
  derived and/or modified CDS sequence (wt) from neuraminidase__InfluenzaA__AFN19396
augaacccaaaucaaaagauaauaacgauuggcucuguuucucucaccauuuccacaauaugcuucuucaugcaaauugccaucuugauaacuacuguaacauugcauuucaagcaauaugaauucaacucccccccaaacaaccaagugaugcugugugaaccaacaauaauagaaagaaacauaacagagauaguguaucugaccaacaccaccauagagaaggaaauaugccccaaacuagcagaauacagaaauuggucaaagccgcaaugugauauuacaggauuugcaccuuuuucuaaggacaauucgauuaggcuuuccgcugguggggacaucugggugacaagagaaccuuaugugucaugcgauccugacaaguguuaucaauuugcccuuggacagggaacaacacuaaacaacgugcauucaaauaacacaguacgugauaggaccccuuaucggacccuauugaugaaugaguuagguguuccuuuucaucuggggaccaagcaagugugcauagcaugguccagcucaaguugucacgauggaaaagcauggcugcauguuuguauaacgggggaugauaaaaaugcaacugcuagcuucauuuacaaugggaggcuuguagauaguguuguuucaugguccaaagacauccucaggacccaggagucagaaugcguuuguaucaauggaacuugugcgguaguaaugacugaugggagugcuucaggaaaagcugauacuaaaauacuauucauugaggaggggaaaaucguucauacuagcacauugucaggaagugcucagcaugucgaggagugcucuugcuauccucgauauccuggugucagaugugucugcagagacaacuggaagggcuccaauaggcccaucguagauauaaacauaaaggaucauagcauuguuuccaguuauguguguucaggacuuguuggagacacacccagaaaaaacgacagcuccagcaguagccauuguuuggauccuaacaaugaagaagguggucauggaguaaaaggcugggccuuugaugauggaaaugacguguggaugggaagaacgaucaacgagacgucacgcuuaggguaugaaaccuucaaagucauugaaggcugguccaacccuaaguccaaauugcagauaaauaggcaagucauaguugacagagguaauagguccgguuauucugguauuuucucuguugaaggcaagaacugcaucaaucggugcuuuuauguggaguugauuaggggaagaaaagaggaaacugaagucuuguggaccucaaacaguauuguuguguuuuguggcaccucagguacauauggaacaggcucauggccugauggggcggaccucaaucucaugccuauauaa

SEQ ID NO: 54954 - RNA, 1410 nt, Artificial Sequence
  derived and/or modified CDS sequence (wt) from neuraminidase__InfluenzaA__AFN19398
augaauccaaaucaaaagauaauaacgauuggcucuguuucucucaccauuuccacaauaugcuucuuuaugcaaauugccaucuugauaacuacuguaacauugcauuucaagcaauaugaauucaacucccccccaaacaaccaagugaugcugugugaaccaacaauaauagaaagaaacauaacagagauaguguaucugaccaacaccaccauagagaaggaaauaugccccaaaccagcagaauacagaaauuggucaaaaccgcaaugugacauuacaggauuugcaccuuuuucuaaggacaauucgauuaggcuuuccgcugguggggacaucugggugacaagagaaccuuaugugucaugcgauccugacaaguguuaucaauuugcccuuggacagggaacaacacuaaacaaugugcauucaaauaacacaguacgugauaggaccccuuaucggacuuuauugaugaaugaguuagguguuccuuuucaucuggggaccaagcaagugugcauagcaugguccagcucaaguugucacgauggaaaagcauggcugcauguuuguauaacgggggaugauaaaaaugcaacugcuagcuucauuuacaaugggaggcuuguagauaguguuguuucaugguccaaagaaauucucaggacccaggagucagaaugcguuuguaucaauggaacuuguacaguaguaaugacugauggaagugcuucaggaaaagcugauacuaaaauacuauucauugaggaggggaaaaucguucauacuagcacauugucaggaagugcucagcaugucgaggagugcucuugcuauccucgauauccuggugucagaugugucugcagagacaacuggagaggcuccaauaggcccaucguagauauaaacauaaaggaucauagcauugucuccaguuauguguguucaggacuuguuggagacacacccagaaaaaacgacagcuccagcaguagccauuguuuggauccuaacaaugaagaagguggucauggagugaaaggcugggccuuugaugauggaaaugacguguggaugggaagaacaaucaacgagacgucacgcuuaggguaugaaaccuucaaagucauugaaggcugguccaacccuaaguccaaauugcagauaaauaggcaagucauaguugacagaggugauagguccgguuauucugguauuuucucuguugaaggcaaaagcugcaucaaucggugcuuuuauguggaguugauuaggggaagaaaagaggaaacugaagucuuguggaccucaaacaguauuguuguguuuuguggcaccucagguacauauggaacaggcucauggccugauggggcggaccucaaucucaugccuauauaa

SEQ ID NO: 54955 - RNA, 1410 nt, Artificial Sequence
  derived and/or modified CDS sequence (wt) from neuraminidase__InfluenzaA__AFN19400
augaauccaaaucaaaagauaauaacgauuggcucuguuucucucaccauuuccacaauaugcuucuucaugcaaauugccaucuugauaacuacuguaacauugcauuucaagcaauaugaauucaacucccccccaaacaaccaagugaugcugugugaaccaacaauaauagaaagaaacauaacagagauaguguaucugaccaacaccaccauagagaaggaaauaugccccaaaccaucagaauacagaaauuggucaaaaccgcaaugugacauuacaggauuugcaccuuuuucuaaggacaauucgauuaggcuuuccgaugguggggacaucugggugacaagagaaccuuaugugucaugcgauccugacaaguguuaucaauuugcccuuggacagggaacaacacuaaacaaugugcauucaaauaacacaguacgugauaggaccccuuaucggacuuuauugaugaaugaguuagguguuccuuuucaucuggggaccaagcaagugugcauagcaugguccagcucaaguugucacgauggaaaagcauggcugcauguuuguauaacgggggaugauaaaaaugcaacugcuagcuucauuuacaaugggaggcuuguagauaguguuguuucaugguccaaagaaauucucaggacccaggagucagaaugcguuuguaucaauggaacuuguacaguaguaaugacugauggaagugcuucaggaaaagcugauacuaaaauacuauucauugaggaggggaaaaucguucauacuagcacauugucaggaagugcucagcaugucgaggagugcucuugcuauccucgauauccuggugucagaugugucugcagagacaacuggaaaggcuccaauaggcccaucguagauauaaacauaaaggaucauagcauugucuccaguuauguguguucaggacuuguuggagacacacccagaaaaaacgacagcuccagcaguagccauuguuuggauccuaacaaugaagaagguggucauggagugaaaggcugggccuuugaugauggaaaugacguguggaugggaagaacaaucaacgagacgucacgcuuaggguaugaaaccuucaaagucauugaaggcugguccaacccuaaguccaaauugcagauaaauaggcaagucauaguugacagaggugauagguccgguuauucugguauuuucucuguugaaggcaaaagcugcaucaaucggugcuuuuauguggaguugauuaggggaagaaaagaggaaacugaagucuuguggaccucaaacaguauuguuguguuuuguggcaccucagguacauauggaacaggcucauggccugauggggcggaccucaaucucaugccuauauaa

SEQ ID NO: 54956 - RNA, 1410 nt, Artificial Sequence
  derived and/or modified CDS sequence (wt) from neuraminidase__InfluenzaA__AFN19402
augaauccaaaucaaaagauaauaacgauuggcucuguuucucucaccauuuccacaauaugcuucuuuaugcaaauugccaucuugauaacuacuguaacauugcauuucaagcaauaugaauucaacucccccccaaacaaccaagugaugcugugugaaccaacaauaauagaaagaaacauaacagagauaguguaucugaccaacaccaccauagagaaggaaauaugccccaaaccagcagaauacagaaauuggucaaaaccgcaaugugacauuacaggauuugcaccuuuuucuaaggacaauucgauuaggcuuuccgcugguggggacaucugggugacaagagaaccuuaugugucaugcgauccugacaaguguuaucaauuugcccuuggacagggaacaacacuaaacaaugugcauucaaauaacacaguacgugauaggaccccuuaucggacuuuauugaugaaugaguuagguguuccuuuucaucuggggaccaagcaagugugcauagcaugguccagcucaaguugucacgauggaaaagcauggcugcauguuuguauaacgggggaugauaaaaaugcaacugcuagcuucauuuacaaugggaggcuuguagauaguguuguuucaugguccaaagaaauucucaggacccaggagucagaaugcguuuguaucaauggaacuuguacaguaguaaugacugauggaagugcuucaggaaaagcugauacuaaaauacuauucauugaggaggggaaaaucguucauacuagcacauugucaggaagugcucagcaugucgaggagugcucuugcuauccucgauauccuggugucagaugugucugcagagacaacuggaaaggcuccaauaggcccaucguagauauaaacauaaaggaucauagcauugucuccaguuauguguguucaggacuuguuggagacacacccagaaaaaacgacagcuccagcaguagccauuguuuggauccuaacaaugaagaagguggucauggagugaaaggcugggccuuugaugauggaaaugacguguggaugggaagaacaaucaacgagacgucacgcuuaggguaugaaaccuucaaagucauugaaggcugguccaacccuaaguccaaauugcagauaaauaggcaagucauaguugacagaggugauagguccgguuauucugguauuuucucuguugaaggcaaaagcugcaucaaucggugcuuuuauguggaguugauuaggggaagaaaagaggaaacugaagucuuguggaccucaaacaguauuguuguguuuuguggcaccucagguacauauggaacaggcucauggccugauggggcggaccucaaucucaugccuauauaa

SEQ ID NO: 54957 - RNA, 1410 nt, Artificial Sequence
  derived and/or modified CDS sequence (wt) from neuraminidase__InfluenzaA__AFN19404
augaauccaaaucaaaagauaauaacgauuggcucuguuucucucaccauuuccacaauaugcuucuuuaugcaaauugccaucuugauaacuacuguaacauugcauuucaagcaauaugaauucaacucccccccaaacaaccaagugaugcugugugaaccaacaauaauagaaagaaacauaacagagauaguguaucugaccaacaccaccauagagaaggaaauaugccccaaaccggcagaauacagaaauuggucaaaaccgcaaugugacauuacaggauuugcaccuuuuucuaaggacaauucgauuaggcuuuccgcugguggggacaucugggugacaagagaaccuuaugugucaugcgauccugacaaguguuaucaauuugcccuuggacagggaacaacacuaaacaaugugcauucaaauaacacaguacgugauaggaccccuuaucggacuuuauugaugaaugaguuagguguuccuuuucaucuggggaccaagcaagugugcauagcaugguccagcucaaguugucacgauggaaaagcauggcugcauguuuguauaacgggggaugauaaaaaugcaacugcuagcuucauuuacaaugggaggcuuguagauaguguuguuucaugguccaaagaaauucucaggacccaggagucagaaugcguuuguaucaauggaacuuguacaguaguaaugacugauggaagugcuucaggaaaagcugauacuaaaauacuauucauugaggaggggaaaaucguucauacuagcacauugucaggaagugcucagcaugucgaggagugcucuugcuauccucgauauccuggugucagaugugucugcagagacaacuggaaaggcuccaauaggcccaucguagauauaaacauaaaggaucauagcauugucuccaguuauguguguucaggacuuguuggagacacacccagaaaaaacgacagcuccagcaguagccauuguuuggauccuaacaaugaagaagguggucauggagugaaaggcugggccuuugaugauggaaaugacguguggaugggaagaacaaucaacgagacgucacgcuuaggguaugaaaccuucaaagucauugaaggcugguccaacccuaaguccaaauugcagauaaauaggcaagucauaguugacagaggugauagguccgguuauucugguauuuucucuguugaaggcaaaagcugcaucaaucggugcuuuuauguggaguugauuaggggaagaaaagaggaaacugaagucuuguggaccucaaacaguauuguuguguuuuguggcaccucagguacauauggaacaggcucauggccugauggggcggaccucaaucucaugccuauauaa

SEQ ID NO: 54958 - RNA, 1410 nt, Artificial Sequence; identical to SEQ ID NO: 54956
  derived and/or modified CDS sequence (wt) from neuraminidase__InfluenzaA__AFN19406

SEQ ID NO: 54959 - RNA, 1410 nt, Artificial Sequence; identical to SEQ ID NO: 54937
  derived and/or modified CDS sequence (wt) from neuraminidase__InfluenzaA__AFN19410

SEQ ID NO: 54960 - RNA, 1410 nt, Artificial Sequence
  derived and/or modified CDS sequence (wt) from neuraminidase__InfluenzaA__AFN19412
augaauccaaaucaaaagauaauaacgauuggcucuguuucucucaccauuuccacaauaugcuucuucaugcaaauugccaucuugauaacuacuguaacauugcauuucaagcaauaugaauucaacucccccccaaacaaccaagugaugcugugugaaccaacaauaauagaaagaaacauaacagagauaguguaucugaccaacaccaccauagagaaggaaauaugccccaaaccagcagaauacagaaauuggucaaaaccgcaaugugacauuacaggauuugcaccuuuuucuaaggacaauucgauuaggcuuuccgcugguggggacaucugggugacaagagaaccuuaugugucaugcgauccugacaaguguuaucaauuugcccuuggacagggaacaacacuaaacaaugugcauucaaauaacacaguacgugauaggaccccuuaucggacucuauugaugaaugaguuagguguuccuuuucaucuggggaccaagcaagugugcauagcaugguccagcucaaguugucacgauggaaaagcauggcugcacguuuguauaacgggggaugauaaaaaugcaacugcuagcuucauuuacaaugggaggcuuguagauaguguuguuucaugguccaaagaaauucucaggacccaggagucagaaugcguuuguaucaauggaacuuguacaguaguaaugacugauggaagugcuucaggaaaagcugauacuaaaauacuauucauugaggaggggaaaaucguucauacuagcacauugucaggaagugcucagcaugucgaggagugcucuugcuauccucgauauccuggugucagaugugucugcagagacaacuggaaaggcuccaauaggcccaucguagauauaaacauaaaggaucauagcauugucuccaguuauguguguucaggacuuguuggagacacgcccagaaaaaacgacagcuccagcaguagccauuguuuggauccuaacaaugaagaagguggucauggagugaaaggcugggccuuugaugauggaaaugacguuuggaugggaagaacaaucaacgagacgucacgcuuaggguaugaaaccuucaaagucauugaaggcugguccaacccuaaguccaaauugcagauaaauaggcaagucauaguugacagaggugauagguccgguuauucugguauuuucucuguugaaggcaaaagcugcaucaaucggugcuuuuauguggaguugauuaggggaagaaaagaggaaacugaagucuuguggaccucaaacaguauuguuguguuuuguggcaccucagguacauauggaacaggcucauggccugauggggcggaccucaaucucaugccuauauaa

SEQ ID NO: 54961 - RNA, 1410 nt, Artificial Sequence; identical to SEQ ID NO: 54956
  derived and/or modified CDS sequence (wt) from neuraminidase__InfluenzaA__AFN19414

SEQ ID NO: 54962 - RNA, 1410 nt, Artificial Sequence; identical to SEQ ID NO: 54937
  derived and/or modified CDS sequence (wt) from neuraminidase__InfluenzaA__AFN19416

SEQ ID NO: 54963 - RNA, 1410 nt, Artificial Sequence
  derived and/or modified CDS sequence (wt) from neuraminidase__InfluenzaA__AFN19418
augaauccaaaucaaaagauaauaacgauuggcucuguuucucucaccauuuccacaauaugcuucuucaugcaaauugccaucuugauaacuacuguaacauugcauuucaagcaauaugaauucaacucccccccaaacaaccaagugaugcugugugaaccaacaauaauagaaagaaacauaacagagauaguguaucugaccaacaccaccauagagaaggaaauaugccccaaaccagcagaauacagaaauuggucaaaaccgcaaugugacauuacaggauuugcaccuuuuucuaaggacaauucgauuaggcuuuccgcugguggggacaucugggugacaagagaaccuuaugugucaugcgauccugacaaguguuaucaauuugcccuuggacagggaacaacacuaaacaaugugcauucaaauaacacaguacgugauaggaccccuuaucggacuuuauugaugaaugaguuagguguuccuuuucaucuggggaccaagcaagugugcauagcaugguccagcucaaguugucacgauggaaaagcauggcugcauguuuguauaacgggggaugauaaaaaugcaacugcuagcuucauuuacaaugggaggcuuguagauaguguuguuucaugguccaaagaaauucucaggacccaggagucagaaugcguuuguaucaauggaacuuguacaguaguaaugacugauggaagugcuucaggaagagcugauacuaaaauacuauucauugaggaggggaaaaucguucauacuagcacauugucaggaagugcucagcaugucgaggagugcucuugcuauccucgauauccuggugucagaugugucugcagagacaacuggaaaggcuccaauaggcccaucguagauauaaacauaaaggaucauagcauugucuccaguuauguguguucaggacuuguuggagacacacccagaaaaaacgacagcuccagcaguagccauuguuuggauccuaacaaugaagaagguggucauggagugaaaggcugggccuuugaugauggaaaugacguguggaugggaagaacaaucaacgagacgucacgcuuaggguaugaaaccuucaaagucauugaaggcugguccaacccuaaguccaaauugcagauaaauaggcaagucauaguugacagaggugauagguccgguuauucugguauuuucucuguugaaggcaaaagcugcaucaaucggugcuuuuauguggaguugauuaggggaagaaaagaggaaacugaagucuuguggaccucaaacaguauuguuguguuuuguggcaccucagguacauauggaacaggcucauggccugauggggcggaccucaaucucaugccuauauaa

SEQ ID NO: 54964 - RNA, 1410 nt, Artificial Sequence
  derived and/or modified CDS sequence (wt) from neuraminidase__InfluenzaA__AFN19420
augaauccaaaucaaaagauaauaacgauuggcucuguuucucucaccauuuccacaauaugcuucuucaugcaaauugccaucuugauaacuacuguaacauugcauuucaagcaauaugaauucaacucccccccaaacaaccaagugaugcugugugaaccaacaauaauagaaagaaacaugacagagauaguguaucugaccaacaccaccauagagaaggaaauaugccccaaaccagcagaauacagaaauuggucaaaaccgcaaugugacauuacaggauuugcaccuuuuucuaaggacaauucgauuaggcuuuccgcugguggggacaucugggugacaagagaaccuuaugugucaugcgauccugacaaguguuaucaauuugcccuuggacagggaacaacacuaaacaacgugcauucaaauaacacaguacgugauaggaccccuuaucggacucuauugaugaaugaguuagguguuccuuuucaucuggggaccaagcaagugugcauagcaugguccagcucaaguugucacgauggaaaagcauggcugcauguuuguauaacgggggaugauaaaaaugcaacugcuagcuucaucuacaaugggaggcuuguagauaguguuguuucaugguccaaagaaauucucaggacccaggaaucagaaugcguuuguaucaauggaacuuguacaguaguaaugacugauggaagugcuucaggaaaagcugauacuaaaauacuauucauugaggaggggaaaaucguucauacuagcacauugucaggaagugcucagcaugucgaagagugcucuugcuauccucgauauccuggugucagaugugucugcagagacaacuggaaaggcuccaauaggcccaucguagauauaaacauaaaggaucauagcauuguuuccaguuauguguguucaggacuuguuggagacacacccagaaaaaacgacagcuccagcaguagccauuguuuggauccuaacaaugaagaagguggucauggagugaaaggcugggccuuugaugauggaaaugacguguggaugggaagaacaaucaacgagacgucacgcuuaggguaugaaaccuucaaagucauugaaggcugguccaacccuaaguccaaauugcagauaaauaggcaagucauaguugacagaggugauagguccgguuauucugguauuuucucuguugaaggcaaaagcugcaucaaucggugcuuuuauguggaguugauuaggggaagaaaagaggaaacugaagucuuguggaccucaaacaguauuguuguguuuuguggcaccucagguacauauggaacaggcucauggccugauggggcggaccucaaucucaugccuauauaa

SEQ ID NO: 54965 - RNA, 1410 nt, Artificial Sequence
  derived and/or modified CDS sequence (wt) from neuraminidase__InfluenzaA__AFN19422
augaauccaaaucaaaagauaauaacgauugguucuguuucucucaccauuuccacaauaugcuucuucaugcaaauugccaucuugauaacuacuguaacauugcauuucaagcaauaugaauucaacucccccccaaacaaccaagugaugcugugugaaccaacaauaauagaaagaaacauaacagagauaguguaucugaccaacaccaccauagagaaggaaauaugccccaaaccagcagaauacagaaauuggucaaaaccgcaauguggcauuacaggauuugcaccuuucucuaaggacaauucgauuaggcuuuccgcugguggggacaucugggugacaagagaaccuuaugugucaugcgauccugacaaguguuaucaauuugcccuuggacagggaacaacacuaaacaacgugcauucaaauaacacaguacgugauaggaccccuuaucggacucuauugaugaaugaguuggguguuccuuuucaucuggggaccaagcaagugugcauagcaugguccagcucaaguugucacgauggaaaagcauggcugcauguuuguauaacggggaaugauaaaaaugcaacugcuagcuucauuuacaaugggaggcuuguagauaguguuguuucaugguccaaagaaguucucaggacccaggagucagaaugcguuuguaucaauggaacuuguacaguaguaaugacugauggaagugcuucaggaaaagcugauacuaaaauacuauucauugaggaggggaaaaucguucauacuagcacauugucaggaagugcucagcaugucgaagagugcucuugcuauccucgauauccuggugucagaugugucugcagagacaacuggaaaggcuccaauaggcccaucguagauauaaacauaaaggaucauagcauuguuuccaguuauguguguucaggacuuguuggagacacacccagaaaaaacgacagcuccagcaguagccauuguuuggauccuaacaaugaagaagguggucauggagugaaaggcugggccuuugaugauggaaaugacguguggaugggaagaacaaucaacgagacgucacgcuuaggguaugaaaccuucaaagucauugaaggcugguccaacccuaaguccaaauugcagauaaauaggcaagucauaguugacagaggugauagguccgguuauucugguauuuucucuguugaaggcaaaagcugcaucaaucggugcuuuuauguggaguugauuaggggaagaaaagaggaaacugaagucuuguggaccucaaacaguauuguuguguuuuguggcaccucagguacauauggaacaggcucauggccugauggggcggaccucaaucucaugccuauauaa

SEQ ID NO: 54966 - RNA, 1410 nt, Artificial Sequence
  derived and/or modified CDS sequence (wt) from neuraminidase__InfluenzaA__AFN19426
augaauccaaaucaaaagauaauaacgauuggcucuguuucucucaccauuuccacaauaugcuucuucaugcaaauugccaucuugauaacuacuguaacauugcauuucaagcaauaugaauucaacucccccccaaacaaccaagugaugcugugugaaccaacaauaauagaaagaaacauaacagagauaguguaucugaccaacaccaccauagagaaggaaauaugccccaaaccagcagaauacagaaauuggucaaaaccgcaaugugacauuacaggauuugcaccuuuuucuaaggacaauucgauuaggcuuuccgcugguggggacaucugggugacaagagaaccuuaugugucaugcgauccugacaaguguuaucaauuugcccuuggacagggaacaacacuaaacaaugugcauucaaauaacacaguacgugauaggaccccuuaucggacucuauugaugaaugaguuagguguuccuuuucaucuggggaccaagcaagugugcauagcaugguccagcucaaguugucacgauggaaaagcauggcugcauguuuguauaacgggggaugaugaaaaugcaacugcuagcuucauuuacaaugggaggcuuguagauaguguuguuucaugguccaaagaaauucucaggacccaggagucagaaugcguuuguaucaauggaacuuguacaguaguaaugacugauggaagugcuucaggaaaagcugauacuaaaauacuauucauugaggaggggaaaaucguucauacuagcacauugucaggaagugcucagcaugucgaggagugcucuugcuauccucgauauccuggugucagaugugucugcagagacaacuggaaaggcuccaauaggcccaucguagauauaaacauaaaggaucauagcauugucuccaguuauguguguucaggacuuguuggagacacgcccagaaaaaacgacagcuccagcaguagccauuguuuggauccuaacaaugaagaagguggucauggagugaaaggcugggccuuugaugauggaaaugacguuuggaugggaagaacaaucaacgagacgucacgcuuaggguaugaaaccuucaaagucauugaaggcugguccaacccuaaguccaaauugcagauaaauaggcaagucauaguugacagaggugauagguccgguuauucugguauuuucucuguugaaggcaaaagcugcaucaaucggugcuuuuauguggaguugauuaggggaagaaaagaggaaacugaagucuuguggaccucaaacaguauuguuguguuuuguggcaccucagguacauauggaacaggcucauggccugauggggcggaccucaaucucaugccuauauaa

SEQ ID NO: 54967 - RNA, 1410 nt, Artificial Sequence; identical to SEQ ID NO: 54941
  derived and/or modified CDS sequence (wt) from neuraminidase__InfluenzaA__AFN19428

SEQ ID NO: 54968 - RNA, 1410 nt, Artificial Sequence
  derived and/or modified CDS sequence (wt) from neuraminidase__InfluenzaA__AFN19430
augaauccaaaucaaaagauaauaacgauuggcucuguuucucucaccauuuccacaauaugcuucuucaugcaaauugccaucuugauaauuacuguaacauugcauuucaagcaauaugaauucaacucccccccaaacaaccaagugaugcugugugaaccaacaauaauagaaagaaacaugacagagauaguguaucugaccaacaccaccauagagaaggaaauaugccccaaaccagcagaauacagaaauuggucaaaaccgcaaugugacauuacaggauuugcaccuuuuucuaaggacaauucgauuaggcuuuccgcugguggggacaucugggugacaagagaaccuuaugugucaugcgauccugacaaguguuaucaauuugcccuuggacagggaacaacacuaaacaacgugcauucaaauaacacaguacgugauaggaccccuuaucggacucuauugaugaaugaguuagguguuccuuuucaucuggggaccaagcaagugugcauagcaugguccagcucaaguugucacgauggaaaagcauggcugcauguuuguauaacgggggaugauaaaaaugcaacugcuagcuucaucuacaaugggaggcuuguagauaguguuguuucaugguccaaagaaauucucaggacccaggaaucagaaugcguuuguaucaauggaacuuguacaguaguaaugacugauggaagugcuucaggaaaagcugauacuaaaauacuauucauugaggaggggaaaaucguucauacuagcacauugucaggaagugcucaacaugucgaggagugcucuugcuauccucgauauccuggugucagaugugucugcagagacaacuggaaaggcuccaauaggcccaucguagauauaaacauaaaagaucauagcauuguuuccaguuauguguguucaggacuuguuggagacacacccagaaaaaacgacagcucaagcaguagccauuguuuggauccuaacaaugaagaagguggucauggagugaaaggcugggccuuugaugauggaaaugacguguggaugggaagaacaaucaacgagacgucacguuuaggguaugaaaccuucaaagucauugaaggcugguccaacccuaaguccaaauugcagauaaauaggcaagucauaguugacagaagugauagguccgguuauucugguauuuucucuguugaaggcaaaaguugcaucaaucggugcuuuuauguggaguugauuaggggaagaaaagaggaaacugaagucuuguggaccucaaacaguauuguuguguuuuguggcaccucagguacauauggaacaggcucauggccugauggggcggaccucaaucucaugccuauauaa

SEQ ID NO: 54969 - RNA, 1410 nt, Artificial Sequence
  derived and/or modified CDS sequence (wt) from neuraminidase__InfluenzaA__AFN19432
augaauccaaaucaaaagauaauaacgauuggcucuguuucucucaccauuuccacaauaugcuucuucaugcaaauugccaucuugauaacuacuguaacauugcauuucaagcaauaugaauucaacucccccccaaacaaccaagugaugcugugugaaccaacaauaauagaaagaaacauaacagagauaguguaucugaccaacaccaccauagagaaggaaauaugccccaaaccagcagaauacagaaauuggucaaaaccgcaaugugacauuacaggauuugcaccuuuuucuaaggacaauucgauuaggcuuuccgcugguggggacaucugggugacaagagaaccuuaugugucaugcgauccugacaaguguuaucaauuugcccuuggacagggaacaacacuaaacaaugugcauucaaauaacacaguacgugauaggaccccucaucggacuuuauugaugaaugaguuagguguuccuuuucaucuggggaccaagcaagugugcauagcaugguccagcucaaguugucacgauggaaaagcauggcugcauguuuguauaacgggggaugauaaaaaugcaacugcuagcuucauuuacaaugggaggcuuguagauaguguuguuucaugguccaaagaaauucucaggacccaggagucagaaugcguuuguaucaauggaacuuguacaguaguaaugacugauggaagugcuucaggaaaagcugauacuaaaauacuauucauugaggaggggaaaaucguucauacuagcacauugucaggaagugcucagcaugucgaggagugcucuugcuauccucguuauccuggugucagaugugucugcagagacaacuggaaaggcuccaauaggcccaucguagauauaaacauaaaggaucauagcauugucuccaguuauguguguucaggacuuguuggagacacacccagaaaaaacgacagcuccagcaguagccauuguuuggauccuaacaaugaagaagguggucauggagugaaaggaugggccuuugaugauggaaaugacguguggaugggaagaacaaucaacgagacgucacgcuuaggguaugaaaccuucaaagucauugaaggcugguccaacccuaaguccaaauugcagauaaauaggcaagucauaguugacagaggugauagguccgguuauucugguauuuucucuguugaaggcaaaagcugcaucaaucggugcuuuuauguggaguugauuaggggaagaaaagaggaaacugaagucuuguggaccucaaacaguauuguuguguuuuguggcaccucagguacauauggaacaggcucauggccugauggggcggaccucaaucucaugccuauauaa

SEQ ID NO: 54970 - RNA, 1410 nt, Artificial Sequence
  derived and/or modified CDS sequence (wt) from neuraminidase__InfluenzaA__AFN19434
augaauccaaaucaaaagauaauaacgauuggcucuguuucucucaccauuuccacaauaugcuucuucaugcaaauugccaucuugauaacuacuguaacauugcauuucaagcaauaugaauucaacucccccccaaacaaccaagugaugcugugugaaccaacaauaauagaaagaaacaugacagagauaguguaucugaccaacaccaccauagagaaggaaauaugccccaaaccagcagaauacagaaauuggucaaaaccgcaaugugacauuacaggauuugcaccuuuuucuaaggacaauucgauuaggcuuuccgcugguggggacaucugggugacaagagaaccuuaugugucaugcgauccugacaaguguuaucaauuugcccuuggacagggaacaacacuaaacaacgugcauucaaauaacacaguacgugauaggaccccuuaucggacucuauugaugaaugaguuagguguuccuuuucaucuggggaccaagcaagugugcauagcaugguccagcucaaguugucacgauggaaaagcauggcugcauguuuguauaacgggggaugauaaaaaugcaacugcuagcuucaucuacaaugggaggcuuguagauaguguuguuucaugguccaaagaaauucucaggacccaggaaucagaaugcguuuguaucaauggaacuuguacaguaguaaugacugauggaagugcuucaggaaaagcugauacuaaaauacuauucauugaggaggggaaaaucguucauacuagcacauugucaggaagugcucagcaugucgaggagugcucuugcuauccucgauauccuggugucagaugugucugcagagacaacuggaaaggcuccaauaggcccaucguagauauaaacauaaaagaucauagcauuguuuccaguuauguguguucaggacuuguuggagacacacccagaaaaaacgacagcucaagcaguagccauuguuuggauccuaacaaugaagaagguggucauggagugaaaggcugggccuuugaugauggaaaugacguguggaugggaagaacaaucaacgagacgucacguuuaggguaugaaaccuucaaagucauugaaggcugguccaacccuaaguccaaauugcagauaaauaggcaagucauaguugacagaagugauagguccgguuauucugguauuuucucuguugaaggcaaaaguugcaucaaucggugcuuuuauguggaguugauuaggggaagaaaagaggaaacugaagucuuguggaccucaaacaguauuguuguguuuuguggcaccucagguacauauggaacaggcucauggccugauggggcggaccucaaucucaugccuauauaa

SEQ ID NO: 54971 - RNA, 1410 nt, Artificial Sequence
  derived and/or modified CDS sequence (wt) from neuraminidase__InfluenzaA__AFN19436
augaauccaaaucaaaagauaauaacgauuggcucuguuucucucaccauuuccacaauaugcuucuucaugcaaauugccaucuugauaacuacuguaacauugcauuucaagcaauaugaauucaacucccccccaaacaaccaagugaugcugugugaaccaacaauaauagaaagaaacauaacagagauaguguaucugaccaacaccaccauagagaaggaaauaugccccaaaccagcagaauacagaaauuggucaaaaccgcaauguggcauuacaggauuugcaccuuucucuaaggacaauucgauuaggcuuuccgcugguggggacaucugggugacaagagaaccuuaugugucaugcgauccugacaaguguuaucaauuugcccuuggacagggaacaacacuaaacaacgugcauucaaauaacacagugcgugauaggaccccuuaucggacucuauugaugaaugaguuggguguuccuuuucaucuggggaccaagcaagugugcauagcaugguccagcucaaguugucacgauggaaaagcauggcugcauguuuguauaacgggggaugauaaaaaugcaacugcuagcuucauuuacaaugggaggcuuguagauaguguuguuucaugguccaaagaaauucucaggacccaggagucagaaugcguuuguaucaauggaacuuguacaguaguaaugacugauggaagugcuucaggaaaagcugauacuaaaauacuauucauugaggaggggaaaaucguucauacuagcacauugucaggaagugcucagcaugucgaagagugcucuugcuauccucgauauccuggugucagaugugucugcagagacaacuggaaaggcuccaauaggcccaucguagauauaaacauaaaggaucauagcauuguuuccaguuauguguguucaggacuuguuggagacacacccagaaaaaacgacagcuccagcaguagccauuguuuggauccuaacaaugaagaagguggucauggagugaaaggcugggccuuugaugauggaaaugacguguggaugggaagaacaaucaacgagacgucacguuuaggguaugaaaccuucaaagucauugaaggcugguccaacccuaaguccaaauugcagauaaauaggcaagucauaguugacagaggugauagguccgguuauucugguauuuucucuguugaaggcaaaagcugcaucaaucggugcuuuuauguggaguugauuaggggaagaaaagaggaaacugaagucuuguggaccucaaacaguauuguuguguuuuguggcaccucagguacauauggaacaggcucauggccugauggggcggaccucaaucucaugccuauauaa

SEQ ID NO: 54972 - RNA, 1410 nt, Artificial Sequence
  derived and/or modified CDS sequence (wt) from neuraminidase__InfluenzaA__AFN19438
augaauccaaaucaaaagauaauaacgauuggcucuguuucucucaccauuuccacaauaugcuucuucaugcaaauugccaucuugauaacuacuguaacauugcauuucaagcaauaugaauucaacucccccccaaacaaccaagugaugcugugugaaccaacaauaauagaaagaaacaugacagagauaguguaucugaccaacaccaccauagagaaggaaauaugccccaaaccagcagaauacagaaauuggucaaaaccgcaaugugacauuacaggauuugcaccuuuuucuaaggacaauucgauuaggcuuuccgcugguggggacaucugggugacaagagaaccuuaugugucaugcgauccugacaaguguuaucaauuugcccuuggacagggaacaacacuaaacaacgugcauucaaauaacacaguacgugauaggaccccuuaucggacucuauugaugaaugaguuagguguuccuuuucaucuggggaccaagcaagugugcauagcaugguccagcucaaguugucacgauggaaaagcauggcugcauguuuguauaacgggggaugauaaaaaugcaacugcuagcuucaucuacaaugggaggcuuguagauaguguuguuucaugguccaaagaaauucucaggacccaggaaucagaaugcguuuguaucaauggaacuuguacaguaguaaugacugauggaagugcuucaggaaaagcugauacuaaaauacuauucauugaggaggggaaaaucguucauacuagcacauugucaggaagugcucagcaugucgaggagugcucuugcuauccucgauauccuggugucagaugugucugcagagacaacuggaaaggcuccaauaggcccaucguagauauaaacauaaaagaucauagcauuguuuccaguuauguguguucaggacuuguuggagacacacccagaaaaaacgacagcucaagcaguagccauuguuuggauccuaacaaugaagaagguggucauggagugaaaggcugggccuuugaugauggaaaugacguguggaugggaagaacaaucaacgagacgucacguuuaggguaugaaaccuucaaagucauugaaggcugguccaacccuaaguccaaauugcagauaaauaggcaagucauaguugacagaagugauagguccgguuauucugguauuuucucuguugaaggcaaaaguugcaucaaucggugcuuuuauguggaguugauuaggggaagaaaagaggaaacugaagucuuguggaccucaaacaguauuguuguguuuuguggcaccucagguacauauggaacaggcucauggccugauggggcggaccucaaucucaugucuauauaa

SEQ ID NO: 54973 - RNA, 1410 nt, Artificial Sequence
  derived and/or modified CDS sequence (wt) from neuraminidase__InfluenzaA__AFN19442
augaauccaaaucaaaagauaauaacgauuggcucuguuucucuaaccauuuccacaauaugcuucuucaugcaaauugccaucuugauaacuacuguaacacugcacuucaagcaauaugaauucaacucccccccaaacaaccaagugaugcugugugaaccaacaauaauagaaagaaacauaacagagauaguguaucugaccaacaccaucauagagaaggaaauaugccccaaaccaacagaauacagaaauuggucaaaaccgcaaugugacauuacaggauuugcaccuuuuucuaaggacaauucgauuaggcuuuccgcugguggggacaucugggugacaagagaaccuuaugugucaugcgauccugacaaguguuaucaauuugcccuuggacagggaacaacacuaaacaaugugcauucaaauaacacaguacgugauaggaccccuuaucggacucuauugaugaaugaguuagguguuccuuuucaucuggggaccaagcaagugugcauagcaugguccagcucaaguugucacgauggaaaagcauggcugcauguuuguauaacgggggaugauaaaaaugcaacugcuagcuucauuuacaaugggaggcuuguagauaguguuguuucaugguccaaagaaauucucaggacccaggagucagaaugcguuuguaucaauggaacuuguacaguaguaaugacugauggaagugcuucaggaaaagcugauacuaaaauacuauucauugaggaggggaaaaucguucauacuagcacauugucaggaagugcucagcaugucgaggagugcucuugcuauccucgauauccuggugucagaugugucugcagagacaacuggaaaggcuccaauaggcccaucguagauauaaacauaaaggaucauagcauugucuccaguuauguuuguucaggacuuguuggagacacacccagaaaaaacgacagcuccagcaguagccauuguuuggauccuaacaaugaagaagguggucauggagugaaaggcugggccuuugaugauggaaaugacguguggaugggaagaacaaucaacgagacgucacgcuuaggguaugaaaccuucaaagucauugaaggcugguccaacccuaaguccaaauugcagauaaauaggcaagucauaguugacagaggugauagguccgguuauucugguauuuucucuguugaaggcaaaagcugcaucaaucggugcuuuuauguggaguugauuaggggaagaaaagaggaaacugaagucuuguggaccucaaacaguauuguuguguuuuguggcaccucagguacauauggaacaggcucauggccugauggggcggaccucaaucucaugcauauauaa

SEQ ID NO: 54974 - RNA, 1410 nt, Artificial Sequence
  derived and/or modified CDS sequence (wt) from neuraminidase__InfluenzaA__AFN19446
augaauccaaaucaaaagauaauaacgauuggcucuguuucucucaccauuuccacaauaugcuucuucaugcaaauugccaucuugauaacuacuguaacauugcauuucaagcaauaugaauucaacucccccccaaacaaccaagugaugcugugugaaccaacaauaauagaaagaaacauaacagagauaguguaucugaccaacaccaccauagagaaggaaauaugccccaaaccagcagaauacagaaauuggucaaaaccgcaauguggcauuacaggauuugcaccuuucucuaaggacaauucgauuaggcuuuccgcugguggggacaucugggugacaagagaaccuuaugugucaugcgauccugacaaguguuaucaauuugcccuuggacagggaacaacacuaaacaacgugcauucaaauaacacaguacgugauaggaccccuuaucggacucuauugaugaaugaguuggguguuccuuuucaucuggggaccaagcaagugugcauagcaugguccagcucaaguugucacgauggaaaagcauggcugcauguuuguauaacgggggaugauaaaaaugcaacugcuagcuucauuuacaaugggaggcuuguagauaguguuguuucaugguccaaagaaauucucaggacccaggagucagaaugcguuuguaucaauggaacuuguacaguaguaaugacugauggaagugcuucaggaaaagcugauacuaaaauacuauucauugaggaggggaaaaucguucauacuagcacauugucaggaagugcucagcaugucgaagagugcucuugcuauccucgauauccuggugucagaugugucugcagagacaacuggaaaggcuccaauaggcccaucguagauauaaacauaaaggaucauagcauuguuuccaguuauguguguucaggacuuguuggagacacacccagaaaaaacgacagcuccagcaguagccauuguuuggauccuaacaaugaagaagguggucauggagugaaaggcugggccuuugaugauggaaaugacguguggaugggaagaacaaucaacgagacgucacgcuuaggguaugaaaccuucaaagucauugaaggcugguccaacccuaaguccaaauugcagauaaauaggcaagucauaguugacagaggugauagguccgguuauucugguauuuucucuguugaaggcaaaagcugcaucaaucggugcuuuuauguggaguugauuaggggaagaaaagaggaaacugaagucuuguggaccucaaacaguauuguuguguuuuguggcaccucagguacauauggaacaggcucauggccugauggggcggaccucaaucucaugccuauauaa

SEQ ID NO: 54975 - RNA, 1410 nt, Artificial Sequence; identical to SEQ ID NO: 54974
  derived and/or modified CDS sequence (wt) from neuraminidase__InfluenzaA__AFN19448

SEQ ID NO: 54976 - RNA, 1410 nt, Artificial Sequence; identical to SEQ ID NO: 54937
  derived and/or modified CDS sequence (wt) from neuraminidase__InfluenzaA__AFN19458

SEQ ID NO: 54977 - RNA, 1410 nt, Artificial Sequence
  derived and/or modified CDS sequence (wt) from neuraminidase__InfluenzaA__AFN19460
augaauccaaaucaaaagauaauaacgauuggcucuguuucucucaccauuuccacaauaugcuucuucaugcaaauugccaucuugauaacuacuguaacauugcauuucaagcaauaugaauucaacucccccccaaacaaccaagugaugcugugugaaccaacaauaauagaaagaaacauaacagagauaguguaucugaccaacaccaccauagagaaggaaauaugccccaaaccagcagaauacagaaauuggucaaaaccgcaauguggcauuacaggauuugcaccuuuuucuaaggacaauucgauuaggcuuuccgcugguggggacaucugggugacaagagaaccuuaugugucaugcgauccugacaaguguuaucaauuugcccuuggacagggaacaacacuaaacaacaugcauucaaauaacacaguacgugauaggaccccuuaucggacucuauugaugaaugaguuggguguuccuuuucaucuggggaccaagcaagugugcauagcaugguccagcucaaguugucacgauggaaaagcauggcugcauguuuguauaacgggggaugauaaaaaugcaacugcuagcuucauuuacaaugggaggcuuguagauaguguuguuucaugguccaaugaaauucucaggacccaggagucagaauguguuuguaucaauggaacuuguacaguaguaaugacugauggaagugcuucaggaaaagcugauacuaaaauacuauucauugaggaggggaaaaucguucauacuagcacauugucaggaagugcucagcaugucgaagagugcucuugcuauccucgauauccuggugucagaugugucugcagagacaacuggaaaggcuccaauaggcccaucguagauauaaacauaaaggaucauagcauuguuuccaguuauguguguucaggacuuguuggagacacacccagaaaaaacgacagcuccagcaguagccauuguuuggauccuaauaaugaagaagguggucauggagugaaaggcugggccuuugaugauggaaaugacguguggaugggaagaacaaucaacgagacgucacgcuuaggguaugaaaccuucaaagucauugaaggcugguccaacccuaaguccaaauugcagauaaauaggcaagucauaguugacagaggugauagguccgguuauucugguauuuucucuguugagggcaaaagcugcaucaaucggugcuuuuauguggaguugauuaggggaagaaaagaggaaaaugaagucuuguggaccucaaacaguauuguuguguuuuguggcaccucagguacauauggaacaggcucauggccugauggggcggaccucaaucucaugccuauauaa

SEQ ID NO: 54978 - RNA, 1410 nt, Artificial Sequence
  derived and/or modified CDS sequence (wt) from neuraminidase__InfluenzaA__AFN19462
augaauccaaaucaaaagauaauaacgauuggcucuguuucucucaccauuuccacaauaugcuucuucaugcaaauugccaucuugauaacuacuguaacauugcauuucaagcaauaugaauucaacucccccccaaacaaccaagugaugcugugugaaccaacaauaauagaaagaaacauaacagagauaguguaucugaccaacaccaccauagagaaggaaauaugccccaaaccagcagaauacagaaauuggucaaaaccgcaauguggcauuacaggauuugcaccuuuuucuaaggacaauucgauuaggcuuuccgcugguggggacaucugggugacaagagaaccuuaugugucaugcgauccugacaaguguuaucaauuugcccuuggacagggaacaacacuaaacaacgugcauucaaauaacacaguacgugauaggaccccuuaucggacucuauugaugaaugaguuggguguuccuuuucaucuggggaccaagcaaguguguauagcaugguccagcucaaguugucacgauggaaaagcauggcugcauguuuguauaacgggggaugauaaaaaugcaacugcuagcuucauuuacaaugggaggcuuguagauaguguuguuucaugguccaaagaaauucucaggacccaggagucagaaugcguuuguaucaauggaacuuguacaguaguaaugacugauggaagugcuucaggaaaagcugauacuaaaauacuauucauugaggaggggaaaaucguucauacuagcacauugucaggaagugcucagcaugucgaagagugcucuugcuauccucgauauccuggugucagaugugucugcagagacaacuggaaaggcuccaauaggcccaucguagauauaaacauaaaggaucauagcauuguuuccaguuauguguguucaggacuuguuggagacacacccagaaaaaacgacagcuccagcaguagccauuguuuggauccuaacaaugaagaagguggucauggagugaaaggcugggccuuugaugauggaaaugacguguggaugggaagaacaaucaacgagacgucacgcuuaggguaugaaaccuucaaagucauugaaggcugguccaacccuaaguccaaauugcagauaaauaggcaagucauaguugacagaggugauagguccgguuauucugguauuuucucuguugaaggcaaaagcugcauaaaucggugcuuuuauguggaguugauuaggggaagaaaagaggaaacugaagucuuguggaccucaaacaguauuguuguauuuuguggcaccucagguacauauggaacaggcucauggccugauggggcggaccucaaucucaugccuauauaa

SEQ ID NO: 54979 - RNA, 1410 nt, Artificial Sequence
  derived and/or modified CDS sequence (wt) from neuraminidase__InfluenzaA__AFN19466
augaauccaaaucaaaagauaauaacgauuggcucuguuucucucaccauuuccacaauaugcuucuucaugcaaauugccaucuugauaacuacuguaacauugcauuucaagcaauaugaauucaacucccccccaaacaaccaagugaugcugugugaaccaacaauaauagaaagaaacauaacagagauaguguaucugaccaacaccaccauagagaaggaaauaugccccaaaccagcagaauacagaaauuggucaaaaccgcaaugugacauugcaggauuugcaccuuuuucuaaggacaauucgauuaggcuuuccgcugguggggacaucugggugacaagagaaccuuaugugucaugcgauccugacaaguguuaucaauuugcccuuggacagggaacaacacuaaacaaugugcauucaaauaacacaguacgugauaggaccccuuaucggacuuuauugaugaaugaguuagguguuccuuuucaucuggggaccaagcaagugugcauagcaugguccagcucaaguugucacgauggaaaagcauggcugcauguuuguauaacgggggaugauaaaaaugcaacugcuagcuucauuuacaaugggaggcuuguagauaguguuguuucaugguccaaagaaauucucaggacccaggagucagaaugcguuuguaucaauggaacuuguacaguaguaaugacugauggaagugcuucaggaaaagcugauacuaaaauacuauucauugaggaggggaaaaucguucauacuagcacauugucaggaagugcucagcaugucgaggagugcucuugcuauccucgauauccuggugucagaugugucugcagagacaacuggaaaggcuccaauaggcccaucguagauauaaacauaaaggaucauagcauugucuccaguuauguguguucaggacuuguuggagacacacccagaaaaaacgacagcuccagcaguagccauuguuuggauccuaacaaugaagaagguggucauggagugaaaggcugggccuuugaugauggaaaugacguguggaugggaagaacaaucaacgagacgucacgcuuaggguaugaaaccuucaaagucauugaaggcugguccaacccuaaauccaaauugcagauaaauaggcaagucauaguugacagaggugauagguccgguuauucugguauuuucucuguugaaggcaaaagcugcaucaaucggugcuuuuauguggaguugauuaggggaagaaaagaggaaacugaagucuuguggaccucaaacaguauuguuguguuuuguggcaccucagguacauauggaacaggcucauggccugauggggcggaccucaaucucaugccuauauaa

SEQ ID NO: 54980 - RNA, 1410 nt, Artificial Sequence
  derived and/or modified CDS sequence (wt) from neuraminidase__InfluenzaA__AFN19468
augaauccaaaucaaaagauaauaacgauuggcucuguuucucucaccauuuccacaauaugcuucuucaugcaaauugccaucuugauaacuacuguaacauugcauuucaagcaauaugaauucaacucccccccaaacaaccaagugaugcugugugaaccaacaauaauagaaagaaacauaacagagauaguguaucugaccaacaccaccauagagaaggaaauaugccccaaaccagcagaauacagaaauuggucaaaaccgcaauguggcauuacaggauuugcaccuuucucuaaggacaauucgauuaggcuuuccgcugguggggacaucugggugacaagagaaccuuaugugucaugcgauccugacaaguguuaucaauuugcccuuggacagggaacaacacuaaacaacgugcauucaaauaauacaguacgugauaggaccccuuaucggacucuauugaugaaugaguuggguguuccuuuucaucuggggaccaagcaagugugcauagcaugguccagcucaaguugucacgauggaaaagcauggcugcauguuuguauaacgggggaugauaaaaaugcaacugcuagcuucauuuacaaugggaggcuuguagauaguguuguuucaugguccaaagaaauucucaggacccaggagucagaaugcguuuguaucaauggaacuuguacaguaguaaugacugauggaagugcuucaggaaaagcugauacuaaaauacuauucauugaggaggggaaaaucguucauacuagcacauugucaggaagugcucagcaugucgaagagugcucuugcuauccucgauauccuggugucagaugugucugcagagacaacuggaaaggcuccaauaggcccaucguagauauaaacauaaaggaucauagcauuguuuccaguuauguguguucaggacuuguuggagacacacccagaaaaaacgacagcuccagcaguagccauuguuuggauccuaacaaugaagaagguggucauggagugaaaggcugggccuuugaugauggaaaugacguguggaugggaagaacaaucaacgagacgucacgcuuaggguaugaaaccuucaaagucauugaaggcugguccaacccuaaguccaaauugcagauaaauaggcaagucauaguugacagaggugauagguccgguuauucugguauuuucucuguugaagguaaaagcugcaucaaucggugcuuuuauguggaguugauuaggggaagaaaagaggaaacugaagucuuguggaccucaaacaguauuguuguguuuuguggcaccucagguacauauggaacaggcucauggccugauggggcggaccucaaucucaugccuauauaa

SEQ ID NO: 54981 - RNA, 1410 nt, Artificial Sequence
  derived and/or modified CDS sequence (wt) from neuraminidase__InfluenzaA__AFN19470
augaauccaaaucaaaagauaauaacgauuggcucuguuucucucaccauuuccacaauaugcuucuucaugcaaauugccaucuugauaacuaccguaacauugcauuucaagcaauaugaauucaacucccccccaaacaaccaagugaugcugugugaaccaacaauaauagaaagaaacaugacagagauaguguaucugaccaacaccaccauagagaaggaaauaugccccaaaccagcagaauacagaaauuggucaaaaccgcaaugugacauuacaggauuugcaccuuuuucuaaggacaauucgauuaggcuuuccgcugguggggacaucugggugacaagagaaccuuaugugucaugcgauccugacaaguguuaucaauuugcccuuggacagggaacaacacuaaacaacgugcauucaaauaacacaguacgugauaggaccccuuaucggacucuauugaugaaugaguuagguguuccuuuucaucuggggaccaagcaagugugcauagcaugguccagcucaaguugucacgauggaaaagcauggcugcauguuuguauaacgggggaugauaaaaaugcaacugcuagcuucaucuacaaugggaggcuuguagauaguguuguuucaugguccaaagaaauucucaggacccaggaaucagaaugcguuuguaucaauggaacuuguacaguaguaaugacugauggaagugcuucaggaaaagcugauacuaaaauacuauucauugaggaggggaaaaucguucauacuagcacauugucaggaagugcucagcaugucgaggagugcucuugcuauccucgauauccuggugucagaugugucugcagagacaacuggaaaggcuccaauaggcccaucguagauauaaacauaaaagaucauagcauuguuuccaguuauguguguucaggacuuguuggagacacacccagaaaaaacgacagcucaagcaguagccauuguuuggauccuaacaaugaagaagguggucauggagugaaaggcugggccuuugaugauggaaaugacguguggaugggaagaacaaucaacgagacgucacguuuaggguaugaaaccuucaaagucauugaaggcugguccaacccuaaguccaaauugcagauaaauaggcaagucauaguuaacaaaagugauagguccgguuauucugguauuuucucuguugaaggcaaaaguugcaucaaucggugcuuuuauguggaguugauuaggggaagaaaagaggaaacugaagucuuguggaccucaaacaguauuguuguguuuuguggcaccucagguacauauggaacaggcucauggccugauggggcggaccucaaucucaugccuauauaa

SEQ ID NO: 54982 - RNA, 1410 nt, Artificial Sequence
  derived and/or modified CDS sequence (wt) from neuraminidase__InfluenzaA__AFN19472
augaauccaaaucaaaagauaauaacgauuggcucuguuucucucaccauuuccacaauaugcuucuucaugcaaauugccaucuugauaacuacuguaacauugcauuucaagcaauaugaauucaacucccccccaaacaaccaagugaugcugugugaaccaacaauaauagaaagaaacauaacagagauaguguaucugaccaacaccaccauagagaaggaaauaugccccaaaccagcagaauacagaaauuggucaaaaccgcaaugugacauuacaggauuugcaccuuuuucuaaggacaauucgauuaggcuuuccgcugguggggacaucuggguaacaagagaaccuuaugugucaugcgauccugacaaguguuaucaauuugcccuuggacagggaacaacacuaaacaaugugcauucaaauaacacaguacgugauaggaccccuuaucggacuuuauugaugaaugaguuagguguuccuuuucaucuggggaccaagcaagugugcauagcaugguccagcucaaguugucacgauggaaaagcauggcugcauguuuguauaacgggggaugauaaaaaugcaacugcuagcuucauuuacaaugggaggcuuguagauaguguuguuucaugguccaaagaaauucucaggacccaggagucagaaugcguuuguaucaauggaacuuguacaguaguaaugacugauggaagugcuucaggaaaagcugauacuaaaauacuauucauugaggaggggaaaaucguucauacuagcacauugucaggaagugcucagcaugucgaggagugcucuugcuauccucgauauccuggugucagaugugucugcagagacaacuggaaaggcuccaauaggcccaucguagauauaaacauaaaggaucauagcauugucuccaguuauguguguucaggacuuguuggagacacacccagaaaaaacgacagcuccagcaguagccauuguuuggauccuaacaaugaagaagguggucauggagugaaaggcugggccuuugaugauggaaaugacguguggaugggaagaacaaucaacgagacgucacgcuuaggguaugaaaccuucaaagucauugaaggcugguccaacccuaaguccaaauugcagauaaauaggcaagucauaguugacagaggugauagguccgguuauucugguauuuucucuguugaaggcaaaagcugcaucaaucggugcuuuuauguggaguugauuaggggaagaaaagaggaaacugaagucuuguggaccucaaacaguauuguuguguuuuguggcaccucagguacauauggaacaggcucauggccugauggggcggaccucaaucucaugccuauauaa

SEQ ID NO: 54983 - RNA, 1410 nt, Artificial Sequence
  derived and/or modified CDS sequence (wt) from neuraminidase__InfluenzaA__AFN19476
augaauccaaaucaaaagauaauaacgauuggcucuguuucucucaccauuuccacaauaugcuucuucaugcaaauugccaucuugauaacuacuguaacauugcauuucaagcaauaugaauucaacucccccccaaacaaccaagugaugcugugugaaccaacaauaauagaaagaaacauaacagagauaguguaucugaccaacaccaccauagagaaggaaauaugccccaaaccagcagaauacagaaauuggucaaaaccgcaauguggcauuacaggauuugcaccuuuaucuaaggacaauucgauuaggcuuuccgcugguggggacaucugggugacaagagaaccuuaugugucaugcgauccugacaaguguuaucaauuugcccuuggacagggaacaacacuaaacaacgugcauucaaauaacacaguacgugauaggaccccuuaucggacucuauugaugaaugaguuggguguuccuuuucaucuggggaccaagcaagugugcauagcaugguccagcucaaguugucacgauggaaaagcauggcugcauguuuguauaacgggggaugauaaaaaugcaacugcuagcuucauuuacaaugggaggcuuguagauaguguuguuucaugguccaaagaaauucucaggacccaggagucagaaugcguuuguaucaauggaacuuguacaguaguaaugacugauggaagugcuucaggaaaagcugauacuaaaauacuauucauugaggaggggaaaaucguucauacuagcacauugucaggaagugcucagcaugucgaagagugcucuugcuauccucgauauccuggugucagaugugucugcagagacaacuggaaaggcuccaauaggcccaucguagauauaaacauaaaggaucauagcauuguuuccaguuauguguguucaggacuuguuggagacacacccagaaaaaacgacagcuccagcaguagccauuguuuggauccuaacaaugaagaagguggucauggagugaaaggcugggccuuugaugauggaaaugacguguggaugggaagaacaaucaacgagacgucacgcuuaggguaugaaaccuucaaagucauugaaggcugguccaacccuaaguccaaauugcagauaaauaggcaagucauaguugacagaggugauagguccgguuauucugguauuuucucuguugaaggcaaaagcugcaucaaucggugcuuuuauguggaguugauuaggggaagaaaagaggaaacugaagucuuguggaccucaaacaguauuguuguguuuuguggcaccucagguacauauggaacaggcucauggccugauggggcggaccucaaucucaugccuauauaa

SEQ ID NO: 54984 - RNA, 1410 nt, Artificial Sequence
  derived and/or modified CDS sequence (wt) from neuraminidase__InfluenzaA__AFN19478
augaauccaaaucaaaagauaauaacgauuggcucuguuucucucaccauuuccacaauaugcuucuucaugcaaauugccaucuugauaacuacuguaacauugcauuucaagcaauaugaauucaacucccccccaaacaaccaagugaugcugugugaaccaacaauaauagaaagaaacauaacagagauaguguaucugaccaacaccaccauagagaaggaaauaugccccaaaccagcagaauacagaaauuggucaaaaccgcaaugugacauuacaggauuugcaccuuuuucuaaggacaauucgauuaggcuuuccgcugguggggacaucugggugacaagagaaccuuaugugucaugcgauccugacaaguguuaucaauuugcccuuggacagggaacaacacuaaacaaugugcauucaaauaacacaguacgugauaggaccccuuaucggacuuuauugaugaaugaguuagguguuccuuuucaucuggggaccaagcaagugugcauagcaugguccagcucaaguugucacgauggaaaagcauggcugcauguuuguauaacgggggaugauaaaaaugcaacugcuagcuucauuuacaaugggaggcuuguagauaguguuguuucaugguccaaagaaauucucaggacccaggagucagaaugcguuuguaucaaugggacuuguacaguaguaaugacugauggaagugcuucaggaaaagcugauacuaaaauacuauucauugaggaggggaaaaucguucauacuagcacauugucaggaagugcucagcaugucgaggagugcucuugcuauccucgauauccuggugucagaugugucugcagagacaacuggaaaggcuccaauaggcccaucguagauauaaacauaaaggaucauagcauugucuccaguuauguguguucaggacuuguuggagacacacccagaaaaaacgacagcuccagcaguagccauuguuuggauccuaacaaugaagaagguggucauggagugaaaggcugggccuuugaugauggaaaugacguguggaugggaagaacaaucaacgagacgucacgcuuaggguaugaaaccuucaaagucauugaaggcugguccaacccuaaguccaaauugcagauaaauaggcaagucauaguugacagaggugauagguccgguuauucugguauuuucucuguugaaggcaaaagcugcaucaaucggugcuuuuauguggaguugauuaggggaagaaaagaggaaacugaagucuuguggaccucaaacaguauuguuguguuuuguggcaccucagguacauauggaacaggcucauggccugauggggcggaccucaaucucaugccuauauaa

SEQ ID NO: 54985 - RNA, 1410 nt, Artificial Sequence
  derived and/or modified CDS sequence (wt) from neuraminidase__InfluenzaA__AFN19480
augaauccaaaucaaaagauaauaacgauuggcucuguuucucucaccauuuccacaauaugcuucuucaugcaaauugccauccugauaacuacuguaacauugcauuucaagcaauaugaauucaacucccccccaaacaaccaagugaugcugugugaaccaacaauaauagaaagaaacaugacagagauaguguaucugaccaacaccaccauagagaaggaaauaugccccaaaccagcagaauacagaaauuggucaaaaccgcaaugugacauuacaggauuugcaccuuuuucuaaggacaauucgauuaggcuuuccgcugguggggacaucugggugacaagagaaccuuaugugucaugcgauccugacaaguguuaucaauuugcccuuggacagggaacaacacuaaacaacgugcauucaaauaacacaguaggugauaggaccccuuaucggacucuauugaugaaugaguuagguguuccuuuucaucuggggaccaagcaagugugcauagcaugguccagcucaaguugucacgauggaaaagcauggcugcauguuuguauaacgggggaugauaaaaaugcaacugcuagcuucaucuacaaugggaggcuuguagauaguguuguuucaugguccaaagaaauucucaggacccaggaaucagaaugcguuuguaucaauggaacuuguacaguaguaaugacugauggaagugcuucaggaaaagcugauacuaaaauacuauucauugaggaggggaaaaucguucauacuagcacauugucaggaagugcucagcaugucgaggagugcucuugcuauccucgauauccuggugucagaugugucugcagagacaacuggaaaggcuccaauaggcccaucguagauauaaacauaaaagaucauaguauuguuuccaguuauguguguucaggacuuguuggagacacacccagaaaaaacgacagcucaagcaguagccauuguuuggauccuaacaaugaagaagguggucauggagugaaaggcugggccuuugaugauggaaaugacguguggaugggaagaacaaucaacgagacgucacgcuuaggguaugaaaccuucaaagucauugaaggcugguccaacccuaaguccaaauugcagauaaauaggcaagucauaguugacagaagugauagguccgguuauucugguauuuucucuguugaaggcaaaagcugcaucaaucggugcuuuuauguggaguugauuaggggaagaaaagaggaaacugaagucuuguggaccucaaacaguauuguuguguuuuguggcacaucagguacauauggaacaggcucauggccugauggggcggaccucaaucucaugccuauauaa

SEQ ID NO: 54986 - RNA, 1410 nt, Artificial Sequence
  derived and/or modified CDS sequence (wt) from neuraminidase__InfluenzaA__AFN19482
augaauccaaaucaaaagauaauaacgauuggcucuguuucucucaccauuuccacaauaugcuucuucaugcaaauugccaucuugauaacuacuguaacauugcauuucaagcaauaugaauucaacucccccccaaacaaccaagugaugcugugugaaccaacaauaauagaaagaaacauaacagagauaguguaucugaccaacaccaccauagagaaggaaauaugccccaaaccagcaaaauacagaaauuggucaaaaccgcaaugugacauuacaggauuugcaccuuuuucuaaggacaauucgauuaggcuuuccgcugguggggacaucugggugacaagagaaccuuaugugucaugcgauccugacaaguguuaucaauuugcccuuggacagggaacaacacuaaacaaugugcauucaaauaacacaguacgugauaggaccccuuaucggacucuauugaugaaugaguuagguguuccuuuucaucuggggaccaagcaagugugcauagcaugguccagcucaaguugucacgauggaaaagcauggcugcauguuuguauaacgggggaugauaaaaaugcaacugcuagcuucaucuacaaugggaggcuuguagauaguguuguuucaugguccaaagaaauucucaggacccaggaaucagaaugcguuuguaucaauggaacuuguacaguaguaaugacugauggaagugcuucaggaaaagcugauacuaaaauacuauucauugaggaggggaaaaucguucauacuagcacauugucaggaagugcucagcaugucgaggagugcucuugcuauccucgauauccuggugucagaugugucugcagagacaacuggaaaggcuccaauaggcccaucguagauauaaacauaaaagaucauagcauuguuuccaguuauguguguucaggacuuguuggagacacacccagaaaaaacgacagcucaagcaguagccauuguuuggauccuaacaaugaagaagguggucauggagugaaaggcugggccuuugaugauggaaaugacguguggaugggaagaacaaucaacgagacgucacguuuaggguaugaaaccuucaaagucauugaaggcugguccaacccuaaguccaaauugcagauaaauaggcaagucauaguugacagaagugauagguccgguuauucugguauuuucucuguugaaggcaaaaguugcaucaaucggugcuuuuauguggaguugauuaggggaagaaaagaggaaacugaagucuuguggaccucaaacaguauuguuguguuuuguggcaccucagguacauauggaacaggcucauggccugauggggcggaccucaaucucaugccuauauaa

SEQ ID NO: 54987 - RNA, 1410 nt, Artificial Sequence; identical to SEQ ID NO: 54980
  derived and/or modified CDS sequence (wt) from neuraminidase__InfluenzaA__AFN19484

SEQ ID NO: 54988 - RNA, 1410 nt, Artificial Sequence
  derived and/or modified CDS sequence (wt) from neuraminidase__InfluenzaA__AFN19488
augaauccaaaucaaaagauaauaacgauuggcucuguuucucucaccauuucaacaauaugcuucuucaugcaaauugccaucuugauaacuacuguaacauugcauuucaagcaauaugaauucaacucccccccaaacaaccaagugaugcugugugaaccaacaauaauagaaagaaacauaacagagauaguguaucuuaccaacaccaccauagagaaggaaauaugccccaaaccagcagaauacagaaauuggucaaaaccgcaaugugacauuacaggauuugcaccuuuuucuaaggacaauucgauuaggcuuuccgcugguggggacaucuggguaacaagagaaccuuaugugucaugcgauccugacaaguguuaucaauuugcccuuggacagggaacaacacuaaacaaugugcauucaaauaacacaguacgugauaggaccccuuaucggacuuuauugaugaaugaguuagguguuccuuuucaucuggggaccaagcaagugugcauagcaugguccagcucaaguugucacgauggaaaagcauggcugcauguuuguauaacgggggaugauaaaaaugcaacugcuagcuucauuuacaaugggaggcuuguagauaguguuguuucaugguccaaagaaauucucaggacccaggagucagaaugcguuuguaucaauggaacuuguacaguaguaaugacugauggaagugcuucaggaaaagcugauacuaaaauacuauucauugaggaggggaaaaucguucauacuagcacauugucaggaagugcucagcaugucgaggagugcucuugcuauccucgauauccuggugucagaugugucugcagagacaacuggaaaggcuccaauaggcccaucguagauauaaacauaaaggaucauagcauugucuccaguuauguguguucaggacuuguuggagacacacccagaaaaaacgacagcuccagcaguagccauuguuuggauccuaacaaugaagaagguggucauggagugaaaggcugggccuuugaugauggaaaugacguguggaugggaagaacaaucaacgagacgucacgcuuaggguaugaaaccuucaaagucauugaaggcugguccaacccuaaguccaaauugcagauaaauaggcaagucauaguugacagaggugauagguccgguuauucugguauuuucucuguugaaggcaaaagcugcaucaaucggugcuuuuauguggaguugauuaggggaagaaaagaggaaacugaagucuuguggaccucaaacaguauuguuguguuuuguggcaccucagguacauauggaacaggcucauggccugauggggcggaccucaaucucaugccuauauaa

SEQ ID NO: 54989 - RNA, 1410 nt, Artificial Sequence
  derived and/or modified CDS sequence (wt) from neuraminidase__InfluenzaA__AFN19492
augaauccaaaucaaaagauaauaacgauuggcucuguuucucucaccauuuccacaauaugcuucuucaugcaaauugccaucuugauaacuacuguaacauugcauuucaagcaauaugaauucaacucccccccaaacaaccaagugaugcugugugaaccaacaauaauagaaagaaacauaacagagauaguguaucugaccaacaccaccauagagaaggaaauaugccccaaaccagcagaauacagaaauuggucaaaaccgcaaugugacauuacaggauuugcaccuuuuucuaaggacaauucgauuaggcuuuccgcugguggggacaucugggugacaagagaaccuuaugugucaugcgauccugacaaguguuaucaauuugcccuuggacagggaacaacacuaaacaaugugcauucaaauaacacaguacgugauaggaccccuuaucggacuuuauugaugaaugaguuagguguuccuuuucaucuggggaccaagcaagugugcauagcaugguccagcucaaguugucacgauggaaaagcauggcugcauguuuguauaacgggggaugauaaaaaugcaacugcuagcuucauuuacaaugggaagcuuguagauaguguuguuucaugguccaaagaaauucucaggacccaggagucagaaugcguuuguaucaauggaacuuguacaguaguaaugacugauggaagugcuucaggaaaagcugauacuaaaauacuauucauugaggaggggaaaaucguucauacuagcacauugucaggaagugcucagcaugucgaggagugcucuugcuauccucgauauccuggugucagaugugucugcagagacaacuggaaaggcuccaauaggcccaucguagauauaaacauaaaggaucauagcauugucuccaguuauguguguucaggacuuguuggagacacacccagaaaaaacgacagcuccagcaguagccauuguuuggauccuaacaaugaagaagguggucauggagugaaaggcugggccuuugaugauggaaaugacguguggaugggaagaacaaucaacgagacgucacgcuuaggguaugaaaccuucaaagucauugaaggcugguccaacccuaaguccaaauugcagauaaauaggcaagucauaguugacagaggugauagguccgguuauucugguauuuucucuguugaaggcaaaagcugcaucaaucggugcuuuuauguggaguugauuaggggaagaaaagaggaaacugaagucuuguggaccucaaacaguauuguuguguuuuguggcaccucagguacauauggaacaggcucauggccugauggggcggaccucaaucucaugccuauauaa

SEQ ID NO: 54990 - RNA, 1410 nt, Artificial Sequence
  derived and/or modified CDS sequence (wt) from neuraminidase__InfluenzaA__AFN19494
augaauccaaaucaaaagauaauaacgauuggcucuguuucucucaccauuuccacaauaugcuucuucaugcaaauugccaucuugauaacuacuguaacauugcauuucaagcaauaugaauucaacucccccccaaacaaccaagugaugcugugugaaccaacaauaauagaaagaaacauaacagagauaguguaucugaccaacaccaccauagagaaggaaauaugccccaaacuagcagaauacagaaauuggucaaagccgcaaugugacauuacaggauuugcaccuuuuucuaaggacaauucgauuaggcuuuccgcugguggggacaucugggugacaagagaaccuuaugugucaugcgauccugacaaguguuaucaauuugcccuuggacagggaacaacacuaaacaacaugcauucaaauaacacaguacgugauaggaccccuuaucggacccuauugaugaaugaguuagguguuccuuuucaucuggggaccaagcaagugugcauagcaugguccagcucaaguugucacgauggaaaagcauggcugcauguuugcauaacgggggaugauaaaaaugcaacugcuagcuucauuuacaaugggaggcuuguagauaguguuguuucaugguccaaagaaauccucaggacccaggagucagaaugcguuuguaucaauggaacuuguacaguaguaaugacugaugggagugcuucaggaaaagcugauacuaaaauacuauucauugaggaggggaaaaucguucauacuagcacauugucaggaagugcucagcaugucgaggagugcucuugcuauccucgauauccuggugucagaugugucugcagagacaacuggaaaggcuccaauaggcccaucguagauauaaacauaaaggaucauagcauuguuuccaguuauguguguucaggacuuguuggagacacacccagaaaaaacgacagcuccagcaguagccauuguuuggauccuaacaaugaagaagguggucauggagugaaaggcugggccuuugaugauggaaaugacguguggaugggaagaacgaucaacgagacgucacguuuaggguaugaaaccuucaaagucauugaaggcugguccaacccuaaguccaaauugcagauaaauaggcaagucauaguugacagagguaauagguccgguuauucugguauuuucucuguugaaggcaaaagcugcaucaaucggugcuuuuauguggaguugauuaggggaagaaaagaggaaacugaagucuuguggaccucaaacaguauugucguguuuuguggcaccucagguacauauggaacaggcucauggccugauggggcggaccucaaucucaugccuauauaa

SEQ ID NO: 54991 - RNA, 1410 nt, Artificial Sequence; identical to SEQ ID NO: 53811
  derived and/or modified CDS sequence (wt) from neuraminidase__InfluenzaA__AFN19496

SEQ ID NO: 54992 - RNA, 1410 nt, Artificial Sequence
  derived and/or modified CDS sequence (wt) from neuraminidase__InfluenzaA__AFN19498
augaauccaaaucaaaagauaauaacgauuggcucuguuucucucaccauuuccacaauaugcuucuucaugcaaauugccaucuugauaacuacuguaacauugcauuucaagcaauaugaauucaacucccccccaaacaaccaagugaugcugugugaaccaacaauaauagaaagaaacauaacagagauaguguaucugaccaacaccaccauagagaaggaaauaugccccaaacuagcagaauacagaaauuggucaaagccgcaaugugacauuacaggauuugcaccuuuuucuaaggacaauucgauuaggcuuuccgcugguggggacaucugggugacaagagaaccuuaugugucaugcgauccugacaaguguuaucaauuugcccuuggacagggaacaacacuaaacaacgugcauucaaauaacacaguacgugauaggacuccuuaucggacccuauugaugaaugaguuagguguuccuuuucaucuggggaccaagcaagugugcauagcaugguccagcucaaguugucacgauggaaaagcauggcugcauguuuguauaacgggggaugauaaaaaugcaacugcuagcuucauuuacaaugggaagcuuguagauaguguuguuucaugguccaaagaaauccucaggacccaggagucagaaugcguuuguaucaauggaacuuguacaguaguaaugacugaugggagugcuucaggaaaagcugauacuaaaauacuauucauugaggaggggaaaaucguucauacuagcacauugucaggaagugcucagcaugucgaggagugcucuugcuauccucgauauccuggugucagaugugucugcagagacaacuggaaaggcuccaauaggcccaucguagauauaaacauaaaggaucauagcauuguuuccaguuauguguguucaggacuuguuggagacacacccagaaaaaacgacagcuccagcaguagccauuguuuggauccuaacaaugaagaagguggucauggagugaaaggcugggccuuugaugauggaaaugacguguggaugggaagaacgaucaacgagacgucacguuuaggguaugaaaccuucaaagucauugaaggcugguccaacccuaaguccaaauugcagauaaauaggcaagucauaguugacagagguaauagguccgguuauucugguauuuucucuguugaaggcaaaagcugcaucaaucggugcuuuuauguggaguugauuaggggaagaacagaggaaacugaagucuuguggaccucaaacaguauuguuguguuuuguggcaccucagguacauauggaacaggcucauggccugauggggcggaccucaaucucaugccuauauaa

SEQ ID NO: 54993 - RNA, 1410 nt, Artificial Sequence; identical to SEQ ID NO: 54946
  derived and/or modified CDS sequence (wt) from neuraminidase__InfluenzaA__AFN19500

SEQ ID NO: 54994 - RNA, 1410 nt, Artificial Sequence
  derived and/or modified CDS sequence (wt) from neuraminidase__InfluenzaA__AFN19502
augaauccaaaucaaaagauaauaacgauuggcucuguuucucucaccauuuccacaauaugcuucuucaugcaaauugccaucuugauaacuacuguaacauugcauuucaagcaauaugaauucaacucccccccaaacaaccaagugaugcugugugaaccaacaauaauagaaagaaacauaacagagauaguguaucugaccaacaccaccauagagaaggaaauaugccccaaaccagcagaauacagaaauuggucaaaaccgcaaugugacauuacaggauuugcaccuuuuucuaaggacaauucgauuaggcuuuccgcugguggggacaucugggugacaagagaaccuuaugugucaugcgauccugacaaguguuaucaauuugcccuuggacagggaacaacacuaaacaaugugcauucaaauaacacaguacgugauaggaccccuuaucggacucuauugaugaaugaguuagguguuccuuuucaucuggggaccaagcaagugugcauagcaugguccagcucaaguugucacgauggaaaagcauggcugcauguuuguauaacgggggaugauaaaaaugcaacugcuagcuucauuuacaaugggaggcuuguagauaguguuguuucaugguccaaagaaauucucagaacccaggagucagaaugcguuuguaucaauggaacuuguacaguaguaaugacugauggaagugcuucaggaaaagcugauacuaaaauacuauucauugaggaggggaaaaucguucauacuagcacauugucaggaagugcucagcaugucgaggagugcucuugcuauccucgauauccuggugucagaugugucugcagagacaacuggaaaggcuccaauaggcccaucguagauauaaacauaaaggaucauagcauugucuccaguuauguguguucaggacuuguuggagacacgcccagaaaaaacgacagcuccagcaguagccauuguuuggauccuaacaaugaagaagguggucauggagugaaaggcugggccuuugaugauggaaaugacguuuggaugggaagaacaaucaacgagacgucacgcuuaggguaugaaaccuucaaagucauugaaggcugguccaacccuaaguccaaauugcagauaaauaggcaagucauaguugacagaggugauagguccgguuauucugguauuuucucuguugaaggcaaaagcugcaucaaucggugcuuuuauguggaguugauuaggggaagaaaagaggaaacugaagucuuguggaccucaaacaguauuguuguguuuuguggcaccucagguacauauggaacaggcucauggccugauggggcggaccucaaucucaugccuauauaa

SEQ ID NO: 54995 - RNA, 1410 nt, Artificial Sequence
  derived and/or modified CDS sequence (wt) from neuraminidase__InfluenzaA__AFN19504
augaauccaaaucaaaagauaauaacgauuggcucuguuucucucaccauuuccacaauaugcuucuucaugcaaauugccaucuugauaacuacuguaacauugcauuucaagcaauaugaauucaacucccccccaaacaaccaagugaugcugugugaaccaacaauaauagaaagaaacauaacagaaauaguguaucugaccaacaccaccauagagaaggaaauaugccccaaacuagcagaauacagaaauuggucaaagccgcaaugugacauuacaggauuugcaccuuuuucuaaggacaauucgauuaggcuuuccgcugguggggacaucugggugacaagagaaccuuaugugucaugcgauccugacaaguguuaucaauuugcucuuggacagggaacaacacuaaacaacgugcauucaaauaacacaguacgugauaggaccccuuaucggacccuauugaugaaugaguuagguguuccuuuucaucuggggaccaagcaagugugcauagcaugguccagcucaaguugucacgauggaaaagcauggcugcauguuuguauaacgggggaugauaaaaaugcaacugcuagcuucauuuacaaugggaggcuuguagauaguguuguuucaugguccaaagaaauccucaggacccaggagucagaaugcguuuguaucaauggaacuuguacaguaguaaugacugaugggagugcuucaggaaaagcugauacuaagauacuauucauugaggaggggaaaaucguucauacuagcacauugucaggaagugcucagcaugucgaggagugcucuugcuauccucgauauccuggugucagaugugucugcagagacaacuggaaaggcuccaauaggcccaucguagauauaaacauaaaggaucauagcauuguuuccaguuauguguguucaggacuuguuggagacacacccagaaaaaacgacagcuccagcaguagccauuguuuggauccuaacaaugaagaagguggucauggagugaaaggcugggccuuugaugauggaaaugacguguggaugggaagaacgaucaacgagacaucacguuuaggguaugaaaccuucaaagucauugaaggcugguccaacccuaaguccaaauugcagauaaauaggcaagucauaguugacagagguaauagguccgguuauucugguauuuucucuguugaaggcaaaagcugcaucaaucggugcuuuuauguggaguugauuaggggaagaaaagaggaaacugaagucuuguggaccucaaacaguauuguuguguuuuguggcaccucagguacauauggaacaggcucauggccugauggggcggaccucaaucucaugccuauauaa

SEQ ID NO: 54996 - RNA, 1410 nt, Artificial Sequence; identical to SEQ ID NO: 54995
  derived and/or modified CDS sequence (wt) from neuraminidase__InfluenzaA__AFN19506

SEQ ID NO: 54997 - RNA, 1410 nt, Artificial Sequence; identical to SEQ ID NO: 54946
  derived and/or modified CDS sequence (wt) from neuraminidase__InfluenzaA__AFN19508

SEQ ID NO: 54998 - RNA, 1410 nt, Artificial Sequence; identical to SEQ ID NO: 54941
  derived and/or modified CDS sequence (wt) from neuraminidase__InfluenzaA__AFN19510

SEQ ID NO: 54999 - RNA, 1410 nt, Artificial Sequence; identical to SEQ ID NO: 54994
  derived and/or modified CDS sequence (wt) from neuraminidase__InfluenzaA__AFN19512

SEQ ID NO: 55000 - RNA, 1410 nt, Artificial Sequence
  derived and/or modified CDS sequence (wt) from neuraminidase__InfluenzaA__AFN19516
augaauccaaaucaaaagauaauaacgauuggcucuguuucucucaccauuuccacaauaugcuucuucaugcaaauugccaucuugauaacuacuguaacauugcauuucaagcaauaugaauucaacucccccccaaacaaccaagugaugcugugugaaccaacaauaauagaaagaaacauaacagagauaguguaucugaccaacaccaccauagagaaggaaauaugccccaaaccagcagaauacagaaauuggucaaaaccgcaaugugacauuacaggauuugcaccuuuuucuaaggacaauucgauuaggcuuuccgcugguggggacaucugggugacaagagaaccuuaugugucaugcgauccugacaaguguuaucaauuugcccuuggacagggaacaacacuaaacaaugugcauucaaauaacacaguacgugauaggaccccuuaucggacucuauugaugaaugaguuagguguuccuuuucaucuggggaccaagcaagugugcauagcaugguccagcucaaguugucacgauggaaaagcauggcugcauguuuguauaacgggggaugauaaaaaugcaacugcuagcuucauuuacaaugggaggcuuguagauaguguuguuucaugguccaaagaaauucucaggacccaggagucagaaugcguuuguaucaauggaacuuguacaguaguaaugacugauggaagugcuucaggaaaagcugauacuaaaauacuauucauugaggaggggaaaaucguucauacuagcacauugucaggaagugcucagcaugucgaggagugcucuugcuauccucgauauccuggugucagaugugucugcagagacaacuggaaaggcuccaauaggcccaucguagauauaaacauaaaggaucauagcauugucuccaguuauguguguucaggacuuguuggagacacgcccagaaaaaacgacagcuccagcaguagccauuguuuggauccuaacaaugaagaagguggucauggagugaaaggcugggcauuugaugauggaaaugacguuuggaugggaagaacaaucaacgagacgucacgcuuaggguaugaaaccuucaaagucauugaaggcugguccaacccuaaguccaaauugcagauaaauaggcaagucauaguugacagaggugauagguccgguuauucugguauuuucucuguugaaggcaaaagcugcaucaaucggugcuuuuauguggaguugauuaggggaagaaaagaggaaacugaagucuuguggaccucaaacaguauuguuguguuuuguggcaccucagguacauauggaacaggcucauggccugauggggcggaccucaaucucaugccuauauaa

SEQ ID NO: 55001 - RNA, 1410 nt, Artificial Sequence; identical to SEQ ID NO: 54946
  derived and/or modified CDS sequence (wt) from neuraminidase__InfluenzaA__AFN19518

SEQ ID NO: 55002 - RNA, 1410 nt, Artificial Sequence; identical to SEQ ID NO: 54946
  derived and/or modified CDS sequence (wt) from neuraminidase__InfluenzaA__AFN19520

SEQ ID NO: 55003 - RNA, 1410 nt, Artificial Sequence; identical to SEQ ID NO: 54937
  derived and/or modified CDS sequence (wt) from neuraminidase__InfluenzaA__AFN19522

SEQ ID NO: 55004 - RNA, 1410 nt, Artificial Sequence
  derived and/or modified CDS sequence (wt) from neuraminidase__InfluenzaA__AFN19524
augaauccaaaucaaaagauaauaacgauuggcucuguuucucucaccauuuccacaauaugcuucuucaugcaaauugccaucuugauaacuacuguaacauugcauuucaagcaauaugaauucaacucccccccaaacaaccaagugaugcugugugaaccaacaauaauagaaagaaacauaacagagauaguguaucugaccaacaccaccauagagaaggaaauaugccccaaaccagcagaauacagaaauuggucaaaaccgcaaugugacauuacaggauuugcaccuuuuucuaaggacaauucgauuaggcuuuccgcugguggggacaucugggugacaagagaaccuuaugugucaugcgauccugacaaguguuaucaauuugcccuuggacagggaacaacacuaaacaaugugcauucaaauaacacaguacgugauaggaccccuuaucggacucuauugaugaaugaguuagguguuccuuuucaucuggggaccaagcaagugugcauagcaugguccagcucaaguugucacgauggaaaagcauggcugcauguuuguauaacgggggaugauaaaaaugcaacugcuagcuucauuuacaaugggaggcuuguagauaguguuguuucaugguccaaagaaauucucaggacccaggagucagaaugcguuuguaucaauggaacuuguacaguaguaaugacugauggaagugcuucaggaaaagcugauacuaaaauacuauucauugaggaggggaaaaucguucauacuagcacauugucaggaagugcucagcaugucgaggagugcucuugcuauccucgauauccuggugucagaugugucugcagagacaacuggaaaggcuccaauaggcccaucguagauauaaacauaaaggaucauagcauugucuccaguuauguguguucaggacuuguuggagacacgcccagaaaaaacgacagcuccagcaguagccauuguuuggauccuaacaaugaagaagguggucauggagugaaaggcugggcauuugaugauggaaaugacguuuggaugggaagaacaaucaacgagacgucacgcuuaggguaugaaaccuucaaagucauugaaggcugguccaacccuaaguccaaauugcagauaaauaggcaagucauaguugacagaggugauagguccgguuauucugguauuuucucuguugaaggcaaaagcugcaucaaucggugcuuuuauguggaguugauuaggggaagaaaagaggaaacugaagucuuguggaccucaaacaguauuguuguguuuuguggcaccucagguacauauggaacaggcucauggccugauggggcggaccucagucucaugccuauauaa

SEQ ID NO: 55005 - RNA, 1410 nt, Artificial Sequence
  derived and/or modified CDS sequence (wt) from neuraminidase__InfluenzaA__AFN19526
augaauccaaaucaaaagauaauaacgauuggcucuguuucucucaccauuuccacaauaugcuucuuuaugcaaauugccaucuugauaacuacuguaacauugcauuucaagcaaugugaauucaacucccccccaaacaaccaagugaugcugugugaaccaacaauaauagaaagaaacauaacagagauaguguaucugaccaacaccaccacagagaaggaaauaugccccaaaccagcagaauacagaaauuggucaaaaccgcaaugugacauuacaggauuugcaccuuuuucuaaggacaauucgauuaggcuuuccgcugguggggacaucugggugacaagagaaccuuaugugucaugcgauccugacaaguguuaucaauuugcccuuggacagggaacaacacuaaacaaugugcauucaaauaacacaguacgugauaggaccccuuaucggacuuuauugaugaaugaguuagguguuccuuuucaucuggggaccaagcaagugugcauagcaugguccagcucaaguugucacgauggaaaagcauggcugcauguuuguauaacgggggaugauaaaaaugcaacugcuagcuucauuuacaaugggaggcuuguagauaguguuguuucaugguccaaagaaauucucaggacccaggagucagaaugcguuuguaucaauggaacuuguacaguaguaaugacugauggaagugcuucaggaaaagcugauacuaaaauacuauucauugaggaggggaaaaucguucauacuagcacauugucaggaagugcucagcaugucgaggagugcucuugcuauccucgauauccuggugucagaugugucugcagagacaacuggaaaggcuccaauaggcccaucguagauauaaacauaaaggaucauagcauugucuccaguuauguguguucaggacuuguuggagacacacccagaaaaaccgacagcuccagcaguagccauuguuuggauccuaacaaugaagaagguggucauggagugaaaggcugggccuuugaugauggaaaugacguguggaugggaagaacaaucaacgagacgucacgcuuaggguaugaaaccuucaaagucauugaaggcugguccaacccuaaguccaaauugcagauaaauaggcaagucauaguugacagaggugauagguccgguuauucugguauuuucucuguugaaggcaaaagcugcaucaaucggugcuuuuauguggaguugauuaggggaagaaaagaggaaacugaagucuuguggaccucaaacaguauuguuguguuuuguggcaccucagguacauauggaacaggcucauggccugauggggcggaccucaaucucaugccuauauaa

SEQ ID NO: 55006 - RNA, 1410 nt, Artificial Sequence
  derived and/or modified CDS sequence (wt) from neuraminidase__InfluenzaA__AFN19528
augaauccaaaucaaaagauaauaacgauuggcucuguuucucucaccauuuccacaauaugcuucuucaugcaaauugccaucuugauaacuacuguaacauugcauuucaagcaauaugaauucaacucccccccaaacaaccaagugaugcugugugaaccaacaauaauagaaagaaacaugacagagauaguguaucugaccaacaccaccauagagaaggaaauaugccccaaaccagcagaauacagaaauuggucaaaaccgcaaugugacauuacaggauuugcaccuuuuucuaaggacaauucgauuaggcuuuccgcugguggggacaucugggugacaagagaaccuuaugugucaugcgauccugacaaguguuaucaauuugcccuuggacagggaacaacacuaaacaacgugcauucaaauaacacaguacgugauaggaccccuuaucggacucuauugaugaaugaguuagguguuccuuuucaucuggggaccaagcaagugugcauagcaugguccagcucaaguugucacgauggaaaagcauggcugcauguuuguauaacgggggaugauaaaaaugcaacugcuagcuucaucuacaaugggaggcuuguagauaguguuguuucaugguccaaagaaauucucaggacccaggaaucagaaugcguuuguaucaauggaacuuguacaguaguaaugacugauggaagugcuucaggaaaaucugauacuaaaauacuauucauugaggaggggaaaaucguucauacuagcacauugucaggaagugcucagcaugucgaggagugcucuugcuauccucgauauccuggugucagaugugucugcagagacaacuggaaaggcuccaauaggcccaucguagauauaaacauaaaagaucauagcauuguuuccaguuauguguguucaggacuuguuggagacacacccagaaaaaacgacagcucaagcaguagccauuguuuggauccuaacaaugaagaagguggucauggagugaaaggcugggccuuugaugauggaaaugacguguggaugggaagaacaaucaacgagacgucacguuuaggguaugaaaccuucaaagucauugaaggcugguccaacccuaaguccaaauugcagauaaauaggcaagucauaguugacagaagugauagguccgguuauucugguauuuucucuguugaaggcaaaaguugcaucaaucggugcuuuuauguggaguugauuaggggaagaaaagaggaaacugaagucuuguggaccucaaacaguauuguuguguuuuguggcaccucagguacauauggaacaggcucauggccugauggggcggaccucaaucucaugccuauauaa

SEQ ID NO: 55007 - RNA, 1410 nt, Artificial Sequence; identical to SEQ ID NO: 54970
  derived and/or modified CDS sequence (wt) from neuraminidase__InfluenzaA__AFN19530

SEQ ID NO: 55008 - RNA, 1410 nt, Artificial Sequence; identical to SEQ ID NO: 54937
  derived and/or modified CDS sequence (wt) from neuraminidase__InfluenzaA__AFN19532

SEQ ID NO: 55009 - RNA, 1410 nt, Artificial Sequence
  derived and/or modified CDS sequence (wt) from neuraminidase__InfluenzaA__AFN19534
augaauccaaaucaaaagauaauaacgauuggcucuguuucucucaccauuuccacaauaugcuucuucaugcaaauugccaucuugauaacuacuguaacauugcauuucaagcaauaugaauucaacucccccccaaacaaccaagugaugcugugugaaccaacaauaauagaaagaaacaugacagagauaguguaucugaccaacaccaccauagagaaggaaauaugccccaaaccagcagaauacagaaauuggucaaaaccgcaaugugacauuacaggauuugcaccuuuuucuaaggacaauucgauuaggcuuuccgcugguggggacaucugggugacaagagaaccuuaugugucaugcgauccugacaaguguuaucaauuugcccuuggacagggaacaacacuaaacaacgugcacucaaauaacacaguacgugauaggaccccuuaucggacucuauugaugaaugaguuagguguuccuuuucaucuggggaccaagcaagugugcauagcaugguccagcucaaguugucacgauggaaaagcauggcugcauguuuguauaacgggggaugauaaaaaugcaacugcuagcuucaucuacaaugggaggcuuguagauaguguuguuucaugguccaaagaaauucucaggacccaggaaucagaaugcguuuguaucaauggaacuuguacaguaguaaugacugauggaagugcuucaggaaaagcugauacuaaaauacuauucauugaggaggggaaaaucguucauacuagcacauugucaggaagugcucagcaugucgaggagugcucuugcuauccucgauauccuggugucagaugugucugcagagacaacuggaaaggcuccaauaggcccaucguagauauaaacauaaaagaucauagcauuguuuccaguuauguguguucaggacuuguuggagacacacccagaaaaaacgacagcucaagcaguagccauuguuuggauccuaacaaugaagaagguggucauggagugaaaggcugggccuuugaugauggaaaugacguguggaugggaagaacaaucaacgagacgucacguuuaggguaugaaaccuucaaagucauugaaggcugguccaacccuaaguccaaauugcagauaaauaggcaagucauaguugacagaagugauagguccgguuauucugguauuuucucuguugaaggcaaaaguugcaucaaucggugcuuuuauguggaguugauuaggggaagaaaagaggaaacugaagucuuguggaccucaaacaguauuguuguguuuuguggcaccucagguacauauggaacaggcucauggccugauggggcggaccucaaucucaugccuauauaa

SEQ ID NO: 55010 - RNA, 1410 nt, Artificial Sequence
  derived and/or modified CDS sequence (wt) from neuraminidase__InfluenzaA__AFN19536
augaauccaaaucaaaagauaauaacgauuggcucuguuucucucaccauuuccacaauaugcuucuucaugcaaauugccaucuugauaacuacuguaacauugcauuucaagcaauaugaauucaacucccccccaaacaaccaagugaugcugugugaaccaacaauaauagaaagaaacauaacagagauaguguaucugaccaacaccaccauagagaaggaaauaugcccaaaaccagcagaauacagaaauuggucaaaaccgcaaugugacauuacaggauuugcaccuuuuucuaaggacaauucgauuaggcuuuccgcugguggggacaucugggugacaagagaaccuuaugugucaugcgauccugacaaguguuaucaauuugcccuuggacagggaacaacacuaaacaaugugcauucaaauaacacaguacgugauaggaccccuuaucggacuuuauugaugaaugaguuagguguuccuuuucaucuggggaccaagcaagugugcauagcaugguccagcucaaguugucacgauggaaaagcauggcugcauguuuguauaacgggggaugauaaaaaugcaacugcuagcuucauuuacaaugggaggcuuguagauaguguuguuucaugguccaaagaaauucucaggacccaggagucagaaugcguuuguaucaauggaacuuguacaguaguaaugacugauggaagugcuucaggaaaagcugauacuaaaauacuauucauugaggaggggaaaaucguucauacuagcacauugucaggaagugcucagcaugucgaggagugcucuugcuauccucgauauccuggugucagaugugucugcagagacaacuggaaaggcuccaauaggcccaucguagauauaaacauaaaggaucauagcauugucuccaguuauguguguucaggacuuguuggagacacacccagaaaaaacgacagcuccagcaguagccauuguuuggauccuaacaaugaagaagguggucauggagugaaaggcugggccuuugaugauggaaaugacguguggaugggaagaacaaucaacgagacgucacgcuuaggguaugaaaccuucaaagucauugaaggcugguccaacccuaaguccaaauugcagauaaauaggcaagucauaguugacagaggugauagguccgguuauucugguauuuucucuguugaaggcaaaagcugcaucaaucggugcuuuuauguggaguugauuaggggaagaaaagaggaaacugaagucuuguggaccucaaacaguauuguuguguuuuguggcaccucagguacauauggaacaggcucauggccugauggggcggaccucaaucucaugccuauauaa

SEQ ID NO: 55011 - RNA, 1410 nt, Artificial Sequence; identical to SEQ ID NO: 54956
  derived and/or modified CDS sequence (wt) from neuraminidase__InfluenzaA__AFN19538

SEQ ID NO: 55012 - RNA, 1410 nt, Artificial Sequence
  derived and/or modified CDS sequence (wt) from neuraminidase__InfluenzaA__AFN19544
augaauccaaaucaaaagauaauaacgauuggcucuguuucucucaccauuuccacaauaugcuucuuuaugcaaauugccaucuugauaacuacuguaacauugcauuucaagcaauaugaauucaacucccccccaaacaaccaagugaugcugugugaaccaacaauaauagaaagaaacauaacagagauaguguaucugaccaacaccaccauagagaaggaaauaugccccaaaccagcagaauacagaaauuggucaaaaccgcaaugugacauuacaggauuugcaccuuuuucuaaggacaauucgauuaggcuuuccgcugguggggacaucugggugacaagagaaccuuaugugucaugcgauccugacaaguguuaucaauuugcccuuggacagggaacaacacuaaacaaugugcauucaaauaacacaguacgugauaggaccccuuaucggacuuuauugaugaaugaguuagguguuccuuuucaucuggggaccaagcaagugugcauagcaugguccagcucaaguugucacgauggaaaagcauggcugcauguuuguauaacgggggaugauaaaaaugcaacugcuagcuucauuuacaaugggaggcuuguagauaguguuguuucaugguccaaagaaauucucaggacccaggagucagaaugcguuuguaucaauggaacuuguacaguaguaaugacugauggaagugcuucaggaaaagcugauacuaaaauacuauucauugaggaggggaaaauuguucauacuagcacauugucaggaagugcucagcaugucgaggagugcucuugcuauccucgauauccuggugucagaugugucugcagagacaacuggaaaggcuccaauaggcccaucguagauauaaacauaaaggaucauagcauugucuccaguuauguguguucaggacuuguuggagacacacccagaaaaaacgacagcuccagcaguagccauuguuuggauccuaacaaugaagaagguggucauggagugaaaggcugggccuuugaugauggaaaugacguguggaugggaagaacaaucaacgagacgucacgcuuaggguaugaaaccuucaaagucauugaaggcugguccaacccuaaguccaaauugcagauaaauaggcaagucauaguugacagaggugauagguccgguuauucugguauuuucucuguugaaggcaaaagcugcaucaaucggugcuuuuauguggaguugauuaggggaagaaaagaggaaacugaagucuuguggaccucaaacaguauuguuguguuuuguggcaccucagguacauauggaacaggcucauggccugauggggcggaccucaaucucaugccuauauaa

SEQ ID NO: 55013 - RNA, 1410 nt, Artificial Sequence
  derived and/or modified CDS sequence (wt) from neuraminidase__InfluenzaA__AFN19546
augaauccaaaucaaaagauaauaacgauuggcucuguuucucucaccauuuccacaauaugcuucuucaugcaaauugccaucuugauaacuacuguaacauugcauuucaagcaauaugaauucaacucccccccaaacaaccaagugaugcugugugaaccaacaauaauagaaagaaacauaacagagauaguguaucugaccaacaccaccauagagaaggaaauaugccccaaaccagcagaauacagaaauuggucaaaaccgcaauguggcauuacaggauuugcaccuuucucuaaggacaauucgauuaggcuuuccgcugguggggacaucugggugacaagagaaccuuaugugucaugcgauccugacaaguguuaucaauuugcccuuggacagggaacaacacuaaacaaugugcauucaaauaacacaguacgugauaggaccccuuaucggacucuauugaugagugaguuggguguuccuuuucaucuggggaccaagcaagugugcauagcaugguccagcucaaguugucacgauggaaaagcauggcugcauguuuguauaacgggggaugauaaaaaugcaacugcuagcuucauuuacaaugggaggcuuguagauaguguuguuucgugguccaaagaaauucucaggacccaggagucagaaugcguuuguaucaauggaacuuguacaguaguaaugacugauggaagugcuucaggaaaagcugauacuaaaauacuauucauugaggaggggaaaaucguucauacuagcacauugucaggaagugcucagcaugucgaagagugcucuugcuauccucgauauccuggugucagaugugucugcagagacaacuggaaaggcuccaauaggcccaucguagauauaaacauaaaggaucauagcauuguuuccaguuauguguguucaggacuuguuggagacacacccagaaaaaacgacagcuccagcaguagccauuguuuggauccuaacaaugaagaagguggucauggagugaaaggcugggccuuugaugauggaaaugacguguggaugggaagaacaaucaacgagacgucacgcuuaggguaugaaaccuucaaagucauugaaggcugguccaacccuaaguccaaauugcagauaaauaggcaagucauaguugacagaggugauagguccgguuauucugguauuuucucuguugaaggcaaaagcugcaucaaucggugcuuuuauguggaguugauuaggggaagaaaagaggaaacugaagucuuguggaccucaaacaguauuguuguguuuuguggcaccucagguacauauggaacaggcucauggccugauggggcggaccucaaucucaugccuauauaa

SEQ ID NO: 55014 - RNA, 1410 nt, Artificial Sequence
  derived and/or modified CDS sequence (wt) from neuraminidase__InfluenzaA__AFN19548
augaauccaaaucaaaagauaauaacgauuggcucuguuucucucaccauuuccacaauaugcuucuucaugcaaauugccaucuugauaacuacuguaacauugcauuucaagcaauaugaauucaacucccccccaaacaaccaagugaugcugugugaaccaacaauaauagaaagaaacauaacagagauaguguaucugaccaacaccaccauagagaaggaaauaugccccaaaccagcagaauacagaaauuggucaaaaccgcaaugugacauuacaggauuugcaccuuuuucuaaggacaauucgauuaggcuuuccgcugguggggacaucuggguaacaagagaaccuuaugugucaugcgauccugacaaguguuaucaauuugcccuuggacagggaacaacacuaaacaaugugcauucaaauaacacaguacgugauaggaccccuuaucggacuuuauugaugaaugaguuagguguuccuuuucaucuggggaccaagcaagugugcauagcaugguccagcucaaguugucacgauggaaaagcauggcugcauguuuguauaacgggggaugauaaaaaugcaacugcuagcuucauuuacaaugggaggcuuguagauaguguuguuucaugguccaaagaaauucucaggacccaggagucagaaugcguuuguaucaauggaacuuguacaguaguaaugacugauggaagugcuucaggaaaagcugauacuaaaauacuauucauugaggaggggaaaaucguucauacuagcacauugucaggaagugcucagcaugucgaggagugcucuugcuauccucgauauccuggugucagaugugucugcagagacaacuggaaaggcuccaauaggcccaucguagauauaaacauaaaggaucauagcauugucuccaguuauguguguucaggacuuguuggagacacacccagaaaaaacgacagcuucagcaguagccauuguuuggauccuaacaaugaagaagguggucauggagugaaaggcugggccuuugaugauggaaaugacguguggaugggaagaacaaucaacgagacgucacgcuuaggguaugaaaccuucaaagucauugaaggcugguccaacccuaaguccaaauugcagauaaauaggcaagucauaguugacagaggugauagguccgguuauucugguauuuucucuguugaaggcaaaagcugcaucaaucggugcuuuuauguggaguugauuaggggaagaaaagaggaaacugaagucuuguggaccucaaacaguauuguuguguuuuguggcaccucagguacauauggaacaggcucauggccugauggggcggaccucaaucucaugccuauauaa

SEQ ID NO: 55015 - RNA, 1410 nt, Artificial Sequence
  derived and/or modified CDS sequence (wt) from neuraminidase__InfluenzaA__AFN19550
augaauccaaaucaaaagauaauaacgauuggcucuguuucucucaccauuuccacaauaugcuucuucaugcaaauugccaucuugauaacuacuguaacauugcauuucaagcaauaugaauucaacucccccccaaacaaccaagugaugcugugugaaccaacaauaauagaaagaaacauaacagagauaguguaucugaccaacaccaccauagagaaggaaauaugccccaaacuagcagaauacagaaauuggucaaagccucaaugugacauuacaggauuugcaccuuuuucuaaggacaauucgauuaggcuuuccgcugguggggacaucugggugacaagagaaccuuaugugucaugcgauccugacaaguguuaucaauuugcccuuggacagggaacaacacuaaacaacgugcauucaaauaacacaguacgugauaggaccccuuaucggacccuauugaugaaugaguuagguguuccuuuucaucuggggaccaagcaagugugcauagcaugguccagcucaaguugucacgauggaaaagcauggcugcauguuuguauaacgggggaugauaaaaaugcaacugcuagcuucauuuacaaugggaggcuuguagauaguguuguuucaugguccaaagaaauccucaggacccaggagucagaaugcguuuguaucaauggaacuuguacaguaguaaugacugaugggagugcuucaggagaagcugauacuaaaauacuauucauugaggaggggaaaaucauucauacuagcacauugucaggaagugcucagcaugucgaggagugcucuugcuauccucgauauccuggugucagaugugucugcagagacaacuggaaaggcuccaauaggcccaucguagauauaaacauaaaggaucauagcauuguuuccaguuauguguguucaggacuuguuggagacacacccagaaaaaaugacagcuccagcaguagccauuguuuggauccuaacaaugaagaagguggucauggagugaaaggcugggccuuugaugauggaaaugacguguggaugggaagaacgaucaacgagacgucacguuuaggguaugaaaccuucaaagucauugaaggcugguccaacccuaaguccaaauugcagauaaauaggcaagucauaguugacagagguaauagguccgguuauucugguauuuucucuguugaaggcaaaagcugcauaaaucggugcuuuuauguggaguugauuaggggaagaaaagaggaaacugaagucuuguggaccucaaacaguauuguuguguuuuguggcaccucagguacauauggaacaggcucauggccugauggggcggaccucaaucucaugccuauauaa

SEQ ID NO: 55016 - RNA, 1410 nt, Artificial Sequence; identical to SEQ ID NO: 55010
  derived and/or modified CDS sequence (wt) from neuraminidase__InfluenzaA__AFN19552

SEQ ID NO: 55017 - RNA, 1410 nt, Artificial Sequence; identical to SEQ ID NO: 54974
  derived and/or modified CDS sequence (wt) from neuraminidase__InfluenzaA__AFN19554

SEQ ID NO: 55018 - RNA, 1410 nt, Artificial Sequence; identical to SEQ ID NO: 54980
  derived and/or modified CDS sequence (wt) from neuraminidase__InfluenzaA__AFN19556

SEQ ID NO: 55019 - RNA, 1410 nt, Artificial Sequence
  derived and/or modified CDS sequence (wt) from neuraminidase__InfluenzaA__AFN19558
augaauccaaaucaaaagauaauaacgauuggcucuguuucucucaccauuuccacaauaugcuucuucaugcaaauugccaucuugauaacuacuguaacauugcauuucaagcaauaugaauucaacucccccccaaacaaccaagugaugcugugugaaccaacaauaauagaaagaaacauaacagagauaguguaucugaccaacaccaccauagagaaggaaauaugccccaaaccagcagaauacagaaauuggucaaaaccgcaaugugacauuacaggauuugcaccuuuuucuaaggacaauucgauuaggcuuuccgcugguggggacaucugggugacaagagaaccuuaugugucaugcgauccugacaaguguuaucaauuugcccuuggacagggaacaacacuaaacaaugugcauucaaauaacacaguacgugauaggaccccuuaucggacuuuauugaugaaugaguuagguguuccuuuucaucuggggaccaagcaagugugcauagcaugguccagcucaaguugucacgauggaaaagcauggcugcauguuuguauaacgggggaugauaaaaaugcaacugcuagcuucauuuacaaugggaggcuuguagauaguguuguuucaugguccaaagaaauucucaggacccaggagucagaaugcguuuguaucaauggaacuuguacaguaguaaugacugauggaagugcuucaggaaaagcugauacuaaaauacuauucauugaggaggggaaaaucguucauacuagcacauugucaggaagugcucagcaugucgaggagugcucuugcuauccucgauauccuggugucagaugugucugcagagacaacuggaaaggcuccaauaggcccaucguagauauaaacauaaaggaucauagcauugucuccaguuauguguguucaggacuuguuggagacacacccagaaaaaacgacagcuccagcaguagccauuguuuggauccuaacaaugaagaagguggucauggagugaaaggcugggccuuugaugauggaaaugacguguggaugggaagaacaaucaacgagacgucacgcuuaggguaugaaaccuucaaagucauugaaggcugguccaacccuaaguccaaauugcagaugaauaggcaagucauaguugacagaggugauagguccgguuauucugguauuuucucuguugaaggcaaaagcugcaucaaucggugcuuuuauguggaguugauuaggggaagaaaagaggaaacugaagucuuguggaccucaaacaguauuguuguguuuuguggcaccucagguacauauggaacaggcucauggccugauggggcggaccucaaucucaugccuauauaa

SEQ ID NO: 55020 - RNA, 1410 nt, Artificial Sequence
  derived and/or modified CDS sequence (wt) from neuraminidase__InfluenzaA__AFN19560
augaauccaaaucaaaagauaauaacgauuggcucuguuucucucaccauuuccacaauaugcuucuucaugcaaauugccaucuugauaacuacuguaacauugcauuucaagcaauaugaauucaacucccccccaaacaaccaagugaugcugugugaaccaacaauaauagaaagaaacauaacagagauaguguaucugaccaacaccaccauagagaaggaaauaugccccaaaccagcagaauacagaaauuggucaaaaccgcaauguggcauuacaggcuuugcaccuuucucuaaggacaauucgauuaggcuuuccgcugguggggacaucugggugacaagagaaccuuaugugucaugcgauccugacaaguguuaucaauuugcccuuggacagggaacaacacuaaacaacgugcauucaaauaacacaguacgugauaggaccccuuaucggacucuauugaugaaugaguuggguguuccuuuucaucuggggaccaagcaagugugcauagcaugguccagcucaaguugucacgauggaaaagcauggcugcauguuuguauaacgggggaugauaaaaaugcaacugcuagcuucauuuacaaugggaggcuuguagauaguguuguuucaugguccaaagaaauucucaggacccaggagucagaaugcguuuguaucaauggaacuuguacaguaguaaugacugauggaagugcuucaggaaaagcugauacuaaaauacuauucauugaggaggggaaaaucguucauacuagcacauugucaggaagugcucagcaugucgaagagugcucuugcuauccucgauauccuggugucagaugugucugcagagacaacuggaaaggcuccaauaggcccaucguagauauaaacauaaaggaucauagcauuguuuccaguuauguguguucaggacuuguuggagacacacccagaaaaaacgacagcuccagcaguagccauuguuuggauccuaacaaugaaggagguggucauggagugaaaggcugggccuuugaugauggaaaugacguguggaugggaagaacaaucaacgagacgucacgcuuaggguaugaaaccuucaaagucauugaaggcugguccaacccuaaguccaaauugcagauaaauaggcaagucauaguugacagaggugauagguccgguuauucugguauuuucucuguugaaggcaaaagcugcaucaaucggugcuuuuauguggaguugauuaggggaagaaaagaggaaacugaagucuuguggaccucaaacaguauuguuguguuuuguggcaccucagguacauauggaacaggcucauggccugauggggcggaccucaaucucaugccuauauaa

SEQ ID NO: 55021 - RNA, 1410 nt, Artificial Sequence
  derived and/or modified CDS sequence (wt) from neuraminidase__InfluenzaA__AFN19562
augaauccaaaucaaaagauaauaacgauuggcucuguuucucucaccauuuccacaauaugcuucuucaugcaaauugccaucuugauaacuaccguaacauugcauuucaagcaauaugaauucaacucccccccaaacaaccaagugaugcugugugaaccaacaauaauagaaagaaacaugacagagauaguguaucugaccaacaccaccauagagaaggaaauaugccccaaaccagcagaauacagaaauuggucaaaaccgcaaugugacauuacaggauuugcaccuuuuucuaaggacaauucgauuaggcuuuccgcugguggggacaucugggugacaagagaaccuuaugugucaugcgauccugacaaguguuaucaauuugcccuuggacagggaacaacacuaaacaacgugcauucaaauaacacaguacgugauaggaccccuuaucggacucuauugaugaaugaguuagguguuccuuuucaucuggggaccaagcaagugugcauagcaugguccagcucaaguugucacgauggaaaagcauggcugcauguuuguauaacgggggaugauaaaaaugcaacugcuagcuucaucuacaaugggaggcuuguagauaguguuguuucaugguccaaagaaauucucaggacccaggaaucagaaugcguuuguaucaauggaacuuguacaguaguaaugacugauggaagugcuucaggaaaagcugauacuaaaauacuauucauugaggaggggaaaaucguucauacuagcacauugucaggaagugcucagcaugucgaggagugcucuugcuauccucgauauccuggugucagaugugucugcagagacaacuggaaaggcuccaauaggcccaucguagauauaaacauaaaagaucauagcauuguuuccaguuauguguguucaggacuuguuggagacacacccagaaaaaacgacagcucaagcaguagccauuguuuggauccuaacaaugaagaagguggucauggagugaaaggcugggccuuugaugauggaaaugacguguggaugggaagaacaaucaacgagacgucacguuuaggguaugaaaccuucaaagucauugaaggcugguccaacccuaaguccaaauugcagauaaauaggcaagucauaguuaacaaaagugauagguccgguuauucugguauuuucucuguugaaggcaaaaguugcaucaaucggugcuuuuauguggaguugauuaggggaagaaaagaggaaacugaaguauuguggaccucaaacaguauuguuguguuuuguggcaccucagguacauauggaacaggcucauggccugauggggcggaccucaaucucaugccuauauaa

SEQ ID NO: 55022 - RNA, 1410 nt, Artificial Sequence
  derived and/or modified CDS sequence (wt) from neuraminidase__InfluenzaA__AFN19564
augaauccaaaucaaaagauaauaacgauuggcucuguuucucucaccauuuccacaauaugcuucuucaugcaaauugccaucuugauaacuacuguaacauugcauuucaagcaauaugaauucaacucccccccaaacaaccaagugaugcugugugaaccaacaauaauagaaagaaacauaacagagauaguguaucugaccaacaccaccauagagaaggaaauaugccccaaaccagcagaauacagaaauuggucaaaaccgcaauguggcauuacaggauuugcaccuuucucuaaggacaauucgauuaggcuuuccgcugguggggacaucugggugacaagagaaccuuaugugucaugcgauccugacaaguguuaucaauuugcccuuggacagggaacaacacuaaacaacgugcauucaaauaacacaguacgugauaggaccccuuaucggacucuauugaugaaugaguuggguguuccuuuucaucuggggaccaagcaagugugcauagcaugguccagcucaaguugucacgauggaaaagcauggcugcauguuuguauaacgggggaugauaaaaaugcaacugcuagcuucauuuacaaugggaggcuuguagauaguguuguuucaugguccaaagaaauucucaggacccaggagucagaaugcguuuguaucaauggaacuuguacaguaguaaugacugauggaagugcuucaggaaaagcugauacuaaaauacuauucauugaggaggggaaaaucguucauacuagcacauugucaggaagugcucagcaugucgaagagugcucuugcuauccucgauauccuggugucagaugugucugcagagacaacuggaaaggcuccaauaggcccaucguagauauaaacauaaaggaucauagcauuguuuccaguuauguguguucaggacuuguuggagacacacccagaaaaaccgacagcuccagcaguagccauuguuuggauccuaacaaugaagaagguggucauggagugaaaggcugggccuuugaugauggaaaugacguguggaugggaagaacaaucaacgagacgucacgcuuaggguaugaaaccuucaaagucauugaaggcugguccaacccuaaguccaaauugcagauaaauaggcaagucauaguugacagaggugauagguccgguuauucugguauuuucucuguugaaggcaaaagcugcaucaaucggugcuuuuauguggaguugauuaggggaagaaaagaggaaacugaagucuuguggaccucaaacaguauuguuguguuuuguggcaccucagguacauauggaacaggcucauggccugauggggcggaccucaaucucaugccuauauaa

SEQ ID NO: 55023 - RNA, 1410 nt, Artificial Sequence
  derived and/or modified CDS sequence (wt) from neuraminidase__InfluenzaA__AFN19566
augaauccaaaucaaaagauaauaacgauuggcucuguuucucucaccauuuccacaauaugcuucuucaugcaaauugccaucuugauaacuacuguaacauugcauuucaagcaauaugaauucaacucccccccaaacaaccaagugaugcugugugaaccaacaauaauagaaagaaacauaacagagauaguguaucugaccaacaccaccauagagaaggaaauaugccccaaaccagcagaauacagaaauuggucaaaaccgcaauguggcauuacaggauuugcaccuuuuucuaaggacaauucgauuaggcuuuccgcugguggggacaucugggugacaagagaaccuuaugugucaugcgauccugacaaguguuaucaauuugcccuuggacagggaacaacacuaaacaacgugcauucaaauaacacaguacgugauaggaccccuuaucggacucuauugaugaaugaguuggguguuccuuuucaucuggggaccaagcaagugugcauagcaugguccagcucaaguugucacgauggaaaagcauggcugcauguuuguauaacgggggaugauaaaaaugcaacugcuagcuucauuuacaaugggaggcuuguagauaguguuguuucaugguccaaugaaauucucaggacccaggagucagaauguguuuguaucaauggaacuuguacaguaguaaugacugauggaagugcuucaggaaaagcugauacuaaaauacuauucauugaggaggggaaaaucguucauacuagcacauugucaggaagugcucagcaugucgaagagugcucuugcuauccucgauauccuggugucagaugugucugcagagacaacuggaaaggcuccaauaggcccaucguagauauaaacauaaaggaucauagcauuguuuccaguuauguguguucaggacuuguuggagacacacccagaaaaaacgacagcuccagcaguagccauuguuuggauccuaauaaugaagaagguggucauggagugaaaggcugggccuuugaugauggaaaugacguguggaugggaagaacaaucaacgagacgucacgcuuaggguaugaaaccuucaaagucauugaaggcugguccaacccuaaguccaaauugcagauaaauaggcaagucauaguugacagaggugauagguccgguuauucugguauuuucucuguugagggcaaaagcugcaucaaucggugcuuuuauguggaguugauuaggggaagaaaagaggaaaaugaagucuuguggaccucaaacaguauuguuguguuuuguggcaccucagguacauauggaacaggcucauggccugauggggcggaccucaaucucaugccuauauaa

SEQ ID NO: 55024 - RNA, 1410 nt, Artificial Sequence
  derived and/or modified CDS sequence (wt) from neuraminidase__InfluenzaA__AFN19568
augaauccaaaucaaaagauaauaacgauuggcucuguuucucucaccauuuccacaauaugcuucuucaugcaaauugccaucuugauaacuacuguaacauugcauuucaagcaauaugaauucaacucccccccaaacaaccaagugaugcugugugaaccaacaauaauagaaagaaacauaacagagauaguguaucugaccaacaccaccauagagaaggaaauaugccccaaaccagcagaauacagaaauuggucaaaaccgcaauguggcauuacaggauuugcaccuuucucuaaggacaauucgauuaggcuuuccgcugguggggacaucugggugacaagagaaccuuaugugucaugcgauccugacaaguguuaucaauuugcccuuggacagggaacaacacuaaacaacgugcauucaaauaacacaguacgugauaggaccccuuaucggacucuauugaugaaugaguuggguguuccuuuucaucuggggaccaagcaagugugcauagcaugguccagcucaaguugucacgauggaaaagcauggcugcauguuuguauaacgggggaugauaaaaaugcaacugcuagcuucauuuacaaugggaggcuuguagauaguguuguuucaugguccaaagaaauucucaggacccaggagucagaaugcguuuguaucaauggaacuuguacaguaguaaugacugauggaagugcuucaggaaaagcugauacuaaaauacuauucauugaggaggggaaaaucguucauacuagcacauugucaggaagugcucagcaugucgaagagugcucuugcuauccucgauauccuggugucagaugugucugcagagacaacuggaaaggcuccaaucggcccaucguagauauaaacauaaaggaucauagcauuguuuccaguuauguguguucaggacuuguuggagacacacccagaaaaaacgacagcuccagcaguagccauuguuuggauccuaacaaugaagaagguggucauggagugaaaggcugggccuuugaugauggaaaugacguguggaugggaagaacaaucaacgagacgucacgcuuaggguaugaaaccuucaaagucauugaaggcugguccaacccuaaguccaaauugcagguaaauaggcaagucauaguugacagaggugauagguccgguuauucugguauuuucucuguugaaggcaaaagcugcaucaaucggugcuuuuauguggaguugauuaggggaagaaaagaggaaauugaagucuuguggaccucaaacaguauuguuguguuuuguggcaccucagguacauauggaacaggcucauggccugauggggcggaccucaaucucaugccuauauaa

SEQ ID NO: 55025 - RNA, 1410 nt, Artificial Sequence
  derived and/or modified CDS sequence (wt) from neuraminidase__InfluenzaA__AFN19570
augaauccaaaucaaaagauaauaacgauuggcucuguuucucucaccauuuccacaauaugcuucuucaugcaaauugccaucuugauaacuacuguaacauugcauuucaagcaauaugaauucaacuaccccccaaacaaccaagugaugcugugugaaccaacaauaauagaaagaaacauaacagagauaguguaucugaccaacaccaccauagagaaggaaauaugccccaaaccagcagaauacagaaauuggucaaaaccgcaauguggcauuacaggauuugcaccuuuuucuaaggacaauucgauuaggcuuuccgcugguggggacaucugggugacaagagaaccuuaugugucaugcgauccugacaaguguuaucaauuugcccuuggacagggaacaacacuaaacaacaugcauucaaauaacacaguacgugauaggaccccuuaucggacucuauugaugaaugaguuggguguuccuuuucaucuggggaccaagcaagugugcauagcaugguccagcucaaguugucacgauggaaaagcauggcugcauguuuguauaacgggggaugauaaaaaugcaacugcuagcuucauuuacaaugggaggcuuguagauaguguuguuucaugguccaaugaaauucucaggacccaggagucagaauguguuuguaucaauggaacuuguacaguaguaaugacugauggaagugcuucaggaaaagcugauacuaaaauacuauucauugaggaggggaaaaucguucauacuagcacauugucaggaagugcucagcaugucgaagagugcucuugcuauccucgauauccuggugucagaugugucugcagagacaacuggaaaggcuccaauaggcccaucguagauauaaacauaaaggaucauagcauuguuuccaguuauguguguucaggacuuguuggagacacacccagaaaaaacgacagcuccagcaguagccauuguuuggauccuaauaaugaagaagguggucauggagugaaaggcugggccuuugaugauggaaaugacguguggaugggaagaacaaucaacgagacgucacgcuuaggguaugaaaccuucaaagucauugaaggcugguccaacccuaaguccaaauugcagauaaauaggcaagucauaguugacagaggugauagguccgguuauucugguauuuucucuguugagggcaaaagcugcaucaaucggugcuuuuauguggaguugauuaggggaagaaaagaggaaaaugaagucuuguggaccucaaacaguauuguuguguuuuguggcaccucagguacauauggaacaggcucauggccugauggggcggaccucaaucucaugccuauauaa

SEQ ID NO: 55026 - RNA, 1410 nt, Artificial Sequence
  derived and/or modified CDS sequence (wt) from neuraminidase__InfluenzaA__AFN19572
augaauccaaaucaaaagauaauaacgauuggcucuguuucccucaccauuuccacaauaugcuucuucaugcaaauugccaucuugauaacuacuguaacauugcauuucaagcaauaugaauucaacucccccccaaacaaccaagugaugcugugugaaccaacaauaauagaaagaaacauaacagagauaguguaucugaccaacaccaccauagagaaggaaauaugccccaaaccagcagaauacagaaauuggucaaaaccgcaaugugacauuacaggauuugcaccuuuuucuaaggacaauucgauuaggauuuccgcugguggggacaucugggugacaagagaaccuuaugugucaugcgauccugacaaguguuaucaauuugcccuuggacagggaacaacacuaaacaaugugcauucaaauaacacaguacgugauaggaccccuuaucggacucuauugaugaaugaguuagguguuccuuuucaucuggggaccaagcaagugugcauagcaugguccagcucaaguugucacgauggaaaagcauggcugcauguuuguauaacgggggaugauaaaaaugcaacugcuagcuucauuuacaaugggaagcuuguagauaguguuguuucaugguccaaagaaauucucaggacccaggagucagaaugcguuuguaucaauggaacuuguacaguaguaaugacugauggaagugcuucaggaaaagcugauacuaaaauacuauucauugaggaggggaaaaucguucauacuagcacauugucaggaagugcucagcaugucgaggagugcucuugcuauccucgauauccuggugucagaugugucugcagagacaacuggaaaggcuccaauaggcccaucguagauauaaacauaaaggaucauagcauugucuccaguuauguuuguucaggacuuguuggagacacacccagaaaaaacgacagcuccagcaguagccauuguuuggauccuaauaaugaagaagguggucauggagugaaaggcugggccuuugaugauggaaaugacguguggaugggaagaacaaucaacgagacgucacgcuuaggguaugaaaccuucaaagucauugaaggcugguccaauccuaaguccaaauugcagauaaauaggcaagucauaguugacagaggugauagguccgguuauucugguauuuucucuguugaaggcaaaagcugcaucaaucggugcuuuuauguggaguugauuaggggaagaaaagaggaaacugaagucuuguggaccucaaacaguauuguuguguuuuguggcaccucagguacauauggaacaggcucauggccugauggggcggaccucaaucucaugccuauauaa

SEQ ID NO: 55027 - RNA, 1410 nt, Artificial Sequence
  derived and/or modified CDS sequence (wt) from neuraminidase__InfluenzaA__AFN19574
augaauccaaaccaaaagauaauaacgauuggcucuguuucccucaccauuuccacaauaugcuucuucaugcaaauugccaucuugauaacuacuguaacauugcauuucaagcaauaugaauucaacucccccccaaacaaccaagugaugcugugugaaccaacaauaauagaaagaaacauaacagagauaguguaucugaccaacaccaccauagagaaggaaauaugccccaaacuagcagaauacagaaauuggucaaagccgcaaugugacauuacaggauuugcaccuuuuucuaaggacaauucgauuaggcuuuccgcugguggggacaucugggugacaagagaaccuuaugugucaugcgauccuaacaaguguuaucaauuugcccuugggcaaggaacaacacuaaacaacgugcauucaaauaacacaguacgugauaggaccccuuaucggacccuauugaugaaugaguuagguguuccuuuucaucuggggaccaagcaagugugcauagcaugguccagcucaaguugucacgauggaaaagcauggcugcauguuuguauaacgggggacgauaaaaaugcaacugcuagcuucauuuacaaugggaggcuuguagauaguguuguuucaugguccaaaaaaauccucagaacccaggagucagaaugcguuuguaucaauggaacuuguacaguaguaaugacugaugggagugcuucaggaaaagcugauacuaaaauacuauucaucgaggaggggaaaaucguucauacuagcacauugucaggaagugcucaacaugucgaggagugcuccugcuauccucgauauccuggugucagaugugucugcagagacaacuggaaaggcuccaauaggcccaucguagauauaaacaugaaggaucauagcauuguuuccaguuauguguguucaggacuuguuggagacacacccagaaaaaacgacagcuccagcaguagccauuguuuugauccuaacgaugaagaagguggccauggagugaaaggcugggccuuugaugauggaaaugacguguggaugggaaggacgaucagcgagaagucacgcuuaggguaugaaaccuucaaagucauugaaggcugguccaacccuaaguccaaauugcagauaaauagacaagucauaguugacagaggugauagguccgguuauucugguauuuucucuguugaaggcaaaagcugcaucaaucggugcuuuuauguggaguugauaaggggaaguaaagaggaaacugaaguauuguggaccucaaacaguauuguuguguuuuguggcaccucagggacauauggaacaggcucauggccugauggggcggacaucaaucucaugccuauauaa

SEQ ID NO: 55028 - RNA, 1410 nt, Artificial Sequence
  derived and/or modified CDS sequence (wt) from neuraminidase__InfluenzaA__AFN19576
augaauccaaaucaaaagauaauaacgauuggcucuguuucucucaccauuuccacaauaugcuucuucaugcaaauugccaucuugauaacuacuguaacauugcauuucaagcaauaugaauucaacucccccccaaacaaccaaaugaugcugugugaaccaacaauaauagaaagaaacauaacagagauaguguaucugaccaacaccaccauagagaaggaaauaugccccaaaccagcagaauacagaaauuggucaaaaccgcaaugugacauuacaggauuugcaccuuuuucuaaggacaauucgauuaggcuuuccgcugguggggacaucugggugacaagagaaccuuaugugucaugcgauccugacaaguguuaucaauuugcccuuggacagggaacaacacuaaacaacgugcauucaaauaacacaguacgugauaggaccccuuaucggacucuauugaugaaugaguuagguguuccuuuucaucuggggaccaagcaagugugcauagcaugguccagcucaaguugucacgauggaaaagcauggcugcauguuuguauaacgggggaugauaaaaaugcaacugcuagcuucauuuacaaugggaggcuuguagauaguguuguuucaugguccaaagaaauucucaggacccaggagucagaaugcguuuguaucaauggaacuuguacaguaguaaugacugauggaagugcuucaggaaaagcugauacuaaaauacuauucauugaggaggggaaaaucguucauacuagcacauugucaggaagugcucagcauguugaggagugcucuugcuauccucgauauccuggugucagaugugucugcagagacaacuggaaaggcuccaauaggcccaucguagauauaaacauaaaggaucauagcauuguuuccaguuauguguguucaggacuuguuggagacacacccagaaaaaacgacagcuccagcaguagccauuguuuggauccuaacaaugaagaagguggucauggaguaaaaggcugggccuuugaugauggaaaugacguguggaugggaagaacaaucaacgagacgucacgauuaggguaugaaaccuucaaagucauugaaggcugguccaacccuaaguccaaauugcagauaaauaggcaagucauaguugacagaggugauagguccgguuauucugguauuuucucuguugaaggcaaaagcugcaucaaucggugcuuuuauguggaguugauuaggggaagaaaagaggaaacugaagucuuguggaccucaaacaguauuguuguguuuuguggcaccucagguacauauggaacaggcucauggccugauggggcggaccucaaucucaugccuauauaa

SEQ ID NO: 55029 - RNA, 1410 nt, Artificial Sequence; identical to SEQ ID NO: 54941
  derived and/or modified CDS sequence (wt) from neuraminidase__InfluenzaA__AFN19578

SEQ ID NO: 55030 - RNA, 1410 nt, Artificial Sequence; identical to SEQ ID NO: 54941
  derived and/or modified CDS sequence (wt) from neuraminidase__InfluenzaA__AFN19582

SEQ ID NO: 55031 - RNA, 1410 nt, Artificial Sequence; identical to SEQ ID NO: 54941
  derived and/or modified CDS sequence (wt) from neuraminidase__InfluenzaA__AFN19584

SEQ ID NO: 55032 - RNA, 1410 nt, Artificial Sequence
  derived and/or modified CDS sequence (wt) from neuraminidase__InfluenzaA__AFN19588
augaauccaaaucaaaagauaauaacgauuggcucuguuucucucaccauuuccacaauaugcuucuucaugcaaauugccaucuugauaacuacuguaacauugcauuucaagcaauaugaauucaacucccccccaaacaaccaagugaugcugugugaaccaacaauaauagaaagaaacauaacagagauaguguaucugaccaacaccaccauagagaaggaaauaugccccaaaccagcagaauacagaaauuggucaaaaccgcaaugugacauuacaggauuugcaccuuuuucuaaggacaauucgauuaggcuuuccgcugguggggacaucugggugacaagagaaccuuaugugucaugcgauccugacaaguguuaucaauuugcccuuggacagggaacaacacuaaacaaugugcauucaaauaacacaguacgugauaggaccccuuaucggacucuauugaugaaugaguuagguguuccuuuucaucuggggaccaagcaagugugcauagcaugguccagcucaaguugucacgauggaaaagcauggcugcauguuuguauaacgggggaugauaaaaaugcaacugcuagcuucauuuacaaugggaggcuuguagauaguguuguuucaugguccaaagaaauucucaggacccaggagucagaaugcguuuguaucaauggaacuuguacaguaguaaugacugauggaagugcuucaggaaaagcugauacuaaaauacuauucauugaggaggggaaaaucguucauacuagcacauugucaggaagugcucagcaugucgaggagugcucuugcuauccucgauauccuggugucagaugugucugcagagacaacuggaaaggcuccaauaggcccaucguagauauaaacauaaaggaucauagcauugucuccaguuauguguguucaggacuuguuggagacacgcccagaaaaaacgacagcuccagcaguagccauuguuuggauccuaacaaugaagaagguggucauggagugaaaggcugggccuuugaugauggaaaugacguuuggaugggaagaacaaucaacgagacgucacgcuuaggguaugaaaccuucaaagucauugaaggcugguccaacccuaaguccaaauugcagauaaauaggcaagucauaguugacagaggugauagguccgguuauucugguauuuucucuguugaaggcaaaagcugcaucaaucggugcuuuuauguggaguugauuaggggaagaaaagaggaaacugaagucuuguggaccucaaacaguauuguuguguuuuguggcaccucagguacauauggaacaggcucauggccugauggggcggaccucaaucuaaugccuauauaa

SEQ ID NO: 55033 - RNA, 1410 nt, Artificial Sequence; identical to SEQ ID NO: 54941
  derived and/or modified CDS sequence (wt) from neuraminidase__InfluenzaA__AFN19590

SEQ ID NO: 55034 - RNA, 1410 nt, Artificial Sequence; identical to SEQ ID NO: 54970
  derived and/or modified CDS sequence (wt) from neuraminidase__InfluenzaA__AFN19592

SEQ ID NO: 55035 - RNA, 1410 nt, Artificial Sequence; identical to SEQ ID NO: 54941
  derived and/or modified CDS sequence (wt) from neuraminidase__InfluenzaA__AFN19594

SEQ ID NO: 55036 - RNA, 1410 nt, Artificial Sequence; identical to SEQ ID NO: 54946
  derived and/or modified CDS sequence (wt) from neuraminidase__InfluenzaA__AFN19596

SEQ ID NO: 55037 - RNA, 1410 nt, Artificial Sequence; identical to SEQ ID NO: 54946
  derived and/or modified CDS sequence (wt) from neuraminidase__InfluenzaA__AFN19600

SEQ ID NO: 55038 - RNA, 1410 nt, Artificial Sequence
  derived and/or modified CDS sequence (wt) from neuraminidase__InfluenzaA__AFN19602
augaauccaaaucaaaagauaauaacgauuggcucuguuucucucacccuuuccacaauaugcuucuucaugcaaauugccaucuugauaacuacuguaacauugcauuucaagcaauaugaauucaacucccccccaaacaaccaagugaugcugugugaaccaacaauaauagaaagaaacaugacagagauaguguaucugaccaacaccaccauagagaaggaaauaugccccaaaccagcagaauacagaaauuggucaaaaccgcaaugugacauuacaggauuugcaccuuuuucuaaggacaauucgauuaggcuuuccgcugguggggacaucugggugacaagagaaccuuaugugucaugcgauccugacaaguguuaucaauuugcccuuggacagggaacaacacuaaacaacgugcauucaaauaacacaguacgugauaggaccccuuaucggacucuauugaugaaugaguuagguguuccuuuucaucuggggaccaagcaagugugcauagcaugguccagcucaaguugucacgauggaaaagcauggcugcauguuuguauaacgggggaugauaaaaaugcaacugcuagcuucaucuacaaugggaggcuuguagauaguguuguuucaugguccaaagaaauucucaggacccaggaaucagaaugcguuuguaucaauggaacuuguacaguaguaaugacugauggaagugcuucaggaaaagcugauacuaaaauacuauucauugaggaggggaaaaucguucauacuagcacauugucaggaagugcucagcaugucgaggagugcucuugcuauccucgauauccuggugucagaugugucugcagagacaacuggaaaggcuccaauaggcccaucguagauauaaacauaaaagaucauagcauuguuuccaguuauguguguucaggacuuguuggagacacacccagaaaaaacgacagcucaagcaguagccauuguuuggauccuaacaaugaagaagguggucauggagugaaaggcugggccuuugaugauggaaaugacguguggaugggaagaacaaucaacgagacgucacguuuaggguaugaaaccuucaaagucauugaaggcugguccaacccuaaguccaaauugcagauaaauaggcaagucauaguugacagaagugauagguccgguuauucugguauuuucucuguugaaggcaaaaguugcaucaaucggugcuuuuauguggaguugauuaggggaagaaaagaggaaacugaagucuuguggaccucaaacaguauuguuguguuuuguggcaccucagguacauauggaacaggcucauggccugauggggcggaccucaaucucaugccuauauaa

SEQ ID NO: 55039 - RNA, 1410 nt, Artificial Sequence; identical to SEQ ID NO: 54941
  derived and/or modified CDS sequence (wt) from neuraminidase__InfluenzaA__AFN19604

SEQ ID NO: 55040 - RNA, 1410 nt, Artificial Sequence
  derived and/or modified CDS sequence (wt) from neuraminidase__InfluenzaA__AFN19606
augaauccaaaucaaaagauaauaacgauuggcucuguuucucucaccauuuccacaauaugcuucuucaugcaaauugccaucuugauaacuacuguaacauugcauuucaagcaauaugaauucaacucccccccaaacaaccaagugaugcugugugaaccaacaauaauagaaagaaacauaacagagauaguguaucugaccaacaccaccauagagaaggaaauaugccccaaaccagcagaauacagaaauuggucaaaaccgcaaugugacauuacaggauuugcaccuuuuucuaaggacaauucgauuaggcuuuccgcugguggggacaucugggugacaagagaaccuuaugugucaugcgauccugacaaguguuaucaauuugcccuuggacagggaacuacacuaaacaaugugcauucaaauaacacaguacgugauaggaccccuuaucggacucuauugaugaaugaguuagguguuccuuuucaucuggggaccaagcaagugugcauagcaugguccagcucaaguugucacgauggaaaagcauggcugcauguuuguauaacgggggaugauaaaaaugcaacugcuagcuucauuuacaaugggaggcuuguagauaguguuguuucaugguccaaagaaauucucaggacccaggagucagaaugcguuuguaucaauggaacuuguacaguaguaaugacugauggaagugcuucaggaaaagcugauacuaaaauacuauucauugaggaggggaaaaucguucauacuagcacauugucaggaagugcucagcaugucgaggagugcucuugcuauccucgauauccuggugucagaugugucugcagagacaacuggaaaggcuccaauaggcccaucguagauauaaacauaaaggaucauagcauugucuccaguuauguguguucaggacuuguuggagacacgcccagaaaaaacgacagcuccagcaguagccauuguuuggauccuaacaaugaagaagguggucauggagugaaaggcugggccuuugaugauggaaaugacguuuggaugggaagaacaaucaacgagacaucacgcuuaggguaugaaaccuucaaagucauugaaggcugguccaacccuaaguccaaauugcagauaaauaggcaagucauaguugacagaggugauagguccgguuauucugguauuuucucuguugaaggcaaaagcugcaucaaucggugcuuuuauguggaguugauuaggggaagaaaagaggaaacugaagucuuguggaccucaaacaguauuguuguguuuuguggcaccucagguacauauggaacaggcucauggccugauggggcggaccucaaucucaugccuauauaa

SEQ ID NO: 55041 - RNA, 1410 nt, Artificial Sequence; identical to SEQ ID NO: 54937
  derived and/or modified CDS sequence (wt) from neuraminidase__InfluenzaA__AFN19608

SEQ ID NO: 55042 - RNA, 1410 nt, Artificial Sequence
  derived and/or modified CDS sequence (wt) from neuraminidase__InfluenzaA__AFN19610
augaauccaaaucaaaagauaauaacgauuggcucuguuucucucaccauuuccacaauaugcuucuucaugcaaauugccaucuugauaacuacuguaacauugcauuucaagcaauaugaauucaacucccccccaaacaaccaagugaugcugugugaaccaacaauaauagaaagaaacauaacagagauaguguaucugaccaacaccaccauagagaaggaaauaugccccaaaccagcagaauacagaaauuggucaaaaccgcaaugugacauuacaggauuugcaccuuuuucuaaggacaauucgauuaggcuuuccgcugguggggacaucugggugacaagagaaccuuaugugucaugcgauccugacaaguguuaucaauuugcccuuggacagggaacaacacuaaacaaugugcauucaaauaacacaguacgugauaggaccccuuaucggacucuauugaugaaugaguuagguguuccuuuucaucuggggaccaagcaagugugcauagcaugguccagcucaaguugucacgauggaaaagcauggcugcauguuuguauaacgggggaugauaaaaaugcaacugcuagcuucauuuacaaugggaggcuuguagauaguguuguuucaugguccaaagaaauucucaggacccaggagucagaaugcguuuguaucaauggaacuuguacaguaguaaugacugauggaagugcuucaggaaaagcugauacuaaaauacuauucauugaggaggggaaaaucguucauacuagcacauugucaggaagugcucagcaugucgaggagugcucuugcuauccucgauauccuggugucagaugugucugcagagacaacuggaaaggcuccaauaggcccaucguagauauaaacauaaaggaucauagcauugucuccaguuauguguguucaggacuuguuggagacacacccagaaaaaacgacagcuccagcaguagccauuguuuggauccuaacaaugaagaagguggucauggagugaaaggcugggccuuugaugauggaaaugacguguggaugggaagaacaaucaacgagacgucacgcuuaggguaugaaaccuucaaagucauugaaggcugguccaacccuaaguccaaauugcagauaaauaggcaagucauaguugacagaggugauagguccgguuauucugguauuuucucuguugaaggcaaaagcugcaucaaucggugcuuuuauguggaguugauuaggggaagaaaagaggaaacugaagucuuguggaccucaaacaguauuguuguguuuuguggcaccucagguacauauggaacaggcucauggccugauggggcggaccucaaucucaugccuauauaa

SEQ ID NO: 55043 - RNA, 1410 nt, Artificial Sequence; identical to SEQ ID NO: 54946
  derived and/or modified CDS sequence (wt) from neuraminidase__InfluenzaA__AFN19612

SEQ ID NO: 55044 - RNA, 1410 nt, Artificial Sequence
  derived and/or modified CDS sequence (wt) from neuraminidase__InfluenzaA__AFN19614
augaacccaaaucaaaagauaauaacgauuggcucuguuucucucaccauuuccacaauaugcuucuucaugcaaauugccaucuugauaacuacuguaacauugcauuucaagcaauaugaauucaacucccccccaaacaaccaagugaugcugugugaaccaacaauaauagaaagaaacauaacagagauaguguaucugaccaacaccaccauagagaaggaaauaugccccaaaccagcagaauacagaaauuggucaaaaccgcaauguggcauuacaggauuugcaccuuucucuaaggacaauucgauuaggcuuuccgcugguggggacaucugggugacaagagaaccuuaugugucaugcgauccugacaaguguuaucaauuugcccuuggacagggaacaacacuaaacaacgugcauucaaauaacacaguacgugauaggaccccuuaucggacucuauugaugaaugaguuggguguuccuuuucaucuggggaccaagcaagugugcauagcaugguccagcucaaguugucacgauggaaaagcauggcugcauguuuguauaacgggggaugauaaaaaugcaacugcuagcuucauuuacaaugggaggcuuguagauaguguuguuucaugguccaaagaaauucucaggacccaggagucagaaugcguuuguaucaauggaacuuguacaguaguaaugacugauggaagugcuucaggaaaagcugauacuaaaauacuauucauugaggaggggaaaaucguucauacuagcacauugucaggaagugcucagcaugucgaagagugcucuugcuauccucgauauccuggugucagaugugucugcagagacaacuggaaaggcuccaauaggcccaucguagauauaaacauaaaggaucauagcauuguuuccaguuauguguguucaggacuuguuggagacacacccagaaaaaacgacagcuccagcaguagccauuguuuggauccuaacaaugaagaagguggucauggagugaaaggcugggccuuugaugauggaaaugacguguggaugggaagaacaaucaacgagacgucacgcuuaggguaugaaaccuucaaagucauugaaggcugguccaacccuaaguccaaauugcagauaaauaggcaagucauaguugacagaggugauagguccgguuauucugguauuuucucuguugaaggcaaaagcugcaucaaucggugcuuuuauguggaguugauuaggggaagaaaagaggaaacugaagucuuguggaccucaaacaguauuguuguguuuuguggcaccucagguacauauggaacaggcucauggccugauggggcggaccucaaucucaugccuauauaa

SEQ ID NO: 55045 - RNA, 1410 nt, Artificial Sequence
  derived and/or modified CDS sequence (wt) from neuraminidase__InfluenzaA__AFN19618
augaauccaaaucaaaagauaauaacgauuggcucuguuucucucaccauuuccacaauaugcuucuucaugcaaauugccaucuugauaacuacuguaacauugcauuucaagcaauaugaauucaacucccccccaaacaaccaagugaugcugugugaaccaacaauaauagaaagaaacauaacagagauaguguaucugaccaacaccaccauagagaaggaaauaugccccaaaccagcagaauacagaaauuggucaaaaccgcaauguggcauuacaggauuugcaccuuuuucuaaggacaauucgauuaggcuuuccgcugguggggacaucugggugacaagagaaccuuaugugucaugcgauccugacaaguguuaucaauuugcccuuggacagggaacaacacuaaacaacgugcauucaaauaacacaguacgugauaggaccccuuaucggacucuauugaugaaugaguuggguguuccuuuucaucuggggaccaagcaagugugcauagcaugguccagcucaaguugucacgauggaaaagcauggcugcauguuuguauaacgggggaugauaaaaaugcaacugcuagcuucauuuacaaugggaggcuuguagauaguguuguuucaugguccaaugaaauucucaggacccaggagucagaaugcguuuguaucaauggaacuuguacaguaguaaugacugauggaagugcuucaggaaaagcugauacuaaaauacuauucauugaggaggggaaaaucguucauacuagcacauugucaggaagugcucagcaugucgaagagugcucuugcuauccucgauauccuggugucagaugugucugcagagacaacuggaaaggcuccaauaggcccaucguagauauaaacauaaaggaucauagcauuguuuccaguuauguguguucaggacuuguuggagacacacccagaaaaaacgacagcuccagcaguagccauuguuuggauccuaauaaugaagaagguggucauggagugaaaggcugggccuuugaugauggaaaugacguguggaugggaagaacaaucaacgagacgucacgcuuaggguaugaaaccuucaaagucauugaaggcugguccaacccuaaguccaaauugcagauaaauaggcaagucauaguugacagaggugauagguccgguuauucugguauuuucucuguugagggcaaaagcugcaucaaucggugcuuuuauguggaguugauuaggggaagaaaagaggaaacugaagucuuguggaccucaaacaguauuguuguguuuuguggcaccucagguacauauggaacaggcucauggccugauggggcggaccucaaucucaugccuauauaa

SEQ ID NO: 55046 - RNA, 1410 nt, Artificial Sequence; identical to SEQ ID NO: 54937
  derived and/or modified CDS sequence (wt) from neuraminidase__InfluenzaA__AFN19620

SEQ ID NO: 55047 - RNA, 1410 nt, Artificial Sequence; identical to SEQ ID NO: 54970
  derived and/or modified CDS sequence (wt) from neuraminidase__InfluenzaA__AFN19624

SEQ ID NO: 55048 - RNA, 1410 nt, Artificial Sequence; identical to SEQ ID NO: 54941
  derived and/or modified CDS sequence (wt) from neuraminidase__InfluenzaA__AFN19630

SEQ ID NO: 55049 - RNA, 1410 nt, Artificial Sequence
  derived and/or modified CDS sequence (wt) from neuraminidase__InfluenzaA__AFN19632
augaauccaaaucaaaagauaauaacgauuggcucuguuucucucaccauuuccacaauaugcuucuucaugcaaauugccaucuugauaacuacuguaacauugcauuucaagcaauaugaauucaacucccccccaaacaaccaagugaugcugugugaaccaacaauaauagaaagaaacauaacagagauaguguaucugaccaacaccaccauagagaaggaaauaugccccaaaccaacagaauacagaaauuggucaaaaccgcaaugugacauuacaggauuugcaccuuuuucuaaggacaauucgauuaggcuuuccgcugguggggacaucugggugacaagagaaccuuaugugucaugcgauccugacaaguguuaucaauuugcccuuggacagggaacaacacugaacaaugugcauucaaauaacacaguacgugauaggaccccuuaucggacucuauugaugaaugaguuagguguuccuuuucaucuggggaccaagcaagugugcauagcaugguccagcucaaguugucacgauggaaaagcauggcugcauguuuguauaacgggggaugauaaaaaugcaacugcuagcuucauuuacaaugggaggcuuguagauaguguuguuucaugguccaaagaaauucucaggacccaggagucagaaugcguuuguaucaauggaacuuguacaguaguaaugacugauggaagugcuucaggaaaagcugauacuaaaauacuauucauugaggaggggaaaaucguucauacuagcacauugucaggaagugcucagcaugucgaggagugcucuugcuauccucgauauccuggugucagaugugucugcagagacaacuggaaaggcuccaauaggcccaucguagauauaaacauaaaggaucauagcauugucuccaguuauguuuguucaggacuuguuggagacacacccagaaaaaacgacagcuccagcaguagccauuguuuggauccuaacaaugaagaagguggucauggagugaaaggcugggccuuugaugauggaaaugacguguggaugggaagaacaaucaacgagacgucacgcuuaggguaugaaaccuucaaagucauugaaggcugguccaacccuaaguccaaauugcagauaaauaggcaagucauaguugacagaggugauagguccgguuauucugguauuuucucuguugaaggcaaaagcugcaucaaucggugcuuuuauguggaguugauuaggggaagaaaagaggaaacugaagucuuguggaccucaaacaguauuguuguguuuuguggcaccucagguacauauggaacaggcucauggccugauggggcggaccucaaucucaugccuauauaa

SEQ ID NO: 55050 - RNA, 1410 nt, Artificial Sequence
  derived and/or modified CDS sequence (wt) from neuraminidase__InfluenzaA__AFN19634
augaauccaaaucaaaagauaauaacgauuggcucuguuucucucaccauuuccacaauaugcuucuucaugcaaauugccaucuugauaacuacuguaacauugcauuucaagcaauaugaauucaacucccccccaaacaaccaagugaugcugugugaaccaacaauaauagaaagaaacauaacagagauaguguaucugaccaacaccaccauagagaaggaaauaugccccaaaccagcagaauacagaaauuggucaaaaccgcaaugugacauuacaggauuugcaccuuuuucuaaggacaauucgauuagacuuuccgcugguggggacaucugggugacaagagaaccuuaugugucaugcgauccugacaaguguuaucaauuugcccuuggacagggaacaacacuaaacaaugugcauucaaauaacacaguacgugauaggaccucuuaucggacuuuauugaugaaugaguuagguguuccuuuucaucuggggaccaagcaagugugcauagcaugguccagcucaaguugucacgauggaaaagcauggcugcauguuuguauaacgggggaugauaaaaaugcaacugcuagcuucauuuacaaugggaggcuuguagauaguguuguuucaugguccaaagaaauucucaggacccaggagucagaaugcguuuguaucaauggaacuuguacaguaguaaugacugauggaagugcuucaggaaaagcugauacuaaaauacuauucauugaggaggggaaaaucguucauacuagcacauugucaggaagugcucagcaugucgaggagugcucuugcuauccucgauauccuggugucagaugugucugcagagacaacuggaaaggcuccaauaggcccaucguagauauaaacauaaaggaucauagcauugucuccaguuauguuuguucaggacuuguuggagacacacccagaaaaaacgacagcuccagcaguagccauuguuuggauccuaacaaugaagaagguggucauggagugaaaggcugggccuuugaugauggaaaugacguguggaugggaagaacaaucaacgagacgucacgcuuaggguaugaaaccuucaaagucauugaaggcugguccaacccuaaguccaaauugcagauaaauaggcaagucauaguugacagaggugauagguccgguuauucugguauuuucucuguugaaggcaaaagcugcaucaaucggugcuuuuauguggaguugauuaggggaagaaaagaggaaacugaagucuuguggaccucaaacaguauuguuguguuuuguggcaccucagguacauauggaacaggcucauggccugauggggcggaccucaaucucaugccuauauaa

SEQ ID NO: 55051 - RNA, 1410 nt, Artificial Sequence
  derived and/or modified CDS sequence (wt) from neuraminidase__InfluenzaA__AFN19636
augaauccaaaucaaaagauaauaacgauuggcucuguuucucucaccauuuccacaauaugcuucuucaugcaaauugccaucuugauaacuacuguaacauugcauuucaagcaauaugaauucaacucccccccaaacaaccaagugaugcugugugaaccaacaauaauagaaagaaacauaacagagauaguguaucugaccaacaccaucauagagaaggaaauaugccccaaaccaacagaauacagaaauuggucaaaaccgcaaugugacauuacaggauuugcaccuuuuucuaaggacaauucgauuaggcuuuccgcugguggggacaucugggugacaagagaaccuuaugugucaugcgauccugacaaguguuaucaauuugcccuuggacagggaacaacacuaaacaaugugcauucaaauaacacaguacgugauaggaccccuuaucggacucuauugaugaaugaguuagguguuccuuuucaucuggggaccaagcaagugugcauagcaugguccagcucaaguugucacgauggaaaagcauggcugcauguuuguauaacgggggaugauaaaaaugcaacugcuagcuucauuuacaaugggaggcuuguagauaguguuguuucaugguccaaagaaauucucaggacccaggagucagaaugcguuuguaucaauggaacuuguacaguaguaaugacugauggaagugcuucaggaaaagcugauacuaaaauacuauucauugaggaggggaaaaucguucauacuagcacauugucaggaagugcucagcaugucgaggagugcucuugcuauccucgauauccuggugucagaugugucugcagagacaacuggaaaggcuccaauaggcccaucguagauauaaacauaaaggaucauagcauugucuccaguuauguuuguucaggacuuguuggagacacacccagaaaaaacgacagcuccagcaguagccauuguuuggauccuaacaaugaagaagguggucauggagugaaaggcugggccuuugaugauggaaaugacguguggaugggaagaacaaucaacgagacgucacgcuuaggguaugaaaccuucaaagucauugaaggcugguccaacccuaaguccaaauugcagauaaauaggcaagucauaguugacagaggugauagguccgguuauucugguauuuucucuguugaaggcaaaagcugcaucaaucggugcuuuuauguggaguugauuaggggaagaaaagaggaaacugaagucuuguggaccucaaacaguauuguuguguuuuguggcaccucagguacauauggaacaggcucauggccugauggggcggaccucaaucucaugccuauauaa

SEQ ID NO: 55052 - RNA, 1410 nt, Artificial Sequence
  derived and/or modified CDS sequence (wt) from neuraminidase__InfluenzaA__AFN19638
augaauccaaaucaaaagauaauaacgauuggcucuguuucucuaaccauuuccacaauaugcuucuucaugcaaauugccaucuugauaacuacuguaacauugcauuucaagcaauaugaauucaacucccccccaaacaaccaagugaugcugugugaaccaacaauaauagaaagaaacauaacagagauaguguaucugaccaacaccaucauagagaaggaaauaugccccaaaccaacagaauacagaaauuggucaaaaccgcaaugugacauuacaggauuugcaccuuuuucuaaggacaauucgauuaggcuuuccgcugguggggacaucugggugacaagagaaccuuaugugucaugcgauccugacaaguguuaucaauuugcccuuggacagggaacaacacuaaacaaugugcauucaaauaacacaguacgugauaggaccccuuaucggacucuauugaugaaugaguuagguguuccuuuucaucuggggaccaagcaagugugcauagcaugguccagcucaaguugucacgauggaaaagcauggcugcauguuuguauaacgggggaugauaaaaaugcaacugcuagcuucauuuacaaugggaggcuuguagauaguguuguuucaugguccaaagaaauucucaggacccaggagucagaaugcguuuguaucaauggaacuuguacaguaguaaugacugauggaagugcuucaggaaaagcugauacuaaaauacuauucauugaggaggggaaaaucguucauacuagcacauugucaggaagugcucagcaugucgaggagugcucuugcuauccucgauauccuggugucagaugugucugcagagacaacuggaaaggcuccaauaggcccaucguagauauaaacauaaaggaucauagcauugucuccaguuauguuuguucaggacuuguuggagacacacccagaaaaaacgacagcuccagcaguagccauuguuuggauccuaacaaugaagaagguggucauggagugaaaggcugggccuuugaugauggaaaugacguguggaugggaagaacaaucaacgagacgucacgcuuaggguaugaaaccuucaaagucauugaaggcugguccaacccuaaguccaaauugcagauaaauaggcaagucauaguugacagaggugauagguccgguuauucugguauuuucucuguugaaggcaaaagcugcaucaaucggugcuuuuauguggaguugauuaggggaagaaaagaggaaacugaagucuuguggaccucaaacaguauuguuguguuuuguggcaccucagguacauauggaacaggcucauggccugauggggcggaccucaaucucaugccuauauaa

SEQ ID NO: 55053 - RNA, 1410 nt, Artificial Sequence
  derived and/or modified CDS sequence (wt) from neuraminidase__InfluenzaA__AFN19640
augaauccaaaucaaaagauaauaacgauuggcucuguuucucucaccauuuccacaauaugcuucuuuaugcaaauugccaucuugauaacuacuguaacauugcauuucaagcaauaugaauucaacucccccccaaacaaccaagugaugcugugugaaccaacaauaauagaaagaaacauaacagagauaguguaucugaccaacaccaccauagagaaggaaauaugccccaaaccggcagaauacagaaauuggucaaaaccgcaaugugacauuacaggauuugcaccuuuuucuaaggacaauucgauuaggcuuuccgcugguggggacaucugggugacaagagaaccuuaugugucaugcgauccugacaaguguuaucaauuugcccuuggacagggaacaacacuaaacaaugugcauucaaauaacacaguacgugauaggaccccuuaucggacuuuauugaugaaugaguuagguguuccuuuucaucuggggaccaagcaagugugcauagcaugguccagcucaaguugucacgauggaaaagcauggcugcauguuuguauaacgggggaugauaaaaacgcaacugcuagcuucauuuacaaugggaggcuuguagauaguguuguuucaugguccaaagaaauucucaggacccaggagucagaaugcguuuguaucaauggaacuuguacaguaguaaugacugauggaagugcuucaggaaaagcugauacuaaaauacuauucauugaggaggggaaaaucguucauacuagcacauugucaggaagugcucagcaugucgaggagugcucuugcuauccucgauauccuggugucagaugugucugcagagacaacuggaaaggcuccaauaggcccaucguagauauaaacauaaaggaucauagcauugucuccaguuauguguguucaggacuuguuggagacacacccagaaaaaacgacagcuccagcaguagccauuguuuggauccuaacaaugaagaagguggucauggagugaaaggcugggccuuugaugauggaaaugacguguggaugggaagaacaaucaacgagacgucacgcuuaggguaugaaaccuucaaagucauugaaggcugguccaacccuaaguccaaauugcagauaaauaggcaagucauaguugacagaggugauagguccgguuauucugguauuuucucuguugaaggcaaaagcugcaucaaucggugcuuuuauguggaguugauuaggggaagaaaagaggaaacugaagucuuguggaccucaaacaguauuguuguguuuuguggcaccucagguacauauggaacaggcucauggccugauggggcggaccucaaucucaugccuauauaa

SEQ ID NO: 55054 - RNA, 1410 nt, Artificial Sequence
  derived and/or modified CDS sequence (wt) from neuraminidase__InfluenzaA__AFN19642
augaauccaaaucaaaagauaauaacgauuggcucuguuucucucaccauuuccacaauaugcuucuucaugcaaauugccaucuugauaacuacuguaacauugcauuucaagcaauaugaauucaacucccccccaaacaaccaagugaugcugugugaaccaacaauaauagaaagaaacaugacagagauaguguaucugaccaacaccaccauagagaaggaaauaugccccaaaccagcagaauacagaaauuggucaaaaccgcaaugugacauuacaggauuugcaccuuuuucuaaggacaauucgauuaggcuuuccgcugguggggacaucugggugacaagagaaccuuaugugucaugcgauccugacaaguguuaucaauuugcccuuggacagggaacaacacuaaacaacgugcauucaaauaacacaguaagugauaggaccccuuaucggacucuauugaugaaugaguuagguguuccuuuucaucuggggaccaagcaagugugcauagcaugguccagcucaaguugucacgauggaaaagcauggcugcauguuuguauaacgggggaugauaaaaaugcaacugcuagcuucaucuacaaugggaggcuuguagauaguguuguuucaugguccaaagaaauucucaggacccaggaaucagaaugcguuuguaucaauggaacuuguacaguaguaaugacugaugggagugcuucaggaaaagcugauacuaaaauacuauucauugaggaggggaaaaucguucauacuagcacauugucaggaagugcucagcaugucgaggagugcucuugcuauccucgauauccuggugucagaugugucugcagagacaacuggaaaggcuccaauaggcccaucguagauauaaacauaaaagaucauagcauuguuuccaguuauguguguucaggacuuguuggagacacacccagaaaaaacgacagcucaagcaguagccauuguuuggauccuaacaaugaagaagguggucauggagugaaaggcugggccuuugaugauggaaaugacguguggaugggaagaacaaucaacgagacgucacguuuaggguaugaaaccuucaaagucauugaaggcugguccaacccuaaguccaaauugcagauaaauaggcaagucauaguugacagaagugauagguccgguuauucugguauuuucucuguugaaggcaaaaguugcaucaaucggugcuuuuauguggaguugauuaggggaagaaaagaggaaacugaagucuuguggaccucaaacaguauuguuguguuuuguggcaccucagguacauauggaacaggcucauggccugauggggcggaccucaaucucaugccuauauaa

SEQ ID NO: 55055 - RNA, 1410 nt, Artificial Sequence; identical to SEQ ID NO: 55051
  derived and/or modified CDS sequence (wt) from neuraminidase__InfluenzaA__AFN19644

SEQ ID NO: 55056 - RNA, 1410 nt, Artificial Sequence
  derived and/or modified CDS sequence (wt) from neuraminidase__InfluenzaA__AFN19646
augaauccaaaucaaaagauaauaacgauuggcucuguuucucucaccauuuccacaauaugcuucuucauacaaauugccaucuugauaacuacuguaacauugcauuucaagcaauaugaauucaacucccccccaaacaaccaagugaugcugugugaaccaacaauaauagaaagaaacauaacagagauaguguaucugaccaacaccaccauagagaaggaaauaugccccaaaccagcagaauacagaaauuggucaaaaccgcaaugugacauuacaggauuugcaccuuuuucuaaggacaauucgauuaggcuuuccgcugguggggacaucugggugacaagagaaccuuaugugucaugcgauccugacaaguguuaucaauuugcccuuggacagggaacaacacuaaacaaugugcauucaaauaacacaguacgugauaggaccccuuaucggacuuuauugaugaaugaguuagguguuccuuuucaucuggggaccaagcaagugugcauagcaugguccagcucaaguugucacgauggaaaagcauggcugcauguuuguauaacgggggaugauaaaaaugcaacugcuagcuucauuuacaaugggaggcuuguagauaguguuguuucaugguccaaagaaauucucaggacccaggagucagaaugcguuuguaucaauggaacuuguacaguaguaaugacugauggaagugcuucaggaaaagcugauacuaaaauacuauucauugaggaggggaaaaucguucauacuagcacauugucaggaagugcucagcaugucgaggagugcucuugcuauccucgauauccuggugucagaugugucugcagagacaacuggaaaggcuccaauaggcccaucguagauauaaacauaaaagaucauagcauuguuuccaguuauguguguucaggacuuguuggagacacacccagaaaaaacgacagcucaagcaguagccauuguuuggauccuaacaaugaagaagguggucauggagugaaaggcugggccuuugaugauggaaaugacguguggaugggaagaacaaucaacgagacgucacguuuaggguaugaaaccuucaaagucauugaaggcugguccaacccuaaguccaaauugcagauaaauaggcaagucauaguuaacagaagugauagguccgguuauucugguauuuucucuguugaaggcaaaaguugcaucaaucggugcuuuuauguggaguugauuaggggaagaaaagaggaaacugaagucuuguggaccucaaacaguauuguuguguuuuguggcaccucagguacauauggaacaggcucauggccugauggggcggaccucaaucucaugccuauauaa

SEQ ID NO: 55057 - RNA, 1410 nt, Artificial Sequence
  derived and/or modified CDS sequence (wt) from neuraminidase__InfluenzaA__AFN19648
augaauccaaaucaaaagauaauaacgauuggcucuguuucucucaccauuuccacaauaugcuucuucaugcaaauugccaucuugauaacuacuguaacauugcauuucaagcaauaugaauucaacucccccccaaacaaccaagugaugcugugugaaccaacaauaauagaaagaaacauaacagagauaguguaucugaccaacaccaccauagagaaggaaauaugccccaaaccagcagaauacagaaauuggucaaaaccgcaaugugacauuacaggauuugcaccuuuuuccaaggacaauucgauuaggcuuuccgcugguggggacaucugggugacaagagaaccuuaugugucaugcgauccugacaaguguuaucaauuugcccuuggacagggaacaacacuaaacaaugugcauucaaauaacacaguacgugauaggaccccuuaucggacucuauugaugaaugaguuagguguuccuuuucaucuggggacuaagcaagugugcauagcaugguccagcucaaguugucacgauggaaaagcauggcugcauguuuguauaacgggggaugauaaaaaugcaacugcuagcuucauuuacaaugggaggcuuguagauaguguuguuucaugguccaaagaaauucucaggacccaggagucagaaugcguuuguaucaauggaacuuguacaguaguaaugacugauggaagugcuucaggaaaagcugauacuaaaauacuauucauugaggaggggaaaaucguucauacuagcacauugucaggaagugcucagcaugucgaggagugcucuugcuauccucgauauccugguguaagaugugucugcagagacaacuggaaaggcuccaauaggcccaucguagauauaaacauaaaggaucauagcauugucuccaguuauguguguucaggacuuguuggagacacacccagaaaaaacgacagcuccagcaguagccauuguuuggauccuaacaaugaagaagguggucauggagugaaaggcugggccuuugaugauggaaaugacguuuggaugggaagaacaaucaacgagacgucacgcuuaggguaugaaaccuucaaagucauugaaggcugguccaacccuaaguccaaauugcagauaaauaggcaagucauaguugacagaggugauagguccgguuauucugguauuuucucuguugaaggcaaaagcugcaucaaucggugcuuuuauguggaguugauuaggggaagaaaagaggaaacugaagucuuguggaccucaaacaguauuguuguguuuuguggcaccucagguacauauggaacaggcucauggccugauggggcggaccucaaucucaugccuauauaa

SEQ ID NO: 55058 - RNA, 1410 nt, Artificial Sequence; identical to SEQ ID NO: 54970
  derived and/or modified CDS sequence (wt) from neuraminidase__InfluenzaA__AFN19650

SEQ ID NO: 55059 - RNA, 1410 nt, Artificial Sequence
  derived and/or modified CDS sequence (wt) from neuraminidase__InfluenzaA__AFN19652
augaauccaaaucaaaagauaauaacgauuggcucuguuucucucaccauuuccacaauaugcuucuuuaugcaaauugccaucuugauaacuacuguaacauugcauuucaagcaauaugaauucaacucccccccaaacaaccaagugaugcugugugaaccaacaauaauagaaagaaacauaacagagguaguguaucugaccaacaccaccauagagaaggaaauaugccccaaaccagcagaauacagaaauuggucaaaaccgcaaugugacauuacaggauuugcaccuuuuucuaaggacaauucgauuaggcuuuccgcugguggggacaucugggugacaagagaaccuuaugugucaugcgauccugacaaguguuaucaauuugcccuuggacagggaacaacacuaaacaaugugcauucaaauaacacaguacgugauaggaccccuuaucggacuuuauugaugaaugaguuagguguuccuuuucaucuggggaccaagcaagugugcauagcaugguccagcucaaguugucacgauggaaaagcauggcugcauguuuguauaacgggggaugauaaaaaugcaacugcuagcuucauuuacaaugggaggcuuguagauaguguuguuucaugguccaaagaaauucucaggacccaggagucagaaugcguuuguaucaauggaacuuguacaguaguaaugacugauggaagugcuucaggaaaagcugauacuaaaauacuauucauugaggaggggaaaaucguucauacuagcacauugucaggaagugcucagcaugucgaggagugcucuugcuauccucgauauccuggugucagaugugucugcagagacaacuggaaaggcuccaauaggcccaucguagauauaaacauaaaggaucauagcauugucuccaguuauguguguucaggacuuguuggagacacacccagaaaaaacgacagcuccagcaguagccauuguuuggauccuaacaaugaagaagguggucauggagugaaaggcugggccuuugaugauggaaaugacguguggaugggaagaacaaucaacgagacgucacgcuuaggguaugaaaccuucaaagucauugaaggcugguccaacccuaaguccaaauugcagauaaauaggcaagucauaguugacagaggugauagguccgguuauucugguauuuucucuguugaaggcaaaagcugcaucaaucggugcuuuuauguggaguugauuaggggaagaaaagaggaaacugaagucuuguggaccucaaacaguauuguuguguuuuguggcaccucagguacauauggaacaggcucauggccugauggggcggaccucaaucucaugccuauauaa

SEQ ID NO: 55060 - RNA, 1410 nt, Artificial Sequence
  derived and/or modified CDS sequence (wt) from neuraminidase__InfluenzaA__AFN19654
augaauccaaaucaaaagauaauaacgauuggcucuguuucucucaccauuuccacaauaugcuucuucaugcaaauugccaucuugauaacuacuguaacauugcauuucaagcaauaugaauucaacucccccccaaacaaccaagugaugcugugugaaccaacaauaauagaaagaaacauaacagagauaguguaucugaccaacaccaccauagagaaggaaacaugccccaaaccaacagaauacagaaauuggucaaaaccgcaaugugacauuacaggauuugcaccuuuuucuaaggacaauucgauuaggcuuuccgcugguggggacaucugggugacaagagaaccuuaugugucaugcgauccugacaaguguuaucaauuugcccuuggacagggaacaacacuaaacaaugugcauucaaauaacacaguacgugauaggaccccuuaucggacucuauugaugaaugaguuagguguuccuuuucaucuggggaccaagcaagugugcauagcaugguccagcucaaguugucacgauggaaaagcauggcugcauguuuguauaacgggggaugauaaaaaugcaacugcuagcuucauuuacaaugggaggcuuguagauaguguuguuucaugguccaaagagauucucaggacccaggagucagaaugcguuuguaucaauggaacuuguacaguaguaaugacugauggaagugcuucaggaaaagcugauacuaaaauacuauucauugaggaggggaaaaucguucauacuagcacauugucaggaagugcucagcaugucgaggagugcucuugcuauccucgauauccuggugucagaugugucugcagagacaacuggaaaggcuccaauaggcccaucguagauauaaacauaaaggaucauagcauugucuccaguuauguuuguucaggacuuguuggagacacacccagaaaaaacgacagcuccagcaguagccauuguuuggauccuaacaaugaagaagguggucauggagugaaaggcugggccuuugaugauggaaaugacguguggaugggaagaacaaucaacgagacgucacgcuuaggguaugaaaccuucaaagucauugaaggcugguccaacccuaaguccaaauugcagauaaauaggcaagucauaguugacagaggugauagguccgguuauucugguauuuucucuguugaaggcaaaagcugcaucaaucggugcuuuuauguggaguugauuaggggaagaaaagaggaaacugaagucuuguggaccucaaacaguauuguuguguuuuguggcaccucagguacauauggaacaggcucauggccugauggggcggaccucaaucucaugccuauauaa

SEQ ID NO: 55061 - RNA, 1410 nt, Artificial Sequence
  derived and/or modified CDS sequence (wt) from neuraminidase__InfluenzaA__AFN19656
augaauccaaaucaaaagauaauaacgauuggcucuguuucucucaccauuuccacaauaugcuucuucaugcaaauugccaucuugauaacuacuguaacauugcauuucaagcaauaugaauucaacucccccccaaacaaccaagugaugcugugugaaccaacaauaauagaaagaaacauaacagagauaguguaucugaccaacaccaccauagagaaggaaauaugccccaaaccagcagaauacagaaauuggucaaaaccgcaaugugacauuacaggauuugcaccuuuuucuaaggacaauucgauuaggcuuuccgcugguggggacaucugggugacaagagaaccuuaugugucaugcgauccugacaaguguuaucaauuugcccuuggacagggaacaacacuaaacaaugugcauucaaauaacacaguacgugauaggaccccuuaucggacuuuauugaugaaugaguuagguguuccuuuucaucuggggaccaagcaagugugcauagcaugguccagcucaaguugucacgauggaaaagcauggcugcauguuuguauaacgggggaugauaaaaaugcaacugcuagcuucauuuacaaugggaggcuuguagauaguguuguuucaugguccaaagaaauucucagaacccaggagucagaaugcguuuguaucaauggaacuuguacaguaguaaugacugauggaagugcuucaggaaaagcugauacuaaaauacuauucauugaggaggggaaaaucguucauacuagcacauugucaggaagugcucagcaugucgaggagugcucuugcuauccucgauauccuggugucagaugugucugcagagacaacuggaaaggcuccaauaggcccaucguagauauaaacauaaaggaucauagcauugucuccaguuauguguguucaggacuuguuggagacacacccagaaaaaacgacagcuccagcaguagccauuguuuggauccuaacaaugaagaagguggucauggagugaaaggcugggccuuugaugauggaaaugacguguggaugggaagaacaaucaacgagacgucacgcuuaggguaugaaaccuucaaagucauugaaggcugguccaacccuaaguccaaauugcagauaaauaggcaagucauaguugacagaggugauagguccgguuauucugguauuuucucuguugaaggcaaaagcugcaucaaucggugcuuuuauguggaguugauuaggggaagaaaagaggaaacugaagucuuguggaccucaaacaguauuguuguguuuuguggcaccucagguacauauggaacaggcucauggccugauggggcggaccucaaucucaugccuauauaa

SEQ ID NO: 55062 - RNA, 1410 nt, Artificial Sequence; identical to SEQ ID NO: 54974
  derived and/or modified CDS sequence (wt) from neuraminidase__InfluenzaA__AFN19658

SEQ ID NO: 55063 - RNA, 1410 nt, Artificial Sequence; identical to SEQ ID NO: 55052
  derived and/or modified CDS sequence (wt) from neuraminidase__InfluenzaA__AFN19660

SEQ ID NO: 55064 - RNA, 1410 nt, Artificial Sequence; identical to SEQ ID NO: 54974
  derived and/or modified CDS sequence (wt) from neuraminidase__InfluenzaA__AFN19662

SEQ ID NO: 55065 - RNA, 1410 nt, Artificial Sequence
  derived and/or modified CDS sequence (wt) from neuraminidase__InfluenzaA__AFN19664
augaauccaaaucaaaagauaauaacgauuggcucuguuucucucaccauuuccacaauaugcuucuucaugcaaauugccaucuugauaacuacuguaacauugcauuucaagcaauaugaauucaacucccccccaaacaaccaagugaugcugugugaaccaacaauaauagaaagaaacauaacagagauaguguaucugaccaacaacaccauagagaaggaaauaugccccaaaccagcagaauacagaaauuggucaaaaccgcaauguggcauuacaggauuugcaccuuucucuaaggacaauucgauuaggcuuuccgcugguggggacaucugggugacaagagaaccuuaugugucaugcgauccugacaaguguuaucaauuugcccuuggacagggaacaacacuaaacaacgugcauucaaauaacacaguacgugauaggaccccuuaucggacucuauugaugaaugaguuggguguuccuuuucaucuggggaccaagcaagugugcauagcaugguccagcucaaguugucacgauggaaaagcauggcugcauguuuguauaacgggggaugauaaaaaugcaacugcuagcuucauuuacaaugggaggcuuguagauaguguuguuucaugguccaaagaaauucucaggacccaggagucagaaugcguuuguaucaauggaacuuguacaguaguaaugacugauggaagugcuucaggaaaagcugauacuaaaauacuauucauugaggaggggaaaaucguucauacuagcacauugucaggaagugcucagcaugucgaagagugcucuugcuauccucgauauccuggugucagaugugucugcagagacaacuggaaaggcuccaauaggcccaucguagauauaaacauaaaggaucauagcauuguuuccaguuauguguguucaggacuuguuggagacacacccagaaaaaacgacagcuccagcaguagccauuguuuggauccuaacaaugaagaagguggucauggagugaaaggcugggccuuugaugauggaaaugacguguggaugggaagaacaaucaacgagacgucacgcuuaggguaugaaaccuucaaagucauugaaggcugguccaacccuaaguccaaauugcagauaaauaggcaagucauaguugacagaggugauagguccgguuauucugguauuuucucuguugaaggcaaaagcugcaucaaucggugcuuuuauguggaguugauuaggggaagaaaagaggaaacugaagucuuguggaccucaaacaguauuguuguguuuuguggcaccucagguacauauggaacaggcucauggccugauggggcggaccucaaucucaugccuauauaa

SEQ ID NO: 55066 - RNA, 1410 nt, Artificial Sequence
  derived and/or modified CDS sequence (wt) from neuraminidase__InfluenzaA__AFN19666
augaauccaaaucaaaagauaauaacgauuggcucuguuucucucaccauuuccacaauaugcuucuucaugcaaauugccaucuugauaacuacuguaacauugcauuucaagcaauaugaauucaacucccccccaaacaaccaagugaugcugugugaaccaacaauaauagaaagaaacaugacagagauaguguaucugaccaacaccaccauagagaaggaaauaugccccaaaccagcagaauacagaaauuggucaaaaccgcaaugugacauuacaggauuugcaccuuuuucuaaggacaauucgauuaggcuuuccgcugguggggacaucugggugacaagagaaccuuaugugucaugcgauccugacaaguguuaucaauuugcccuuggacagggaacaacacuaaacaacgugcauucaaauaacacaguacgugauaggaccccuuaucggacucuauugaugaaugaguuagguguuccuuuucaucuggggaccaagcaagugugcauagcaugguccagcucaaguugucacgauggaaaagcauggcugcauguuuguauaacgggggaugauaaaaaugcaacugcuagcuucaucuacaaugggaggcuuguagauaguguuguuucaugguccaaagaaauucucaggacccaggaaucagaaugcguuuguaucaauggaacuuguacaguaguaaugacugauggaagugcuucaggaaaagcugauacuaaaauacuauucauugaggaggggaaaaucguucauacuagcacauugucaggaagugcucagcaugucgaggagugcucuugcuauccucgauauccuggugucagaugugucugcagagacaacuggaaaggcuccaauaggcccaucguagauauaaacauaaaagaucauagcauuguuuccaguuauguguguucaggacuuguuggagacacacccagaaaaaacgacagcucaagcaguagccauuguuuggauccuaacaaugaagaagguggucauggagugaaaggcugggccuuugaugauggaaaugacguguggaugggaagaacaaucaacgagacgucacguuuaggguaugaaaccuucaaagucauugaaggcugguccaacccuaaguccaaauugcagauaaauaggcaagucauaguuaacagaagugauagguccgguuauucugguauuuucucuguugaaggcaaaaguugcaucaaucggugcuuuuauguggaguugauuaggggaagaaaagaggaaacugaagucuuguggaccucaaacaguauuguuguguuuuguggcacuucagguacauauggaacaggcucauggccugauggggcggaccucaaucucaugccuauauaa

SEQ ID NO: 55067 - RNA, 1410 nt, Artificial Sequence
  derived and/or modified CDS sequence (wt) from neuraminidase__InfluenzaA__AFN19668
augaauccaaaucaaaagauaauaacgauuggcucuguuucucucaccauuuccacaauaugcuucuucaugcaaauugccaucuugauaacuacuguaacauugcauuucaagcaauaugaauucaacucccccccaaacaaccaagugaugcugugugaaccaacaauaauagaaagaaacaugacagagauaguguaucugaccaacaccaccauagagaaggaaauaugccccaaaccagcagaauacagaaauuggucaaaaccgcaaugugacauuacaggauuugcaccuuuuucuaaggacaauucgauuaggcuuuccgcugguggggacaucugggugacaagagaaccuuaugugucaugcgauccugacaaguguuaucaauuugcccuuggacagggaacaacacuaaacaacgagcauucaaauaacacaguacgugauaggaccccuuaucggacucuauugaugaaugaguuagguguuccuuuucaucuggggaccaagcaagugugcauagcaugguccagcucaaguugucacgauggaaaagcauggcugcauguuuguauaacgggggaugauaaaaaugcaacugcuagcuucaucuacaaugggaggcuuguagauaguguuguuucaugguccaaagaaauucucaggacccaggaaucagaaugcguuuguaucaauggaacuuguacaguaguaaugacugauggaagugcuucaggaaaagcugauacuaaaauacuauucauugaggaggggaaaaucguucauacuagcacauugucaggaagugcucagcaugucgaggagugcucuugcuauccucgauauccuggugucagaugugucugcagagacaacuggaaaggcuccaauaggcccaucguagauauaaacauaaaagaucauagcauuguuuccaguuauguguguucaggacuuguuggagacacacccagaaaaaacgacagcucaagcaguagccauuguuuggauccuaacaaugaagaagguggucauggagugaaaggcugggccuuugaugauggaaaugacguguggaugggaagaacaaucaacgagacgucacguuuaggguaugaaaccuucaaagucauugaaggcugguccaacccuaaguccaaauugcagauaaauaggcaagucauaguugacagaagugauagguccgguuauucugguauuuucucuguugaaggcaaaaguugcaucaaucggugcuuuuauguggaguugauuaggggaagaaaagaggaaacugaagucuuguggaccucaaacaguauuguuguguuuuguggcaccucagguacauauggaacaggcucauggccugauggggcggaccucaaucucaugccuauauaa

SEQ ID NO: 55068 - RNA, 1410 nt, Artificial Sequence
  derived and/or modified CDS sequence (wt) from neuraminidase__InfluenzaA__AFN19670
augaauccaaaucaaaagauaauaacgauuggcucuguuucucucaccauuuccacaauaugcuucuucaugcaaauugccaucuugauaacuacuguaacauugcauuucaagcaauaugaauucaacucccccccaaacaaccaagugaugcugugugaaccaacgauaauagaaagaaacaugacagagauaguguaucugaccaacaccaccauagagaaggaaauaugccccaaaccagcagaauacagaaauuggucaaaaccgcaaugugacauuacaggauuugcaccuuuuucgaaggacaauucgauuaggcuuuccgcugguggggacaucugggugacaagagaaccuuaugugucaugcgauccugacaaguguuaucaauuugcccuuggacagggaacaacacuaaacaacgugcauucaaauaacacaguacgugauaggaccccuuaucggacccuauugaugaaugaguuagguguuccuuuucaucuggggaccaagcaagugugcauagcaugguccagcucaaguugucacgauggaaaagcauggcugcauguuuguauaacgggggaugauaaaaaugcaacugcuagcuucaucuacaaugggaggcuuguagauaguguuguuucaugguccaaagaaauucucaggacccaggaaucagaaugcguuuguaucaauggaacuuguacaguaguaaugacugauggaagugcuucaggaaaagcugauacuaaaauacuauucauugaggaggggaaaaucguucauacuagcacauugucaggaagugcucagcaugucgaggagugcucuugcuauccucgauauccuggugucagaugugucugcagagacaacuggaaaggcuccaauaggcccaucguagauauaaacauaaaagaucauagcauuguuuccaguuauguguguucaggacuuguuggagacacacccagaaaaaacgacagcucaagcaguagccauuguuuggauccuaacaaugaagaagguggucauggagugaaaggcugggccuuugaugauggaaaugacguguggauggguagaacaaucaacgagacgucacguuuaggguaugaaaccuucaaagucauugaaggcugguccaacccuaaguccaaauugcagauaaauaggcaagucauaguugacagaagugauagguccgguuauucugguauuuucucuguugaaggcaaaaguugcaucaaucggugcuuuuauguggaguugauuaggggaagaaaagaggaaacugaagucuuguggaccucaaacaguauuguuguguuuuguggcaccucagguacauauggaacaggcucauggccugauggggcggaccucaaucucaugccuauauaa

SEQ ID NO: 55069 - RNA, 1410 nt, Artificial Sequence; identical to SEQ ID NO: 54974
  derived and/or modified CDS sequence (wt) from neuraminidase__InfluenzaA__AFN19673

SEQ ID NO: 55070 - RNA, 1410 nt, Artificial Sequence
  derived and/or modified CDS sequence (wt) from neuraminidase__InfluenzaA__AFN19675
augaauccaaaucaaaagauaauaacgauuggcucuguuucucucaccauuuccacaauaugcuucuucaugcaaauugccaucuugauaacuacuguaacauugcauuucaagcaauaugaauucaacucccccccaaacaaccaagugaugcugugugaaccaacaauaauagaaagaaacauaacagagauaguguaucugaccaacaccaccauagagaaggaaauaugccccaaaccagcagaauacagaaauuggucaaaaccgcaaugugacauuacaggauuugcaccuuuuucuaaggacaauucgauuaggcuuuccgcugguggggacaucugggugacaagagaaccuuaugugucaugcgauccugacaaguguuaucaauuugcccuuggacagggaacaacacuaaacaaugugcauucaaauaacacaguacgugauaggacuccuuaucggacuuuauugaugaaugaguuagguguuccuuuucaucugggaaccaagcaagugugcauagcauggucuagcucaaguugucacgauggaaaagcauggcugcauguuuguauaacgggggaugauaaaaaugcaacugcuagcuucauuuacaaugggaggcuuguagauaguguuguuucaugguccaaagaaauucucaggacccaggagucagaaugcguuuguaucaauggaacuuguacaguaguaaugacugauggaagugcuucaggaaaagcugauacuaaaauacuauucauugaggaggggaaaauuguucauacuagcacauugucaggaagugcucagcaugucgaggagugcucuugcuauccucgauauccuggugucagaugugucugcagagacaacuggaaaggcuccaauaggcccaucguagauauaaacauaaaggaucauagcauugucuccaguuauguguguucaggacuuguuggagacacacccagaaaaaacgacagcuccagcaguagccauuguuuggauccuaacaaugaagaagguggucauggagugaaaggcugggccuuugaugauggaaaugacguguggaugggaagaacaaucaacgagacgucacgcuuaggguaugaaaccuucaaagucauugaaggcugguccaacccuaaguccaaauugcagauaaauaggcaagucauaguugacagaggugauagguccgguuauucugguauuuucucuguugaaggcaaaagcugcaucaaucggugcuuuuauguggaguugauuaggggaagaaaagaggaaacugaagucuuguggaccucaaacaguauuguuguguuuuguggcaccucagguacauauggaacaggcucauggccugauggggcggaccucaaucucaugccuauauaa

SEQ ID NO: 55071 - RNA, 1410 nt, Artificial Sequence
  derived and/or modified CDS sequence (wt) from neuraminidase__InfluenzaA__AFN19677
augaauccaaaucaaaagauaauaacgauuggcucuguuucucucaccauuuccauaauaugcuucuucaugcaaauugccaucuugauaacuacuguaacauugcauuucaagcaauaugaauucaacucccccccaaacaaccaagugaugcugugugaaccaacaauaauagaaagaaacauaacagagauaguguaucugaccaacaccaccauagagaaggaaauaugccccaaaccagcagaauacagaaauuggucaaaaccgcaaugugacauuacaggauuugcaccuuuuucuaaggacaauucgauuaggcuuuccgcugguggggacaucuggguaacaagagaaccuuaugugucaugcgauccugacaaguguuaucaauuugcccuuggacagggaacaacacuaaacaaugugcauucaaauaacacaguacgugauaggaccccuuaucggacuuuauugaugaaugaguuagguguuccuuuucaucuggggaccaagcaagugugcauagcaugguccagcucaaguugucacgaugggaaagcauggcugcauguuuguauaacgggggaugauaaaaaugcaacugcuagcuucauuuacaaugggaggcuuguagauaguguuguuucaugguccaaagaaauucucaggacccaggagucagaaugcguuuguaucaauggaacuuguacaguaguaaugacugauggaagugcuucaggaaaagcugauacuaaaauacuauucauugaggaggggaaaaucguucauacuagcacauugucaggaagugcucagcaugucgaggagugcucuugcuauccucgauauccuggugucagaugugucugcagagacaacuggaaaggcuccaauaggcccaucguagauauaaacauaaaggaucauagcauugucuccaguuauguguguucaggacuuguuggagacacacccagaaaaaacgacagcuccagcaguagccauuguuuggauccuaacaaugaagaagguggucauggagugaaaggcugggccuuugaugauggaaaugacguguggaugggaagaacaaucaacgagacgucacgcuuaggguaugaaaccuucaaagucauugaaggcugguccaacccuaaguccaaauugcagauaaauaggcaagucauaguugacagaggugauagguccgguuauucugguauuuucucuguugaaggcaaaagcugcaucaaucggugcuuuuauguggaguugauuaggggaagaaaagaggaaacugaagucuuguggaccucaaacaguauuguuguguuuuguggcaccucagguacauauggaacaggcucauggccugauggggcggaccucaaucucaugccuauauaa

SEQ ID NO: 55072 - RNA, 1410 nt, Artificial Sequence
  derived and/or modified CDS sequence (wt) from neuraminidase__InfluenzaA__AFN19683
augaauccaaaucaaaagauaauaacgauuggcucuguuucucucaccauuuccacaauaugcuucuucaugcaaauugccaucuugauaacuacuguaacauugcauuucaagcaauaugaauucaacucccccccaaacaaccaagugaugcugugugaaccaacgauaauagaaagaaacaugacagagauaguguaucugaccaacaccaccauagagaaggaaauaugccccaaaccagcagaauacagaaauuggucaaaaccgcaaugugacauuacaggauuugcaccuuuuucuaaggacaauucgauuaggcuuuccgcugguggggacaucugggugacaagagaaccuuaugugucaugcgauccugacaaguguuaucaauuugcccuuggacagggaacaacacuaaacaacgugcauucaaauaacacaguacgugauaggaccccuuaucggacccuauugaugaaugaguuagguguuccuuuucaucuggggaccaagcaagugugcauagcaugguccagcucaaguugucacgauggaaaagcauggcugcauguuuguauaacgggggaugauaaaaaugcaacugcuagcuucaucuacaaugggaggcuuguagauaguguuguuucaugguccaaagaaauucucaggacccaggaaucagaaugcguuuguaucaauggaacuuguacaguaguaaugacugauggaagugcuucaggaaaagcugauacuaaaauacuauucauugaggaggggaaaaucguucauacuagcacauugucaggaagugcucagcaugucgaggagugcucuugcuauccucgauauccuggugucagaugugucugcagagacaacuggaaaggcuccaauaggcccaucguagauauaaacauaaaagaucauagcauuguuuccaguuauguguguucaggacuuguuggagacacacccagaaaaaacgacagcucaagcaguagccauuguuuggauccuaacaaugaagaagguggucauggagugaaaggcugggccuuugaugauggaaaugacguguggauggguagaacaaucaacgagacgucacguuuaggguaugaaaccuucaaagucauugaaggcugguccaacccuaaguccaaauugcagauaaauaggcaagucauaguugacagaagugauagguccgguuauucugguauuuucucuguugaaggcaaaaguugcaucaaucggugcuuuuauguggaguugauuaggggaagaaaagaggaaacugaagucuuguggaccucaaacaguauuguuguguuuuguggcaccucagguacauauggaacaggcucauggccugauggggcggaccucaaucucaugccuauauaa

SEQ ID NO: 55073 - RNA, 1410 nt, Artificial Sequence; identical to SEQ ID NO: 54937
  derived and/or modified CDS sequence (wt) from neuraminidase__InfluenzaA__AFN19685

SEQ ID NO: 55074 - RNA, 1410 nt, Artificial Sequence
  derived and/or modified CDS sequence (wt) from neuraminidase__InfluenzaA__AFN19687
augaauccaaaucaaaagauaauaacgauuggaucuguuucucucaccauuuccacaauaugcuucuucaugcaaauugccaucuugauaacuacuguaacauugcauuucaagcaauaugaauucaacucccccccaaacaaccaagugaugcugugugaaccaacaauaauagaaagaaacauaacagagauaguguaucugaccaacaccaccauagagaaggaaauaugccccaaaccagcagaauacagaaauuggucaaaaccgcaaugugacauuacaggauuugcaccuuuuucuaaggacaauucgauuaggcuuuccgcugguggggacaucugggugacaagagaaccuuaugugucaugcgauccugacaaguguuaucaauuugcccuuggacagggaacaacacuaaacaaugugcauucaaauaacacaguacgugauaggaccccuuaucggacuuuauugaugaaugaguuagguguuccuuuucaucuggggaccaagcaagugugcauagcaugguccagcucaaguugucacgauggaaaagcauggcugcauguuuguauaacgggggaugauaaaaaugcaacugcuagcuucauuuacaaugggaggcuuguagauaguguuguuucaugguccaaagaaauucucaggacccaggagucagaauguguuuguaucaauggaacuuguacaguaguaaugacugauggaagugcuucaggaaaagcugauacuaaaauacuauucauugaggaggggaaaaucguucauacuagcacauugucaggaagugcucagcaugucgaggagugcucuugcuauccucgauauccuggugucagaugugucugcagagacaacuggaaaggcuccaauaggcccaucguagauauaaacauaaaggaucauagcauugucuccaguuauguguguucaggacuuguuggagacacacccagaaaaaacgacagcuccagcaguagccauuguuuggauccuaacaaugaagaagguggucauggagugaaaggcugggccuuugaugauggaaaugacguguggaugggaagaacaaucaacgagacgucacgcuuaggguaugaaaccuucaaagucauugaaggcugguccaacccuaaguccaaauugcagauaaauaggcaagucauaguugacagaggugauagguccgguuauucugguauuuucucuguugaaggcaaaagcugcaucaaucggugcuuuuauguggaguugauuaggggaagaaaagaggaaacugaaguuuuguggaccucaaacaguauuguuguguuuuguggcaccucagguacauauggaacaggcucauggccugauggggcggaccucaaucucaugccuauauaa

SEQ ID NO: 55075 - RNA, 1410 nt, Artificial Sequence; identical to SEQ ID NO: 54982
  derived and/or modified CDS sequence (wt) from neuraminidase__InfluenzaA__AFN19689

SEQ ID NO: 55076 - RNA, 1410 nt, Artificial Sequence; identical to SEQ ID NO: 54974
  derived and/or modified CDS sequence (wt) from neuraminidase__InfluenzaA__AFN19691

SEQ ID NO: 55077 - RNA, 1410 nt, Artificial Sequence
  derived and/or modified CDS sequence (wt) from neuraminidase__InfluenzaA__AFN19693
augaacccaaaucaaaagauaauaacgauuggcucuguuucucucaccauuuccacaauaugcuucuucaugcaaauugccaucuugauaacuacuguaacauugcauuucaagcaauaugaauucaacucccccccaaacaaccaagugaugcugugugaaccaacaauaauagaaagaaacauaacagagauaguguaucugaccaacaccaccauagagaaggaaauaugccccaaacuagcagaauacagaaauuggucaaagccgcaaugugacauuacaggauuugcaccuuuuucuaaggacaauucgauuaggcuuuccgcugguggggacaucugggugacaagagaaccuuaugugucaugcgauccugacaaguguuaucaauuugcccuuggacagggaacaacacuaaacaacgugcauucaaauaacacaguacgugauaggaccccuuaucggacccuauugaugaaugaguuagguguucccuuucaucuggggaccaagcaagugugcauagcaugguccagcucaaguugucacgauggaaaagcauggcugcauguuuguauaacgggggaugauaaaaaugcaacugcuagcuucauuuacaaugggaggcuuguagauaguguuguuucaugguccaaagacauccucaggacccaggagucagaaugcguuuguaucaauggaacuugugcuguaguaaugacugaugggagugcuucaggaaaagcugauacuaaaauacuauucauugaggaggggaaaaucguucauacuagcacauugucaggaagugcucagcaugucgaggagugcucuugcuauccucgauauccuggugucagaugugucugcagagacaacuggaagggcuccaauaggcccaucguagauauaaacauaaaggaucauagcauuguuuccaguuauguguguucaggacuuguuggagacacacccagaaaaaacgacagcuccagcaguagcaauuguuuggauccuaacaaugaagaagguggucauggaguaaaaggcugggccuuugaugauggaaaugacguguggaugggaagaacgaucaacgagacgucacgcuuaggguaugaaaccuucaaagucauugaaggcugguccaacccuaaguccaaauugcagauaaauaggcaagucauaguugacagagguaauagguccgguuauucugguauuuucucuguugaaggcaagaacugcaucaaucggugcuuuuauguggaguugauuaggggaagaaaagaggaaacugaagucuuauggaccucaaacaguauuguuguguuuuguggcaccucagguacauauggaacaggcucauggccugauggggcggaccucaaucucaugccuauauaa

SEQ ID NO: 55078 - RNA, 1410 nt, Artificial Sequence
  derived and/or modified CDS sequence (wt) from neuraminidase__InfluenzaA__AFN19697
augaauccaaaucaaaagauaauaacgauuggcucuguuucucucaccauuuccacaauaugcuucuucaugcaaauugccaucuugauaacuacuguaacauugcauuucaagcaauaugaauucaacucccccccaaacaaccaagugaugcugugugaaccaacaauaauagaaagaaacauaacagagauaguguaucugaccaacaccaccauagagaaggaaauaugccccaaaccagcagaauacagaaauuggucaaaaccgcaauguggcauuacaggauuugcaccuuucucuaaggacaauucgauuaggcuuuccgcugguggggacaucugggugacaagagaaccuuaugugucaugcgauccugacaaguguuaucaauuugcccuuggacagggaacaacacuaaacaacgugcauucaaauaacacaguacgugauaggaccccuuaucggacucuauugaugaaugaguuggguguuccuuuucaucuggggaccaagcaagugugcauagcaugguccagcucaaguugucacgauggaaaagcauggcugcauguuuguauaacgggggaugauaaaaaugcaacugcuagcuucauuuacaaugggaggcuuguagauaguguuguuucaugguccaaagaaacucucaggacccaggagucagaaugcguuuguaucaauggaacuuguacaguaguaaugacugauggaagugcuucaggaaaagcugauacuaaaauacuauucauugaggaggggaaaaucguucauacuagcacauugucaggaagugcucagcaugucgaagagugcucuugcuauccucgauauccuggugucagaugugucugcagagacaacuggaaaggcuccaaucggcccaucguagauauaaacauaaaggaucauagcauuguuuccaguuauguguguucaggacuuguuggagacacacccagaaaaaacgacagcuccagcaguagccauuguuuggauccuaacaaugaagaagguggucauggagugaaaggcugggccuuugaugauggaaaugacguguggaugggaagaacaaucaacgagacgucacgcuuaggguaugaaaccuucaaagucauugaaggcugguccaacccuaaguccaaauugcagauaaauaggcaagucauaguugacaggggugauagguccgguuauucugguauuuucucuguugaaggcaaaagcugcaucaaucggugcuuuuauguggaguugauuaggggaagaaaagaggaaacugaagucuuguggaccucaaacaguauuguuguguuuuguggcaccucagguacauauggaacaggcucauggccugauggggcggaccucaaucucaugccuauauaa

SEQ ID NO: 55079 - RNA, 1410 nt, Artificial Sequence
  derived and/or modified CDS sequence (wt) from neuraminidase__InfluenzaA__AFN19699
augaauccaaaucaaaagauaauaacgauuggcucuguuucucucaccauuuccacaauaugcuucuucaugcaaauugccaucuugauaacuacuguaacacugcauuucaagcaauaugaauucaacucccccccaaacaaccaagugaugcugugugaaccaacaauaauagaaagaaacauaacagaaauaguguaucugaccaacaccaccauagagaaggaaauaugccccaaaccagcagaauacagaaauuggucaaaaccgcaaugugacauuacaggauuugcaccuuuuucuaaggacaauucgauuaggcuuuccgcugguggggacaucugggugacaagagaaccuuaugugucaugcgauccugacaaguguuaucaauuugcccuuggacagggaacaacacuaaacaaugugcauucaaauaacacaguacgugauaggaccccuuaucggacuuuauugaugaaugaauuagguguuccuuuucaucuggggaccaagcaagugugcauagcaugguccagcucaaguugucacgauggaaaagcauggcugcauguuuguauaacgggggaugauaaaaaugcaacugcuagcuucauuuacaaugggaggcuuguagauaguguuguuucaugguccaaagaaauucucaggacccaggagucagaaugcguuuguaucaauggaacuuguacaguaguaaugacugauggaagugcuucaggaaaagcugauacuaaaauacuauucauugaggaggggaaaaucguucauacuagcacauugucaggaagugcucagcaugucgaggagugcucuugcuauccucgauauccuggugucagaugugucugcagagacaacuggaaaggcuccaauaggcccaucguagauauaaacauaaaggaucauagcauugucuccaguuauguguguucaggacuuguuggagacacacccagaaaaaacgacagcuccagcaguagccauuguuuggauccuaacaaugaagaagguggucauggagugaaaggcugggccuuugaugauggaaaugacguguggaugggaagaacaaucaacgagacgucacgcuuaggguaugaaaccuucaaagucauugaaggcugguccaacccuaaguccaaauugcagauaaauaggcaagucauaguugacagaggugauagguccgguuauucugguauuuucucuguugaaggcaaaagcugcaucaaucggugcuuuuauguggaguugauuaggggaagaaaagaggaaacugaagucuuguggaccucaaacaguauuguuguguuuuguggcaccucagguacauauggaacaggcucauggccugauggggcggaccucaaucucaugccuauauaa

SEQ ID NO: 55080 - RNA, 1410 nt, Artificial Sequence
  derived and/or modified CDS sequence (wt) from neuraminidase__InfluenzaA__AFN19701
augaauccaaaucaaaagauaauaacgauuggcucuguuucucucaccauuuccacaauaugcuucuucaugcaaauugccaucuugauaacuacuguaacauugcauuucaagcaauaugaauucaacucccccccaaacaaccaagugaugcugugugaaccaacaauaauagaaagaaacaugacagagauaguguaucugaccaacaccaccauagagaaggaaauaugccccaaaccagcagaauacagaaauuggucaaaaccgcaaugugacauuacaggauuugcacccuuuucuaaggacaauucgauuaggcuuuccgcugguggggacaucugggugacaagagaaccuuaugugucaugcgauccugacaaguguuaucaauuugcccuuggacagggaacaacacuaaacaacgugcauucaaauaacacaguacgugauaggaccccuuaucggacucuauugaugaaugaguuagguguuccuuuucaucuggggaccaagcaagugugcauagcaugguccagcucaaguugucacgauggaaaagcauggcugcauguuuguauaacgggggaugauaaaaaugcaacugcuagcuucaucuacaaugggaggcuuguagauaguguuguuucaugguccaaagaaauucucaggacccaggaaucagaaugcguuuguaucaauggaacuuguacaguaguaaugacugauggaagugcuucaggaaaagcugauacuaaaauacuauucauugaggaggggaaaaucguucauacuagcacauugucaggaagugcucagcaugucgaggagugcucuugcuauccucgauauccuggugucagaugugucugcagagacaacuggaaaggcuccaauaggcccaucguagauauaaacauaaaagaucauagcauuguuuccaguuauguguguucaggacuuguuggagacacacccagaaaaaacgacagcucaagcaguagccauuguuuggauccuaacaaugaagaagguggucauggagugaaaggcugggccuuugaugauggaaaugacguguggaugggaagaacaaucaacgagacgucacguuuaggguaugaaaccuucaaagucauugaaggcugguccaacccuaaguccaaauugcagauaaauaggcaagucauaguugacagaagugacagguccgguuauucugguauuuucucuguugaaggcaaaaguugcaucaaucggugcuuuuauguggaguugauuaggggaagaaaagaggaaacugaagucuuguggaccucaaacaguauuguuguguuuuguggcaccucagguacauauggaacaggcucauggccugauggggcggaccucaaucucaugccuauauaa

SEQ ID NO: 55081 - RNA, 1410 nt, Artificial Sequence
  derived and/or modified CDS sequence (wt) from neuraminidase__InfluenzaA__AFN19703
augaauccaaaucaaaagauaauaacgauuggcucuguuucucucaccauuuccacaauaugcuucuucaugcaaauugccaucuugauaacuacuguaacauugcauuucaagcaauaugaauucaacucccccccaaacaaccaagugaugcugugugaaccaacaauaauagaaagaaacauaacagagauaguguaucugaccaacaccaccauagagaaggaaauaugccccaaaccagcagaauacagaaauuggucaaaaccgcaauguggcauuacaggauuugcaccuuucucuaaggacaauucgauuaggcuuuccgcugguggggacaucugggugacaagagaaccuuaugugucaugcgauccugacaaguguuaucaauuugcccuuggacagggaacaacacuagacaacgugcauucaaauaacacaguacgugauaggaccccuuaucggacucuauugaugaaugaguuggguguuccuuuucaucuggggaccaagcaagugugcauagcaugguccagcucaaguugucacgauggaaaagcauggcugcauguuuguauaacgggggaugauaaaaaugcaacugcuagcuucauuuacaaugggaggcuuguagauaguguuguuucaugguccaaagaaauucucaggacccaggagucagaaugcguuuguaucaauggaacuuguacaguaguaaugacugauggaagugcuucaggaaaagcugauacuaaaauacuauucauugaggaggggaaaaucguucauacuagcacauugucaggaagugcucagcaugucgaagagugcucuugcuauccucgauauccuggugucagaugugucugcagagacaacuggaaaggcuccaauaggcccaucguagauauaaacauaaaggaucauagcauuguuuccaguuauguguguucaggacuuguuggagacacacccagaaaaaacgacagcuccagcaguagccauuguuuggauccuaacaaugaagaagguggucauggagugaaaggcugggccuuugaugauggaaaugacguguggaugggaagaacaaucaacgagacgucacgcuuaggguaugaaaccuucaaagucauugaaggcugguccaacccuaaguccaaauugcagauaaauaggcaagucauaguugacagaggugauagguccgguuauucugguauuuucucuguugaaggcaaaagcugcaucaaucggugcuuuuauguggaguugauuaggggaagaaaagaggaaacugaagucuuguggaccucaaacaguauuguuguguuuuguggcaccucagguacauauggaacaggcucauggccugauggggcggaccucaaucucaugccuauauaa

SEQ ID NO: 55082 - RNA, 1410 nt, Artificial Sequence
  derived and/or modified CDS sequence (wt) from neuraminidase__InfluenzaA__AFN19711
augaauccaaaccaaaagauaauaaccauugguucggucuguaugacaauuggaauggcuaacuuaauauuacaaauuggaaacauaaucucaauauggauuagccacucaauucaacuugggaaucaaagucagauugaaacaugcaaucaaagcgucauuacuuaugaaaacaacacuuggguaaaucagacauauguuaacaucagcaacaccaacuuugcugcuggacagucagugguuuccgugaaauuagcgggcaauuccucucucugcccuguuaguggaugggcuauauacaguaaagacaacaguauaagaaucgguuccaagggggauguguuugucauaagggaaccauucauaucaugcucccccuuggaaugcagaaccuucuucuugacucaaggggccuugcuaaaugacaaacauuccaauggaaccauuaaagacaggagcccauaucgaacccuaaugagcuguccuauuggugaaguucccucuccauacaacucaagauuugagucagucgcuuggucagcaagugcuugucaugauggcaucaauuggcuaacaauuggaauuucuggcccagacaauggggcaguggcuguguuaaaguacaacggcauaauaacagacacuaucaagaguuggagaaacaauauauugagaacacaagagucugaaugugcauguguaaaugguucuugcuuuaccauaaugaccgauggaccaagugauggacaggccucauacaagaucuucagaauagaaaagggaaagauagucaaaucagucgaaaugaaugccccuaauuaucacuaugaggaaugcuccuguuauccugauucuagugaaaucacaugugugugcagggauaacuggcauggcucgaaucgaccgugggugucuuucaaccagaaucuggaauaucagauaggauacauaugcagugggauuuucggagacaauccacgcccuaaugauaagacaggcaguugugguccaguaucgucuaauggagcaaauggaguaaaaggauuuucauucaaauacggcaauggcguuuggauagggagaacuaaaagcauuaguucaagaaaagguuuugagaugauuugggauccaaacggauggacugggacagacaauaacuucucaauaaagcaagauaucguaggaauaaaugaguggucaggauauagcgggaguuuuguucagcauccagaacuaacagggcuggauuguauaagaccuugcuucuggguugaacuaaucagagggcgacccaaagagaacacaaucuggacuagcgggagcagcauauccuuuugugguguaaacagugacacuguggguuggucuuggccagacggugcugaguugccauuuaccauugacaaguaa

SEQ ID NO: 55083 - RNA, 1410 nt, Artificial Sequence
  derived and/or modified CDS sequence (wt) from neuraminidase__InfluenzaA__AFN19721
augaauccaaaccaaaagauaauaaccauugguucggucuguaugacaauuggaauggcuaacuuaauauuacaaauuggaaacauaaucucaauauggauuagccacucaauucaacuugggaaucaaagucagauugaaacaugcaaucaaagcgucauuacuuaugaaaacaacacuuggguaaaucagacauauguuaacaucagcaacaccaacuuugcugcuggacagucagugguuuccgugaaauuagcgggcaauuccucucucugcccuguuaguggaugggcuauauacaguaaagacaacaguauaagaaucgguuccaagggggauguguuugucauaagggaaccauucauaucaugcucccccauggaaugcagaaccuucuucuugacucaaggggccuugcuaaaugacaaacauuccaauggaaccauuaaagacaggagcccauaucgaacccuaaugagcuguccuauuggugaaguucccucuccauacaacucaagauuugagucagucgcuuggucagcaagugcuugucaugauggcaucaauuggcuaacaauuggaauuucuggcccagacaauggggcaguggcuguguuaaaguacaacggcauaauaacagacacuaucaagaguuggagaaacaauauauugagaacacaagagucugaaugugcauguguaaaugguucuugcuuuaccauaaugaccgauggaccaagugauggacaggccucauacaagaucuucagaauagaaaagggaaagauagucaaaucagucgaaaugaaugccccuaauuaucacuaugaggaaugcuccuguuauccugauucuagugaaaucacaugugugugcagggauaacuggcauggcucgaaucgaccgugggugucuuucaaccagaaucuggaauaucagauaggauacauaugcagugggauuuucggagacaauccacgcccuaaugauaagacaggcaguugugguccaguaucgucuaauggagcaaauggaguaaaaggauuuucauucaaauacggcaaugguguuuggauagggagaacuaaaagcauuaguucaagaaaagguuuugagaugauuugggauccaaacggauggacugggacagacaauaacuucucaauaaagcaagauaucguaggaauaaaugaguggucaggauauagcgggaguuuuguucagcauccagaacuaacagggcuggauuguauaagaccuugcuucuggguugaacuaaucagagggcgacccaaagagaacacaaucuggacuagcgggagcagcauauccuuuugugguguaaacagugacacuguggguuggucuuggccagacggugcugaguugccauuuaccauugacaaguaa

SEQ ID NO: 55084 - RNA, 1410 nt, Artificial Sequence
  derived and/or modified CDS sequence (wt) from neuraminidase__InfluenzaA__AFN19731
augaauccaaaccaaaagauaauaaccauugguucggucuguaugacaauuggaauggcuaacuuaauauuacaaauuggaaacauaaucucaauauggauuagccacucaauucaacuugggaaucaaagucagauugaaacaugcaaucaaagcgucauuacuuaugaaaacaacacuuggguaaaucagacauauguuaacaucagcaacaccaacuuugcugcuggacagucagugguuuccgugaaauuagcgggcaauuccucucucugcccuguuaguggaugggcuauauacaguaaagacaacaguauaagaaucgguuccaagggggauguguuugucauaagggaaccauucauaucaugcucccccuuggaaugcagaaccuuuuucuugacucaaggggccuugcuaaaugacaaacauuccaauggaaccauuaaagacaggagcccauaucgaacccuaaugagcuguccuauuggugaaguucccucuccauacaacucaagauuugagucagucgcuuggucagcaagugcuugucaugauggcaucaauuggcuaacaauuggaauuucuggcccagacaauggggcaguggcuguguuaaaguacaacggcauaauaacagacacuaucaagaguuggagaaacaauauauugagaacacaagagucugaaugugcauguguaaaugguucuugcuuuaccauaaugaccgauggaccaagugauggacaggccucauacaagaucuucagaauagaaaagggaaagauagucaaaucagucgaaaugaaugccccuaauuaucacuaugaggaaugcuccuguuauccugauucuagugaaaucacaugugugugcagggauaauuggcauggcucgaaucgaccgugggugucuuucaaccagaaucuggaauaucagauaggauacauaugcagugggauuuucggagacaauccacgcccuaaugauaagacaggcaguugugguccaguaucgucuaauggagcaaauggaguaaaaggauuuucauucaaauacggcaaugguguuuggauagggagaacuaaaagcauuaguucaagaaaagguuuugagaugauuugggauccaaacggauggacugggacagacaauaacuucucaauaaagcaagauaucguaggaauaaaugaguggucaggauauagcgggaguuuuguucagcauccagaacuaacagggauggauuguauaagaccuugcuucuggguugaacuaaucagagggcgacccaaagagaacacaaucuggacuagcgggagcagcauauccuuuugugguguaaacagugacacuguggguuggucuuggccagacggugcugaguugccauuuaccauugacaaguaa

SEQ ID NO: 55085 - RNA, 1410 nt, Artificial Sequence; identical to SEQ ID NO: 55082
  derived and/or modified CDS sequence (wt) from neuraminidase__InfluenzaA__AFN19737

SEQ ID NO: 55086 - RNA, 1410 nt, Artificial Sequence
  derived and/or modified CDS sequence (wt) from neuraminidase__InfluenzaA__AFN19747
augaauccaaaccaaaagauaauaaccauugguucggucuguaugacaauuggaauggcuaacuuaauauuacaaauuggaaacauaaucucaauauggauuagccacucaauucaacuugggaaucaaaaucagauugaaacaugcaaucaaagcgucauuacucaugaaaacaacacuuggguaaaucagacauauguuaacaucagcaacaccaacuuugcugcuggacaaucagugguuuccgugaaauuagcgggcaauuccucucucugcccuguuaguggaugggcuauauacaguaaagacaacaguauaagaaucgguuccaagggggauguguuugucauaagggaaccauucauaucaugcuccccuuuggaaugcagaaccuucuucuugacucaaggggccuugcuaaaugacaaacauuccaauggaaccauuaaagacaggagcccauaucgaacccuaaugagcuguccuauuggugaaguucccucuccauacaacucaagauuugagucagucgcuuggucagcaagugcuugucaugauggcaucaauuggcuaacaauuggaauuucuggcccagacaauggggcaguggcuguguuaaaguacaacggcauaauaacagacacuaucaagaguuggagaaacaauauauugagaacacaagaguccgaaugugcauguguaaaugguucuugcuuuacugugaugaccgauggaccaagugauggacaggccucauacaagaucuucagaauagaaaagggaaagauagucaaaucagucgaaaugaaugccccuaauuaucacuaugaggaaugcuccuguuauccugauucuagugaaaucacaugugugugcagggacaacuggcauggcgcgaaucgaccgugggugucuuucaaccagaaucuggaauaucagauaggauacauaugcagugggauuuucggagacaauccacgcccuaaugauaagacaggcaguugugguccaguaucgucuaauggagcaaauggaguaaaaggauuuucauucaaauacggcaaugguguuuggauagggagaacuaaaagcauuaguucaagaaacgguuuugagaugauuugggauccgaacggauggacugggacagacaauaacuucucaauaaagcaagauaucguaggaauaaaugaguggucaggauauagcgggaguuuuguucagcauccagaacuaacagggcuggauuguauaagaccuugcuucuggguugaacuaaucagagggcgacccaaagagaacacaaucuggacuagcgggagcagcauauccuuuugugguguaaacagugacacuguggguuggucuuggccagacggugcugaguugccauuuaccauugacaaguaa

SEQ ID NO: 55087 - RNA, 1410 nt, Artificial Sequence
  derived and/or modified CDS sequence (wt) from neuraminidase__InfluenzaA__AFN19749
augaauccaaaccaaaagauaauaaccauugguucggucuguaugacaauuggaauggcuaacuuaauauuacaaauuggaaacauaaucucaauauggauuagccacucaauucaacuugggaaucaaagucagauugaaacaugcaaucaaagcgucauuacuuaugaaaacaacacuuggguaaaucagacauauguuaacaucagcaacaccaacuuugcugcuggacagucagugguuuccgugaaauuagcgggcaauuccucucucugcccuguuaguggaugggcuauauacaguaaagacaacaguauaagaaucgguuccaagggggauguguuugucauaagggaaccauucauaucaugcucccccuuggaaugcagaaccuucuucuugacucaaggggccuugcuaaaugacaaacauuccaauggaaccauuaaagacaggagcccauaucgaacccuaaugagcuguccuauuggugaaguucccucuccauacaacucaagauuugagucagucgcuuggucagcaagugcuugucaugauggcaucaauuggcuaacaauuggaauuucuggcccagacaauggggcaguggcuguguuaaaguacaacggcauaauaacagacacuaucaagaguuggagaaacaauauauugaggacacaagagucugaaugugcauguguaaaugguucuugcuuuaccauaaugaccgauggaccaagugauggacaggccucauacaagaucuucagaauagaaaagggaaagauagucaaaucagucgaaaugaaugccccuaauuaucacuaugaggaaugcuccuguuauccugauucuagugaaaucacaugugugugcagggauaacuggcauggcucgaaucgaccgugggugucuuucaaccagaaucuggaauaucagauaggauacauaugcagugggauuuucggagacaauccacgcccuaaugauaagacaggcaguugugguccaguaucgucuaauggagcaaauggaguaaaaggauuuucauucaaauacggcaauggcguuuggauagggagaacuaaaagcauuaguucaagaaaagguuuugagaugauuugggauccaaacggauggacugggacagacaauaacuucucaauaaagcaagauaucguaggaauaaaugaguggucaggauauagcgggaguuuuguucagcauccagaacuaacagggcuggauuguauaagaccuugcuucuggguugaacuaaucagagggcgacccaaagagaacacaaucuggacuagcgggagcagcauauccuuuugugguguaaacagugacacuguggguuggucuuggccagacggugcugaguugccauuuaccauugacaaguaa

SEQ ID NO: 55088 - RNA, 1410 nt, Artificial Sequence
  derived and/or modified CDS sequence (wt) from neuraminidase__InfluenzaA__AFN19759
augaauccaaaccaaaagauaauaaccauugguucggucuguaugacaauuggaauggcuaacuuaauauuacaaauuggaaacauaaucucaauauggauuagccacucaauucaacuugggaaucaaagucagauugaaacaugcaaucaaagcgucauuacuuaugaaaacaacacuuggguaaaucagacauauguuaacaucagcaacaccaacuuugcugcuggacagucagugguuuccgugaaauuagcgggcaauuccucucucugcccuguuaguggaugggcuauauacaguaaagacaacaguauaagaaucgguuccaagggggauguguuugucauaagggaaccauucauaucaugcucccccuuggaaugcagaaccuucuucuugacucaaggggccuugcuaaaugauaaacauuccaauggaaccauuaaagacaggagcccauaucgaacccuaaugagcuguccuauuggugaaguucccucuccauacaacucaagauuugagucagucgcuuggucagcaagugcuugucaugauggcaucaauuggcuaacaauuggaauuucuggcccagacaauggggcaguggcuguguuaaaguacaacggcauaauaacagacacuaucaagaguuggagaaacaauauauugagaacacaagagucugaaugugcauguguaaaugguucuugcuuuaccauaaugaccgauggaccaagugauggacaggccucauacaagaucuucagaauagaaaagggaaagauagucaaaucagucgaaaugaaugccccuaauuaucacuaugaggaaugcuccuguuauccugauucuagugaaaucacaugugugugcagggauaacuggcauggcucgaaucgaccgugggugucuuucaaccagaaucuggaauaucagauaggauacauaugcagugggauuuucggagacaauccacgcccuaaugauaagacaggcaguugugguccaguaucgucuaauggagcaaauggaguaaaaggauuuucauucaaauacggcaaugguguuuggauagggagaacuaaaagcauuaguucaagaaaagguuuugagaugauuugggauccaaauggauggacugggacagacaauaacuucucaauaaagcaagauaucguaggaauaaaugaguggucaggauauagcgggaguuuuguucagcauccagaacuaacagggcuggauuguauaagaccuugcuucuggguugaacuaaucagagggcgacccaaagagaacacaaucuggacuagcgggagcagcauauccuuuugugguguaaacagugacacuguggguuggucuuggccagacggugcugaguugccauuuaccauugacaaguaa

SEQ ID NO: 55089 - RNA, 1410 nt, Artificial Sequence
  derived and/or modified CDS sequence (wt) from neuraminidase__InfluenzaA__AFN19769
augaauccaaaccaaaagauaauaaccauugguucggucuguaugacaauuggaauggcuaaccuaauauuacaaauuggaaacauaaucucaauauggauuagccacucaauucaacuugggaaucaaagucagauugaaacaugcaaucaaagcgucauuacuuaugaaaacaacacuuggguaaaucagacauauguuaacaucagcaacaccaacuuugcugcuggacagucagugguuuccgugaaauuagcgggcaauuccucucucugcccuguuaguggaugggcuauauacaguaaagacaacaguauaagaaucgguuccaagggggauguguuugucauaagggaaccauucauaucaugcucccccuuggaaugcagaaccuucuucuugacucaaggggccuugcuaaaugacaaacauuccaauggaaccauuaaagacaggagcccauaucgaacccuaaugagcuguccuauuggugaaguucccucuccauacaacucaagauuugagucagucgcuuggucagcaagugcuugucaugauggcaucaauuggcuaacaauuggaauuucuggcccagacaauagggcaguggcuguguuaaaguacaacggcauaauaacagacacuaucaagaguuggagaaacaauauauugagaacacaagagucugaaugugcauguguaaaugguucuugcuuuaccauaaugaccgauggaccaagugauggacaggccucauacaagaucuucagaauagaaaagggaaagauagucaaaucagucgaaaugaaugccccuaauuaucacuaugaggaaugcuccuguuauccugauucuagugaaaucacaugugugugcagggauaacuggcauggcucgaaucgaccgugggugucuuucaaccagaaucuggaauaucagauaggauacauaugcagugggauuuucggagacaauccacgcccuaaugauaagacaggcaguugugguccaguaucgucuaauggagcaaauggaguaaaaggauuuucauucaaauacggcaauggcguuuggauagggagaacuaaaagcauuaguucaagaaaagguuuugagaugauuugggauccaaacggauggacugggacagacaauaacuucucaauaaagcaagauaucguaggaauaaaugaguggucaggauauagcgggaguuuuguucagcauccagaacuaacagggcuggauuguauaagaccuugcuucuggguugaacuaaucagagggcgacccaaagagaacacaaucuggacuagcgggagcagcauauccuuuugugguguaaacagugacacuguggguuggucuuggccagacggugcugaguugccauuuaccauugacaaguaa

SEQ ID NO: 55090 - RNA, 1410 nt, Artificial Sequence; identical to SEQ ID NO: 55082
  derived and/or modified CDS sequence (wt) from neuraminidase__InfluenzaA__AFN19783

SEQ ID NO: 55091 - RNA, 1410 nt, Artificial Sequence
  derived and/or modified CDS sequence (wt) from neuraminidase__InfluenzaA__AFN19793
augaauccaaaccaaaagauaauaaccauugguucggucuguaugacaauuggaauggcuaacuuaauauuacaaauuggaaacauaaucucaauauggauuagccacucaauucaacuugggaaucaaaaucagauugaaacaugcaaucaaagcgucauuacuuaugaaaacaacacuuggguaaaucagacauauguuaacaucagcaacaccaacuuugcugcuggacaaucagugguuuccgugaaauuagcgggcaauuccucucucugcccuguuaguggaugggcuauauacaguaaagacaacaguauaagaaucgguuccaagggggauguguuugucauaagggaaccauucauaucaugcuccccuuuggaaugcagaaccuucuucuugacucaaggggccuugcuaaaugacaaacauuccaauggaaccauuaaagacaggagcccauaucgaacccuaaugagcuguccuauuggugaaguucccucuccauacaacucaagauuugagucagucgcuuggucagcaagugcuugucaugauggcaucaauuggcuaacaauuggaauuucuggcccagacaauggggcaguggcuguguuaaaguacaacggcauaauaacagacacuaucaagaguuggagaaacaauauauugagaacacaagaguccgaaugugcauguguaaaugguucuugcuuuacugugaugaccgauggaccaagugauggacaggccucauacaagaucuucagaauagaaaagggaaagauagucaaaucagucgaaaugaaugccccuaauuaucacuaugaggaaugcuccuguuauccugauucuagugaaaucacaugugugugcagggacaacuggcauggcgcgaaucgaccgugggugucuuucaaccagaaucuggaauaucagauaggauacauaugcagugggauuuucggagacaauccacgcccuaaugauaagacaggcaguugugguccaguaucgucuaauggagcaaauggaguaaaaggauuuucauucaaauacggcaaugguguuuggauagggagaacuaaaagcauuaguucaagaaacgguuuugagaugauuugggauccgaacggauggacugggacagacaauaacuucucaauaaagcaagauaucguaggaauaaaugaguggucaggauauagcgggaguuuuguucagcauccagaacuaacagggcuggauuguauaagaccuugcuucuggguugaacuaaucagagggcgacccaaagagaacacaaucuggacuagcgggagcagcauauccuuuugugguguaaacagugacacuguggguuggucuuggccagacggugcugaguugccauuuaccauugacaaguaa

SEQ ID NO: 55092 - RNA, 1410 nt, Artificial Sequence; identical to SEQ ID NO: 55082
  derived and/or modified CDS sequence (wt) from neuraminidase__InfluenzaA__AFN19807

SEQ ID NO: 55093 - RNA, 1410 nt, Artificial Sequence
  derived and/or modified CDS sequence (wt) from neuraminidase__InfluenzaA__AFN19809
augaauccaaaccaaaagauaauaaccauugguucggucuguaugauaauuggaauggcuaacuuaauguuacaaauuggaaacauaaucucaauauggauuagccacucaauucaacuugggaaucaaaaucagauugaaacaugcaaucaaagcgucauuacuuaugaaaacaacacuuggguaaaucagacauauguuaacaucagcaacaccaacuuugcugcuggacagucagugauuuccgugaaauuagcgggcaauuccucucucugcccuguuaguggaugggcuauauacaguaaagacaacaguauaagaaucgguuccaaaggggauguguuugucauaagggaaccauucauaucaugcucccccuuggaaugcagaaccuucuucuugacucaaggggccuugcuaaaugacaaacauuccaauggaaccauuaaagacaggagcccauaucgaacccuaaugagcuguccuauuggugaaguucccucuccauacaacucaagauuugagucagucgcauggucagcaagugcuugucaugauggcaucaauuggcuaacaauuggaauuucuggcccagacaauggggcaguggcuguguuaaaguacaacggcauaauaacagacacuaucaagaguuggagaaacaauauauugagaacacaagagucugaaugugcauguguaaaugguucuugcuuuacuguaaugaccgauggaccaagugauggacaggccucauacaagaucuucagaauagaaaagggaaagauagucaaaucagucgaaaugaaugccccuaauuaucacuaugaggaaugcuccuguuauccugauucuagugaaaucacaugugugugcagggauaacuggcauggcucgaaucgaccgugggugucuuucaaccagaaucuggaauaucagauaggauacauaugcagugggauuuucggagacaauccacgcccuaaugauaagacaggcaguugugguccaguaucaacuaauggagcaaauggaguaaaaggauuuucauucaaauacggcaaugguguuuggauagggagaacuaaaagcauuaguucaagaaacgguuuugagaugauuugggauccgaacggauggacugggacagacaauaaauucucaauaaagcaagauaucguaggaauaaaugaguggucaggauauagcgggaguuuuguucagcauccagaacuaacagggcuggauuguauaagaccuugcuucuggguugaacuaaucagagggcgacccaaagagaacacaaucuggacuagcgggagcagcauauccuuuugugguguaaacagugacacuguggguuggucuuggccagacggugcugaguugccauuuaccauugacaaguaa

SEQ ID NO: 55094 - RNA, 1410 nt, Artificial Sequence
  derived and/or modified CDS sequence (wt) from neuraminidase__InfluenzaA__AFN19815
augaauccaaaccaaaagauaauaaccauugguucggucuguaugacaauuggaauggcuaacuuaauauuacaaauuggaaacauaaucucaauauggauuagccacucaauucaacuugggaaucaaagucagauugaaacaugcaaucaaagcgucauuacuuaugaaaacaacacuuggguaaaucagacauauguuaacaucagcaacaccaacuuugcugcuggacagucagugguuuccgugaaauuagcgggcaauuccucucucugcccuguuaguggaugggcuauauacaguaaagacaacaguauaagaaucgguuccaagggggauguguuugucauaagggaaccauucauaucaugcucccccuuggaaugcagaaccuucuucuugacucaaggggccuugcuaaaugacaaacauuccaauggaaccauuaaagacaggagcccauaucgaacccuaaugagcuguccuauuggugaaguucccucuccauacaacucaagauuugagucagucgcuuggucagcaagugcuugucaugauggcaucaauuggcuaacaauuggaauuucuggcccagacaauggggcaguggcuguguuaaaguacaacggcauaauaacagacacuaucaagaguuggagaaacaauauauugagaacacaagagucugaaugugcauguguaaaugguucuugcuuuaccauaaugaccgauggaccaagugauggacaggccucauacaagaucuucagaauagaaaagggaaagauagucaaaucagucgaaaugaaugccccuaauuaucacuaugaggaaugcuccuguuauccugauucuagugaaaucacaugugugugcagggauaacuggcauggcucgaaucgaccgugggugucuuucaaccagaaucuggaauaucagauaggauacauaugcagugggauuuucggagacaauccacgcccuaaugauaagacaggcaguugugguccaguaucgucuaauggagcaaauggaguaaaaggauuuucauucaaauacggcaaugguguuuggauagggagaacuaaaagcauuaguucgagaaaagguuuugagaugauuugggauccaaacggauggacugggacagacaauaacuucucaauaaagcaagauaucguaggaacaaaugaguggucaggauauagcgggaguuuuguucagcauccagaacuaacagggcuggauuguauaagaccuugcuucuggguugaacuaaucagagggcgacccaaagagaacacaaucuggacuagcgggagcagcauauccuuuugugguguaaacagugacacuguggguuggucuuggccagacggugcugaguugccauuuaccauugacaauuaa

SEQ ID NO: 55095 - RNA, 1410 nt, Artificial Sequence
  derived and/or modified CDS sequence (wt) from neuraminidase__InfluenzaA__AFN19833
augaauccaaaccaaaagauaauaaccauugguucggucuguaugacaauuggaauggcuaacuuaauauuacaaauuggaaacauaaucucaauauggauuagccacucaauucaacuugggaaucaaagucagauugaaacaugcaaucaaagcgucauuacuuaugaaaauaacacuuggguaaaucagacauauguuaacaucagcaacaccaacuuugcugcuggacagucagugguuuccgugaaauuagcgggcaauuccucucucugcccuguuaguggaugggcuauauacaguaaagacaacaguauaagaaucgguuccaagggggauguguuugucauaagggaaccauucauaucaugcucccccuuggaaugcagaaccuucuucuugacucaaggggccuugcuaaaugacaaacauuccaauggaaccauuaaagacaggagcccauaucgaacccuaaugagcuguccuauuggugaaguucccucuccauacaacucaagauuugagucagucgcuuggucagcaagugcuugucaugauggcaucaauuggcuaacaauuggaauuucuggcccagacaauggggcaguggcuguguuaaaguacaacggcauaauaacagacacuaucaagaguuggaaaaacaauauauugagaacacaagagucugaaugugcauguguaaaugguucuugcuuuaccauaaugaccgauggaccaagugauggacaggccucauacaagaucuucagaauagaaaagggaaagauagucaaaucagucgaaaugaaugccccuaauuaucacuaugaggaaugcuccuguuauccugauucuagugaaaucacaugugugugcagggauaacuggcauggcucgaaucgaccgugggugucuuucaaccagaaucuggaauaucagauaggauacauaugcagugggauuuucggagacaauccacgcccuaaugauaagacaggcaguugugguccaguaucgucuaauggagcaaauggaguaaaaggauuuucauucaaauacggcaaugguguuuggauagggagaacuaaaagcauuaguucaagaaaagguuuugagaugauuugggauccaaacggauggacugggacagacaauaacuucucaauaaagcaagauaucguaggaauaaaugaguggucaggauauagcgggaguuuuguucagcauccagaacuaacagggcuggauuguauaagaccuugcuucuggguugaacuaaucagagggcgacccaaagagaacacaaucuggacuagcgggagcagcauauccuuuugugguguaaacagugacacuguggguuggucuuggccagacggugcugaguugccauuuaccauugacaaguaa

SEQ ID NO: 55096 - RNA, 1410 nt, Artificial Sequence; identical to SEQ ID NO: 52728
  derived and/or modified CDS sequence (wt) from neuraminidase__InfluenzaA__AFN19851

SEQ ID NO: 55097 - RNA, 1410 nt, Artificial Sequence
  derived and/or modified CDS sequence (wt) from neuraminidase__InfluenzaA__AFN19857
augaauccaaaccaaaagauaauaaccauugguucggucuguaugacaauuggaauggcuaacuuaauauuacaaauuggaaacauaaucucaauauggauuagccacucaauucaacuugggaaucaaagucagauugaaacaugcaaucaaagcgucauuacuuaugaaaacaacacuuggguaaaucagacauauguuaacaucagcaacaccaacuuugcugcugggcagucagugguuuccgugaaauuagcgggcaauuccucucucugcccuguuaguggaugggcuauauacaguaaagacaacaguauaagaaucgguuccaagggggauguguuugucauaagggaaccauucauaucaugcucccccuuggaaugcagaaccuucuucuugacucaaggggccuugcuaaaugacaaacauuccaauggaaccauuaaagacaggagcccauaucgaacccuaaugagcuguccuauuggugaaguucccucuccauacaacucaagauuugagucagucgcuuggucagcaagugcuugucaugauggcaucaauuggcuaacaauuggaauuucuggcccagacaauggggcaguggcuguguuaaaguacaacggcauaauaacagacacuaucaagaguuggagaaacaauauauugagaacacaagagucugaaugugcauguguaaaugguucuugcuuuaccauaaugaccgauggaccaagugauggacaggccucauacaagaucuucagaauagaaaagggaaagauagucaaaucagucgaaaugaaugccccuaauuaucacuaugaggaaugcuccuguuauccugauucuagugaaaucacaugugugugcagggauaacuggcauggcucgaaucgaccgugggugucuuucaaccagaaucuggaauaucagauaggauacauaugcagugggauuuucggagacaauccacgcccuaaugauaagacaggcaguugugguccaguaucgucuaauggagcaaauggaguaaaaggauuuucauucaaauacggcaauggcguuuggauagggagaacuaaaagcauuaguucaagaaaagguuuugagaugauuugggauccaaacggauggacugggacagacaauaacuucucaauaaagcaagauaucguaggaauaaaugaguggucaggauauagcgggaguuuuguucagcauccagaacuaacagggcuggauuguauaagaccuugcuucuggguugaacuaaucagagggcgacccaaagagaacacaaucuggacuagcgggagcagcauauccuuuugugguguaaacagugacacuguggguuggucuuggccagacggugcugaguugccauuuaccauugacaaguaa

SEQ ID NO: 55098 - RNA, 1410 nt, Artificial Sequence
  derived and/or modified CDS sequence (wt) from neuraminidase__InfluenzaA__AFN19867
augaauccaaaccaaaagauaauaaccauugguucggucuguaugacaauuggaauggcuaacuuaauauuacaaauuggaaacauaaucucaauauggauuagccacucaauucaaaucgggaaucaaaaucagauugaaacaugcaaucaaagcgucauuacuuaugaaaacaacacuuggguaaaucagacauauguuaacaucagcaacaccaacuuugcugcuggacagucagugguuuccgugaaauuagcgggcaauuccucucucugcccugucaguggaugggcuauauacaguaaagacaacaguauaagaaucgguuccaagggggauguguuugucauaagggaaccauucauaucaugcucccccuuggaaugcagaaccuucuucuugacucaaggggccuugcuaaaugacaaacauuccaauggaaccauuaaagacaggagcccauaucgaacccuaaugagcuguccuauuggugaaguucccucuccauacaacucaagauuugagucagucgcuuggucagcaagugcuugucaugauggcaucaauuggcuaacaauuggaauuucuggcccagacaauggggcaguggcuguguuaaaguacaacggcauaauaacagacacuaucaagaguuggagaaacaauauauugagaacacaagaguccgaaugugcauguguaaaugguucuugcuuuaccauaauaaccgauggaccaagugauggacaggccucauacaagaucuucagaauagaaaagggaaagauagucaaaucagucgaaaugaaugccccuaauuaucacuaugaggaaugcuccuguuauccugauucuagugaaaucacaugugugugcagggauaacuggcauggcucgaaucgaccgugggugucuuucaaccagaaucuggaauaucagauaggauacauaugcagugggauuuucggagacaauccacgcccuaaugauaaaacaggcaguugugguccaguaucgucuaauggagcaaauggaguaaaaggauuuucauucaaauacggcaaugguguuuggauagggagaacuaaaagcauuaguucaagaaaagguuuugagaugauuugggauccaaacggauggacugggacagacaauaacuucucaauaaagcaagauaucguaggaauaaaugaguggucaggauauagcgggaguuuuguucagcauccagaacuaacagggcuggauuguauaagaccuugcuucuggguugaacuaaucagagggcgacccaaagagaacacaaucuggacuagcgggagcagcauauccuuuugugguguaaacagugacacuguggguuggucuuggccagacggugcugaguugccauuuaccauugacaaguaa

SEQ ID NO: 55099 - RNA, 1410 nt, Artificial Sequence
  derived and/or modified CDS sequence (wt) from neuraminidase__InfluenzaA__AFN19877
augaauccaaaccaaaagauaauaaccauugguucggucuguaugacaauuggaauggcuaacuuaauauuacaaauuggaaacauaaucucaauauggauuagccacucaauucaacuugggaaucaaaaucagauugaaacaugcaaucaaagcgucauuacuuaugaaaacaacacuuggguaaaucagacauauguuaacaucagcaacaccaacuuugcugcuggacagucagugguuuccgugaaauuagcgggcaauuccucucucugcccuguuaguggaugggcuauauacaguaaagacaacaguauaagaaucgguuccaagggggauguguuugucauaagggaaccauucauaucaugcucccccuuggaaugcagaaccuucuucuugacucaaggggccuugcuaaaugacaaacauuccaauggaaccauuaaagacaggagcccauaucgaacccuaaugagcuguccuauuggugaaguucccucuccauacaacucaagauuugagucagucgcuuggucagcaagugcuugucaugauggcaucaauuggcuaacaauuggaauuucuggcccagacaauggggcaguggcuguguuaaaguacaacggcauaauaacagacacuaucaagaguuggagaaacaauauauugagaacacaagagucugaaugugcauguguaaaugguucuugcuuuaccauaaugaccgauggaccaagugauggacaggccucauacaagaucuucagaauagaaaagggaaagauagucaaaucagucgaaaugaaugccccuaauuaucacuaugaggaaugcuccuguuauccugauucuagugaaaucacaugugugugcagggauaacuggcauggcucgaaucgaccgugggugucuuucaaccagaaucuggaauaucagauaggauacauaugcagugggauuuucggagacaauccacguccuaaugauaagacaggcaguugugguccaguaucgucuaauggagcaaauggaguaaaaggauuuucauucaaauacggcaaugguguuuggauagggagaacuaaaagcauuaguucaagaaaagguuuugagaugauuugggauccaaacggauggacugggacagacaauaacuucucaauaaagcaagauauaguaggaauaaaugaguggucaggauauagcgggaguuuuguucagcauccagaacuaacagggcuggauuguauaagaccuugcuucuggguugaacuaaucagagggcgacccaaagagaacacaaucuggacuagcgggagcagcauauccuuuugugguguaaacagugacacuguggguuggucuuggccagacggugcugaguugccauuuaccauugacaaguaa

SEQ ID NO: 55100 - RNA, 1410 nt, Artificial Sequence
  derived and/or modified CDS sequence (wt) from neuraminidase__InfluenzaA__AFN19887
augaauccaaaccaaaagauaauaaccauugguucggucuguaugacaauuggaauggcuaacuuaauauuacaaauuggaaacauaaucucaauauggauuagccacucaauucaacuugggaaucaaagucagauugaaacaugcaaucaaagcgucauuacuuaugaaaacaacacuuggguaaaucagacauauguuaacaucagcaacaccaacuuugcugcuggacagucagugguuuccgugaaauuagcgggcaauuccucucucugcccuguuaguggaugggcuauauacaguaaagacaacaguauaagaaucgguuccaagggggauguguuugucauaagggaaccauucauaucaugcucccccuuggaaugcagaaccuucuucuugacucaaggggccuugcuaaaugacaaacauuccaauggaaccauuaaagacaggagcccauaucgaacccuaaugagcuguccuauuggugaaguucccucuccauacaacucaagauuugagucagucgcuuggucagcaagugcuugucaugauggcaucaauuggcuaacaauuggaauuucuggcccagacaauggggcaguggcuguguuaaaguacaacggcauaauaacagacacuaucaagaguuggagaaacaauauauugagaacacaagagucugaaugugcauguguaaaugguucuugcuuuaccauaaugaccgauggaccaagugauggacaggccucauacaagaucuucagaauagaaaagggaaagauagucaaaucagucgaaaugaaugccccuaauuaucacuaugaggaaugcuccuguuauccugauucuagugaaaucacaugugugugcagggauaacuggcauggcucgaaucgaccgugggugucuuucaaccagaaucuggaauaucagauaggauacauaugcagugggauuuucggagacaauccacgcccuaaugauaagacaggcaguugugguccaguaucgucuaauggagcaaauggaguaaaaggauuuucauucaaauacggcaaugguguuuggauagggagaacuaaaagcauuaguucaagaaaagguuuugagaugauuugggacccaaacggauggacugggacagacaauaacuucucaauaaagcaagauaucguaggaauaaaugaguggucaggauauagcgggaguuuuguucagcauccagaacuaacagggcuggauuguauaagaccuugcuucuggguugaacuaaucagagggcgacccaaagagaacacaaucuggacuagcgggagcagcauauccuuuugugguguaaacagugacacuguggguuggucuuggccagacggugcugaguugccauuuacuauugacaaguaa

SEQ ID NO: 55101 - RNA, 1410 nt, Artificial Sequence
  derived and/or modified CDS sequence (wt) from neuraminidase__InfluenzaA__AFN19897
augaauccaaaccaaaagauaauaaccauugguucggucuguaugacaauuggaauggcuaacuuaauauuacaaauuggaaacauaaucucaauauggauuagccacucaauucaacuugggaaucaaagucagauugaaacaugcaaucaaagcgucauuacuuaugaaaacaacacuuggguaaaucagacauauguuaacaucagcaacaccaacuuugcugcuggacagucagugguuuccgugaaauuagcgggcaauuccucucucugcccuguuaguggaugggccauauacaguaaagacaacaguauaagaaucgguuccaagggggauguguuugucauaagggaaccauucauaucaugcucccccuuggaaugcagaaccuucuucuugacucaaggggccuugcuaaaugacaaacauuccaauggaaccauuaaagacaggagcccauaucgaacccuaaugagcuguccuauuggugaaguucccucuccaugcaacucaagauuugagucagucgcuuggucagcaagugcuugucaugauggcaucaauuggcuaacaauuggaauuucuggcccagacaauggggcaguggcuguguuaaaguacaacggcauaauaacagacacuaucaagaguuggagaaacaauauauugagaacacaagagucugaaugugcauguguaaaugguucuugcuuuaccauaaugaccgauggaccaagugauggacaggccucauacaagaucuucagaauagaaaagggaaagauagucaaaucagucgaaaugaaugccccuaauuaucacuaugaggaaugcuccuguuauccugauucuagugaaaucacaugugugugcagggauaacuggcauggcucgaaucgaccgugggugucuuucaaccagaaucuggaauaucagauaggauacauaugcagugggauuuucggagacaauccacgcccuaaugauaagacaggcaguugugguccaguaucgucuaauggagcaaauggaguaaaaggauuuucauucaaauacggcaauggcguuuggauagggagaacuaaaagcauuaguucaagaaaagguuuugagaugauuugggauccaaacggauggacugggacagacaauaacuucucaauaaagcaagauaucguaggaauaaaugaguggucaggauauagcgggaguuuuguucagcauccagaacuaacagggcuggauuguauaagaccuugcuucuggguugaacuaaucagagggcgacccaaagagaacacaaucuggacuagcgggagcagcauauccuuuugugguguaaacagugacacuguggguuggucuuggccagacggugcugaguugccauuuaccauugacaaguaa

SEQ ID NO: 55102 - RNA, 1410 nt, Artificial Sequence; identical to SEQ ID NO: 55100
  derived and/or modified CDS sequence (wt) from neuraminidase__InfluenzaA__AFN19907

SEQ ID NO: 55103 - RNA, 1410 nt, Artificial Sequence; identical to SEQ ID NO: 52728
  derived and/or modified CDS sequence (wt) from neuraminidase__InfluenzaA__AFN19917

SEQ ID NO: 55104 - RNA, 1410 nt, Artificial Sequence
  derived and/or modified CDS sequence (wt) from neuraminidase__InfluenzaA__AFN19923
augaauccaaaccaaaagauaauaaccauugguucggucuguaugacaauuggaauggcuaacuuaauauuacaaauuggaaacauaaucucaauauggauuagccacucaauucaacuugggaaucaaagucagauugaaacaugcaaucaaaacgucauuacuuaugaaaacaacacuuggguaaaucagacauauguuaacaucagcaacaccaacuuugcugcuggacagucagugguuuccgugaaauuagcgggcaauuccucucucugcccuguuagcggaugggcuauauacaguaaagacaacaguauaagaaucgguuccaagggggauguguuugucauaagggaaccauucauaucaugcucccccuuggaaugcagaaccuucuucuugacucaaggggccuugcuaaaugacaaacauuccaauggaaccauuaaagacaggagcccauaucgaacccuaaugagcuguccuauuggugaaguucccucuccauacaacucaagauuugagucagucgcuuggucagcaagugcuugucaugauggcaucaauuggcuaacaauuggaauuucuggcccagacaauggggcaguggcuguguuaaaguacaacggcauaauaacagacacuaucaaaaguuggagaaacaauauauugagaacacaagagucugaaugugcauguguaaaugguucuugcuuuaccauaaugaccgauggaccaagugauggacaggccucauacaagaucuucagaauagaaaagggaaagauagucaaaucagucgaaaugaaugccccuaauuaucacuaugaggaaugcuccuguuauccugauucuagugaaaucacaugugugugcagggauaacuggcauggcucgaaucgaccguggguuuccuucaaccagaaucuggaauaucagauaggauacauaugcagugggauuuucggagacaauccacgcccuaacgauaagacaggcaguugugguccaguaucgucuaauggagcaaauggaguaaaaggauuuucauucaaauacggcaaugguguuuggauagggagaacuaaaagcauuaguucaagaaaagguuuugagaugauuugggauccaaauggauggacugggacagacaauaacuucucaauaaagcaagauaucguaggaauaaaugaguggucaggauauagcgggaguuuuguucagcauccagaacuaacagggcuggauuguauaagaccuugcuucuggguugaacuaaucagagggcgacccaaagagaacacaaucuggacuagcgggagcagcauauccuuuugugguguaaacagugacacuguggguuggucuuggccagacggugcugaguugccauuuaccauugacaaguaa

SEQ ID NO: 55105 - RNA, 1410 nt, Artificial Sequence
  derived and/or modified CDS sequence (wt) from neuraminidase__InfluenzaA__AFN19933
augaauccaaaccaaaagauaauaaccauugguucggucuguaugacaauuggaauggcuaacuuaauauuacaaauuggaaacauaaucucaauauggauuagccacucaauucaacuugggaaucaaagucagauugaaacaugcaaucaaagcgucauuacuuaugaaaacaacacuuggguaaaucagacauauguuaacaucagcaacaccaacuuugcugcuggacagucagugguuuccgugaaauuagcgggcaauuccucucucugcccuguuaguggaugggcuauauacaguaaagacaacaguauaagaaucgguuccaagggggauguguuugucauaagggaaccauucauaucaugcucccccuuggaaugcagaaccuucuucuugacucaaggggccuugcuaaaugacaaacauuccaauggaaccauuaaagacaggagcccauaucgaaccuuaaugagcuguccuauuggugaaguucccucuccauacaacucaagauuugagucagucgcuuggucagcaagugcuugucaugauggcaucaauuggcuaacaauuggaauuucuggcccagacaauggggcaguggcuguguuaaaguacaacggcauaauaacagacacuaucaagaguuggagaaacaauauauugagaacacaagagucugaaugugcauguguaaaugguucuugcuuuaccauaaugaccgauggaccaagugauggacaggccucauacaagaucuucagaauagaaaagggaaagauagucaaaucagucgaaaugaaugccccuaauuaucacuaugaggaaugcuccuguuauccugauucuagugaaaucacaugugugugcagggauaacuggcauggcucgaaucgaccgugggugucuuucaaccagaaucuggaauaucagauaggauacauaugcagugggauuuucggagacaauccacgcccuaaugauaagacaggcaguugugguccaguaucgucuaauggagcaaauggaguaaaaggauuuucauucaaauacggcaaugguguuuggauagggagaacuaaaagcauuaguucaagaaaagguuuugagaugauuugggauccaaacggauggacugggacagacaauaacuucucaauaaagcaagauaucguaggaauaaaugaguggucaggauauagcgggaguuuuguucagcauccagaacuaacagggcuggauuguauaagaccuugcuucuggguugaacuaaucagagggcgacccaaagagaacacaaucuggacuagcgggagcagcauauccuuuugugguguaaauagugacacuguggguuggucuuggccagacggugcugaguugccauuuaccauugacaaguaa

SEQ ID NO: 55106 - RNA, 1410 nt, Artificial Sequence
  derived and/or modified CDS sequence (wt) from neuraminidase__InfluenzaA__AFN19943
augaauccaaaccaaaagauaauaaccauugguucggucuguaugacaauuggaauggcuaacuuaauauuacaaauuggaaacauaaucucaauauggauuagccacucaauucaacuugggaaucaaaaucagauugaaacaugcaaucaaagcgucauaacuuaugaaaacaacacuuggguaaaucagacauauguuaacaucagcaacaccaacuuugcugcuggacaaucagugguuuccgugaaauuagcgggcaauucuucucucugcccuguuaguggaugggcuauauacaguaaagacaacaguauaagaaucgguuccaagggggauguguuugucauaagggaaccauucauaucaugcuccccuuuggaaugcagaaccuucuucuugacucaaggggccuugcuaaaugacaaacauuccaauggaaccauuaaagacaggagcccauaucgaacccuaaugagcuguccuauuggugaaguucccucuccauacaacucaagauuugagucagucgcuuggucagcaagugcuugucaugauggcaucaauuggcuaacaauuggaauuucuggcccagacaauggggcaguggcuguguuaaaguacaacggcauaauaacagacacuaucaagaguuggagaaacaauauauugagaacacaagaguccgaaugugcauguguaaauggcucuugcuuuacugugaugaccgauggaccaaaugauggacaggccucauacaagaucuucagaauagaaaagggaaagauagucaaaucagucgaaaugaaugccccuaauuaucacuaugaggaaugcuccuguuauccugauucuagugaaaucacaugugugugcagggauaauuggcauggcgcgaaucgaccgugggugucuuucaaccagaaucuggaauaucagauaggauacauaugcagugggauuuucggggacaauccacgcccuaaugauaagacaggcaguugugguccaguaucgucuaauggagcaaauggaguaaaaggauuuucauucaaauacggcaaugguguuuggauagggagaacuaaaagcauuaguucaagaaacgguuuugagaugauuugggauccgaacggauggacugggacagacaauaacuucucaauaaagcaagauaucguaggaauaaaugaguggucaggauauagcgggaguuuuguucagcauccagaacuaacagggcuggauuguauaagaccuugcuucuggguugaacuaaucagagggcgacccaaagagaacacaaucuggacuagcgggagcagcauauccuuuugugguguaaacagugacacuguggguuggucuuggccagacggugcugaguugccauuuaccauugacaaguaa

SEQ ID NO: 55107 - RNA, 1410 nt, Artificial Sequence
  derived and/or modified CDS sequence (wt) from neuraminidase__InfluenzaA__AFN19953
augaauccaaaccaaaagauaauaaccauugguucggucuguaugacaauuggaauggcuaacuuaauauuacaaauuggaaacauaaucucaauauggauuagccacucaauucaacuugggaaucaaagucagauugaaacaugcaaucaaagagucauuacuuaugaaaacaacacuuggguaaaucagacauauguuaacaucagcaacaccaacuuugcugcugggcagucagugguuuccgugaaauuagcgggcaauuccucucucugcccuguuaguggaugggcuauauacaguaaagacaacaguauaagaaucgguuccaagggggauguguuugucauaagggaaccauucauaucaugcucccccuuggaaugcagaaccuucuucuugacucaaggggccuugcuaaaugacaaacauuccaauggaaccauuaaagacaggagcccauaucgaacccuaaugagcuguccuauuggugaaguucccucuccauacaacucaagauuugagucagucgcuuggucagcaagugcuugucaugauggcaucaauuggcuaacaauuggaauuucuggcccagacaauggggcaguggcuguguuaaaguacaacggcauaauaacagacacuaucaagaguuggagaaacaauauauugagaacacaagagucugaaugugcauguguaaaugguucuugcuuuaccauaaugaccgauggaccaagugauggacaggccucauacaagaucuucagaauagaaaagggaaagauagucaaaucagucgaaaugaaugccccuaauuaucacuaugaggaaugcuccuguuauccugauucuagugaaaucacaugugugugcagggauaacuggcauggcucgaaucgaccgugggugucuuucaaccagaaucuggaauaucagauaggauacauaugcagugggauuuucggagacaauccacgcccuaaugauaagacaggcaguugugguccaguaucgucuaauggagcaaauggaguaaaaggauuuucauucaaauacggcaauggcguuuggauagggagaacuaaaagcauuaguucaagaaaagguuuugagaugauuugggauccaaacggauggacugggacagacaauaacuucucaauaaagcaagauaucguagaaauaaaugaguggucaggauauagcgggaguuuuguucagcauccagaacuaacagggcuggauuguauaagaccuugcuucuggguugaacuaaucagagggcgacccaaagagaacacaaucuggacuagcgggagcagcauauccuuuugugguguaaacagugacacuguggguuggucuuggccagacggugcugaguugccauuuaccauugacaaguaa

SEQ ID NO: 55108 - RNA, 1410 nt, Artificial Sequence
  derived and/or modified CDS sequence (wt) from neuraminidase__InfluenzaA__AFN19967
augaauccaaaccaaaagauaauaaccauugguucggucuguaugacaauuggaauggcuaacuuaauauuacaaauuggaaacauaaucucaauauggauuagccacucaauucaacuugggaaucaaagucagauugaaacaugcaaucaaagcgucauuacuuaugaaaacaacacuuggguaaaucagacauauguuaacaucagcaacaccaacuuugcugcuggacagucagugguuuccgugaaauuagcgggcaauucuucucucugcccuguuaguggaugggcuauauacaguaaagacaacaguauaagaaucgguuccaagggggauguguuugucauaagggaaccauucauaucaugcucccccuuggaaugcagaaccuucuucuugacucaaggggccuugcuaaaugacaaacauuccaauggaaccauuaaagacaggagcccauaucgaacccuaaugagcuguccuauuggugaaguucccucuccauacaacucaagauuugagucagucgcuuggucagcaagugcuugucaugauggcaucaauuggcuaacaauuggaauuucuggcccagacaauggggcaguggcuguguuaaaguacaacggcauaauaacagacacuaucaagaguuggagaagcaauauauugagaacacaagagucugaaugugcauguguaaaugguucuugcuuuaccauaaugaccgauggaccaagugauggacaggccucauacaagaucuucagaauagaaaagggaaagauagucaaaucagucgaaaugaaugccccuaauuaucacuaugaggaaugcuccuguuauccugauucuagugaaaucacaugugugugcagggauaacuggcauggcucgaaucgaccgugggugucuuucaaccagaaucuggaauaucagauaggauacauaugcagugggauuuucggagacaauccacgcccuaaugauaagacaggcaguugugguccaguaucgucuaauggagcaaauggaguaaaaggauuuucauucaaauacggcaauggcguuuggauagggagaacuaaaagcauuaguucaagaaaagguuuugagaugauuugggauccaaacggauggacugggacagacaauaacuucucaauaaagcaagauaucguaggaauaaaugaguggucaggauauagcgggaguuuuguucagcauccagaacuaacagggcuggauuguauaagaccuugcuucuggguugaacuaaucagagggcgacccaaagagaacacaaucuggacuagcgggagcagcauauccuuuugugguguaaacagugacacuguggguuggucuuggccagacggugcugaguugccauuuaccauugacaaguaa

SEQ ID NO: 55109 - RNA, 1410 nt, Artificial Sequence
  derived and/or modified CDS sequence (wt) from neuraminidase__InfluenzaA__AFN19973
augaauccaaaccaaaagauaauaaccauugguucggucuguaugacaauuggaauggcuaacuuaauauuacagauuggaaacauaaucucaauauggauuagccacucaauucaacuugggaaucaaagucagauugaaacaugcaaucaaagcgucauuacuuaugaaaacaacacuuggguaaaucagacauauguuaacaucagcaacaccaacuuugcugcuggacagucagugguuuccgugaaauuagcgggcaauuccucucucugcccuguuaguggaugggcuauauacaguaaagacaacaguauaagaaucgguuccaagggggauguguuugucauaagggaaccauucauaucaugcucccccuuggaaugcagaaccuucuucuugacucaaggggccuugcuaaaugacaaacauuccaauggaaccauuaaagacaggagcccauaucgaacccuaaugagcuguccuauuggugaaguucccucuccauacaacucaagauuugagucagucgcuuggucagcaagugcuugucaugauggcaucaauuggcuaacaauuggaauuucuggcccagacaauggggcaguggcuguguuaaaguacaacggcauaauaacagacacuaucaagaguuggagaaacaauauauugagaacacaagagucugaaugugcauguguaaaugguucuugcuuuaccauaaugaccgauggaucaagugauggacaggccucauacaagaucuucagaauagaaaagggaaagauagucaaaucagucgaaaugaaugccccuaauuaucacuaugaggaaugcuccuguuauccugauucuagugaaaucacaugugugugcagggauaacuggcauggcucgaaucgaccgugggugucuuucaaccagaaucuggaauaucagauaggauacauaugcagugggauuuucggagacaauccacgcccuaaugauaagacaggcaguugugguccaguaucgucuaauggagcaaauggaguaaaaggauuuucauucaaauacggcaaugguguuuggauagggagaacuaaaagcauuaguucaagaaaagguuuugagaugauuugggaucccaacggauggacugggacagacaauaacuucucaauaaagcaagauaucguaggaauaaaugaguggucaggauauagcgggaguuuuguucagcauccagaacuaacagggcuggauuguauaagaccuugcuucuggguugaacuaaucagagggcgacccaaagagaacacaaucuggacuagcgggagcagcauauccuuuugugguguaaacagugacacuguggguuggucuuggccagacggugcugaguugccauuuaccauugacaaguaa

SEQ ID NO: 55110 - RNA, 1410 nt, Artificial Sequence
  derived and/or modified CDS sequence (wt) from neuraminidase__InfluenzaA__AFN19979
augaauccaaaccaaaagauaauaaccauugguucggucuguaugacaauuggaauggcuaacuuaauauuacaaauuggaaacauaaucucaauauggauuagccacucaauucaacuugggaaucaaagucagauugaaacaugcaaucaaagcgucauuacuuaugaaaacaacacuuggguaaaucagacauauguuaacaucagcaacaccaacuuugcugcuggacagucagugguuuccgugaaauuagcgggcaauuccucucucugcccuguuaguggaugggcuauauacaguaaagacaacaguauaagaaucgguuccaagggggauguguuugucauaagggaaccauucauaucaugcucccccuuggaaugcagaaccuucuucuugacucaaggggccuugcuaaaugacaaacauuccaauggaaccauuaaagacaggagcccauaucgaacccuaaugagcuguccuauuggugaaguucccucuccauacaacucaagauuugagucagucgcuuggucagcaagugcuugucaugauggcaucaauuggcuaacaauuggaauuucuggcccagacaauggggcaguggcuguguuaaaguacaacggcauaauaacagacacuaucaagaguuggagaaacaauauauugagaacacaagagucugaaugugcauguguaaaugguucuugcuuuaccauaaugaccgauggaccaagugauggacaggccucauacaagaucuucagaauagaaaagggaaagauagucaaaucagucgaaaugaaugccccuaauuaucauuaugaggaaugcuccuguuauccugauucuagugaaaucacaugugugugcagggauaacuggcauggcucgaaucgaccgugggugucuuucaaccagaaucuggaauaucagauaggauacauaugcagugggauuuucggagacaauccacgcccuaaugauaagacaggcaguugugguccaguaucgucuaauggagcaaauggaguaaaaggauuuucauucaaauacggcaaugguguuuggauagggagaacuaaaagcauuaguucaagaaaagguuuugagaugauuugggauccaaauggauggacugggacagacaauaacuucucaauaaagcaagauaucguaggaauaaaugaguggucaggauauagcgggaguuuuguucagcauccagaacuaacagggcuggauuguauaagaccuugcuucuggguugaacuaaucagagggcgacccaaagagaacacaaucuggacuagcgggagcagcauauccuuuugugguguaaacagugacacuguggguuggucuuggccagacggugcugaguugccauuuaccauugacaaguaa

SEQ ID NO: 55111 - RNA, 1410 nt, Artificial Sequence
  derived and/or modified CDS sequence (wt) from neuraminidase__InfluenzaA__AFN19985
augaauccaaaccaaaagauaauaaccauugguucggucuguaugacaauuggaauggcuaacuuaauauuacaaauuggaaacauaaucucaauauggauuagccacucaauucaacuugggaaucaaagucagauugaaacaugcaaucaaagcgucauuacuuaugaaaacaacacuuggguaaaucagacauauguuaacaucagcaacaccaacuuugcugcuggacagucagugguuuccgugaaauuagcgggcaauuccucucucugcccuguuaguggaugggcuauauacaguaaagacaacaguauaagaaucgguuccaagggggauguguuugucauaagggaaccauucauaucaugcucccccuuggaaugcagaaccuucuucuugacucaaggggccuugcuaaaugacaaacauuccaauggaaccauuaaagacaggagcccauaucgaacccuaaugagcuguccuauuggugaaguucccucuccauacaacucaagauuugagucagucgcuuggucagcaagugcuugucaugauggcaucaauuggcuaacaauuggaauuucuggcccagacaauggggcaguggcuguguuaaaguacaacggcauaauaacagacacuaucaagaguuggagaaacaauauauugagaacacaagagucugaaugugcauguguaaaugguucuugcuuuaccauaaugaccgauggaccaagugauggacaggccucauacaagaucuucagaauagaaaagggaaagauagucaaaucagucgaaaugaaugccccuaauuaucacuaugaggaaugcuccuguuauccugauucuagugaaaucacaugugugugcagggauaacuggcauggcucgaaucgaccgugggugucuuucaaccagaaucuggaauaucagauaggauacauaugcagugggauuuucggagacaauccacgcccuaaugauaagacaggcaguugugguccaguaucgucuaauggagcaaauggaguaaaaggauuuucauucaaauacggcaauggcguuuggauagggagaacuaaaagcguuaguucaagaaaagguuuugagaugauuugggauccaaacggauggacugggacagacaauaacuucucaauaaagcaagauaucguaggaauaaaugaguggucaggauauagcgggaguuuuguucagcauccagaacuaacagggcuggauuguauaagaccuugcuucuggguugaacuaaucagagggcgacccaaagagaacacaaucuggacuagcgggagcagcauauccuuuugugguguaaacagugacacuguggguuggucuuggccagacggugcugaguugccauuuaccauugacaaguaa

SEQ ID NO: 55112 - RNA, 1410 nt, Artificial Sequence
  derived and/or modified CDS sequence (wt) from neuraminidase__InfluenzaA__AFN19995
augaauccaaaccaaaagauaauaaccauugguucggucuguaugacaauuggaauggcuaacuuaauauuacaaauuggaaacauaaucucaauauggauuagccacucaauucaacuugggaaucaaagucagacugaaacaugcaaucaaagcgucauuacuuaugaaaacaacacuuggguaaaucagacauauguuaacaucagcaacaccaacuuugcugcuggacagucagugguuuccgugaaauuagcgggcaauuccucucucugcccuguuaguggaugggcuauauacaguaaagacaacaguauaagaaucgguuccaagggggauguguuugucauaagggaaccauucauaucaugcucccccuuggaaugcagaaccuucuucuugacucaaggggccuugcuaaaugacaaacauuccaauggaaccauuaaagacaggagcccauaucgaaccuuaaugagcuguccuauuggugaaguucccucuccauacaacucaagauuugagucagucgcuuggucagcaagugcuugucaugauggcaucaauuggcuaacaauuggaauuucuggcccagacaauggggcaguggcuguguuaaaguacaacggcauaauaacagacacuaucaagaguuggagaaacaauauauugagaacacaagagucugaaugugcauguguaaaugguucuugcuuuaccauaaugaccgauggaccaagugauggacaggccucauacaagaucuucagaauagaaaagggaaagauagucaaaucagucgaaaugaaugccccuaauuaucacuaugaggaaugcuccuguuauccugauucuagugaaaucacaugugugugcagggauaacuggcauggcucgaaucgaccgugggugucuuucaaccagaaucuggaauaucagauaggauacauaugcagugggauuuucggagacaauccacgcccuaaugauaagacaggcaguugugguccaguaucgucuaauggagcaaauggaguaaaaggauuuucauucaaauacggcaaugguguuuggauagggagaacuaaaagcauuaguucaagaaaagguuuugagaugauuugggauccaaacggauggacugggacagacaauaacuucucaauaaagcaagauaucguaggaauaaaugaguggucaggauauagcgggaguuuuguucagcauccagaacuaacagggcuggauugcauaagaccuugcuucuggguugaacuaaucagagggcgacccaaagagaacacaaucuggacuagugggagcagcauauccuuuugugguguaaacagugacacuguggguuggucuuggccagacggugcugaguugccauuuaccauugacaaguaa

SEQ ID NO: 55113 - RNA, 1410 nt, Artificial Sequence; identical to SEQ ID NO: 52734
  derived and/or modified CDS sequence (wt) from neuraminidase__InfluenzaA__AFN20001

SEQ ID NO: 55114 - RNA, 1410 nt, Artificial Sequence
  derived and/or modified CDS sequence (wt) from neuraminidase__InfluenzaA__AFN20013
augaauccaaaccaaaagauaauaaccauugguucggucuguaugacaauuggaauggcuaacuuaauauuacaaauuggaaacauaaucucaauauggauuagccacucaauucaacuugggaaucaaagucagauugaaacaugcaaucaaagcgucauuacuuaugaaaacaacacuuggguaaaucagacauauguuaacaucagcaacaccaacuuugcugcuggacagucagugguuuccgugaaauuagcgggcaauuccucucucugcccuguuaguggaugggcuauauacaguaaagacaacaguauaagaaucgguuccaagggggauguguuugucauaagggaaccauucauaucaugcucccccuuggaaugcagaaccuucuucuugacucaaggggcccugcuaaaugacaaacauuccaauggaaccauuaaagacaggagcccauaucgaaccuuaaugagcuguccuauuggugaaguucccucuccauacaacucaagauuugagucagucgcuuggucagcaagugccugucaugauggcaucaauuggcuaacaauuggaauuucuggcccagacaauggggcaguggcuguguuaaaguacaacggcauaauaacagacacuaucaagaguuggagaaacaauauauugagaacacaagagucugaaugugcauguguaaaugguucuugcuuuaccauaaugaccgauggaccaagugauggacaggccucauacaagaucuucagaauagaaaagggaaagauagucaaaucagucgaaaugaaugccccuaauuaucacuaugaggaaugcuccuguuauccugauucuagugaaaucacaugugugugcagggauaacuggcauggcucgaaucgaccgugggugucuuucaaccagaaucuggaauaucagauaggauacauaugcagugggauuuucggagacaauccacgcccuaaugauaagacaggcaguugugauccaguaucgucuaauggagcaaauggaguaaaaggauuuucauucaaauacggcaaugguguuuggauagggagaacuaaaagcauuaguucaagaaaagguuuugagaugauuugggauccaaacggauggacugggacagacaauaacuucucaauaaagcaagauaucguaggaauaaaugaguggucaggauauagcgggaguuuuguucagcauccagaacuaacagggcuggauuguauaagaccuugcuucuggguugaacuaaucagagggcgacccaaagagaacacaaucuggacuagcgggagcagcauauccuuuugugguguaaacagugacacuguggguuggucuuggccagacggugcugaguugccauuuaccauugacaaguaa

SEQ ID NO: 55115 - RNA, 1410 nt, Artificial Sequence
  derived and/or modified CDS sequence (wt) from neuraminidase__InfluenzaA__AFN20020
augaauccaaaccaaaagauaauaaccauugguucggucuguaugacaauuggaauggcuaacuuaauauuacaaauuggaaacauaaucucaauauggauuagccacucaauucaacuugggaaucaaagucagauugaaacaugcaaucaaagcgucauuacuuaugaaaacaacacuuggguaaaucagacauauguuaacaucagcaacaccaacuuugcugcuggacagucagugguuuccgugaaauuagcgggcaauuccucucucugcccuguuaguggaugggcuauauacaguaaagacaacaguauaagaaucgguuccaagggggauguguuugucauaagggaaccauucauaucaugcucccccuuggaaugcagaaccuucuucuugacucaaggggccuugcuaaaugacaaacauuccaauggaaccauuaaagacaggagcccauaucgaacccuaaugagcuguccuauuggugaaguucccucuccauacaacucaagauuugagucagucgcuuggucagcaagugcuugucaugauggcaucaauuggcuaacaauuggaauuucuggcccagacaauggggcaguggcuguguuaaaguacaacggcauaauaacagacacuaucaagaguuggagaaacaauauauugagaacacaagagucugaaugugcauguguaaaugguucuugcuuuaccauaaugaccgauggaccgagugauggacaggccucauacaagaucuucagaauagaaaagggaaagauagucaaaucagucgaaaugaaugccccuaauuaucacuaugaggaaugcuccuguuauccugauucuagugaaaucacaugugugugcagggauaacuggcauggcucgaaucgaccgugggugucuuucaaccagaaucuggaauaucagauaggauacauaugcagugggauuuucggagacaauccacgcccuaaugauaagacaggcaguugugguccaguaucgucuaauggagcaaauggaguaaaaggauuuucauucaaauacggcaaugguguuuggauagggagaacuaaaagcauuaguucaagaaaagguuuugagaugauuugggauccaaacggauggacugggacagacaauaacuucucaauaaagcaagauaucguaggacuaaaugaguggucaggauauagcgggaguuuuguucagcauccagaacuaacagggcuggauuguauaagaccuugcuucuggguugaacuaaucagagggcgacccaaagagaacacaaucuggacuagcgggagcagcauauccuuuugugguguaaacagugacacuguggguuggucuuggccagacggugcugaguugccauuuaccauugacaaguaa

SEQ ID NO: 55116 - RNA, 1410 nt, Artificial Sequence
  derived and/or modified CDS sequence (wt) from neuraminidase__InfluenzaA__AFN20022
augaauccaaaccaaaagauaauaaccauugguucggucuguaugacaauuggaauggcuaacuuaauauuacaaauuggaaacauaaucucaauauggauuagccacucaauucaacuugggaaucaaagucagauugaaacaugcaaucaaagcgucauuacuuaugaaaacaacacuuggguaaaucagacauauguuaacaucagcaacaccaacuuugcugcuggacagucagugguuuccgugaaauuagcgggcaauuccucucucugcccuguuaguggaugggcuauauacaguaaagacaacaguauaagaaucgguuccaagggggauguguuugucauaagggaaccauucauaucaugcucccccuuggaaugcagaaccuucuucuugacucaaggggccuugcuaaaugacaaacauuccaauggaaccauuaaagacaggagcccauaucgaaccuuaaugagcuguccuauuggugaaguucccucuccauacaacucaagauuugagucagucgcuuggucagcaagugcuugucaugauggcaucaauuggcuaacaauuggaauuucuggcccagacaauggggcaguggcuguguuaaaguacaacggcauaauaacagacacuaucaagaguuggagaaacaauauauugagaacacaagagucugaaugugcauguguaaaugguucuugcuuuaccauaaugaccgauggaccaagugauggacaggccucauacaagaucuucagaauagaaaagggaaagauagucaaaucagucgaaaugaaugccccuaauuaucacuaugaggaaugcuccuguuauccugauucuagugaaaucacaugugugugcagggauaacuggcauggcucgaaucgaccgugggugucuuucaaccagaaucuggaauaucagauaggauacauaugcagugggauuuucggagacaauccacgcccuaaugauaagacaggcaguugugguccaguaucgucuaauggagcaaauggaguaaaaggauuuucauucaaauacggcaaugguguuuggauagggagaacuaaaagcauuaguucaagaaaagguuuugagaugauuugggauccaaacggauggacugggacagacaauaacuucucaauaaagcaagauaucguaggaauaaaugaguggucaggauauagcgggaguuuuguucagcauccagaacuaacagggcuggauuguauaagaccuugcuucuggguugaacuaaucagagggcgacccaaagagaacacaaucuggacuagcgggagcagcauauccuuuugugguguaaacagugacacuguggguuggucuuggccagacggugcugaguugccauuuaccauugacaaguaa

SEQ ID NO: 55117 - RNA, 1410 nt, Artificial Sequence
  derived and/or modified CDS sequence (wt) from neuraminidase__InfluenzaA__AFN20035
augaauccaaaccaaaagauaauaaccauugguucggucuguaugacaauuggaaucgcuaacuuaauauuacaaauuggaaacauaaucucaauauggauuagccacucaauucaacuugggaaucaaagucagauugaaacaugcaaucaaagcgucauuacuuaugaaaacaacacuuggguaaaucagacauauguuaacaucagcaacaccaacuuugcugcuggacagucagugguuuccgugaaauuagcgggcaauuccucucucugcccuguuaguggaugggcuauauacaguaaagacaacaguauaagaaucgguuccaagggggauguguuugucauaagggaaccauucauaucaugcucccccuuggaaugcagaaccuucuucuugacucaaggggccuugcuaaaugacaaacauuccaauggaaccauuaaagacaggagcccauaucgaacccuaaugagcuguccuauuggugaaguucccucuccauacaacucaagauuugagucagucgcuuggucagcaagugcuugucaugauggcaucaauuggcuaacaauuggaauuucuggcccagacaauggggcaguggcuguguuaaaguacaacggcauaauaacagacacuaucaagaguuggagaaacaauauauugagaacacaagagucugaaugugcauguguaaaugguucuugcuuuaccauaaugaccgauggaccaagugauggacaggccucauacaagaucuucagaauagaaaagggaaagauagucaaaucagucgaaaugaaugccccuaauuaucacuaugaggaaugcuccuguuauccugauucuagugaaaucacaugugugugcagggauaacuggcauggcucgaaucgaccgugggugucuuucaaccagaaucuggaauaucagauaggauacauaugcagugggauuuucggagacaauccacgcccuaaugauaagacaggcaguugugguccaguaucgucuaauggagcaaauggaguaaaaggauuuucauucaaauacggcaaugguguuuggauagggagaacuaaaagcauuaguucaagaaaagguuuugagaugauuugggauccaaauggauggacugggacagacaauaacuucucaauaaagcaagauaucguaggaauaaaugaguggucaggauauagcgggaguuuuguucagcauccagaacuaacagggcuggauuguauaagaccuugcuucuggguugaacuaaucagagggcgacccaaagagaacacaaucuggacuagcgggagcagcauauccuuuugugguguaaacagugacacuguggguuggucuuggccagacggugcugaguugccauuuaccauugacaaguaa

SEQ ID NO: 55118 - RNA, 1410 nt, Artificial Sequence; identical to SEQ ID NO: 55082
  derived and/or modified CDS sequence (wt) from neuraminidase__InfluenzaA__AFN20041

SEQ ID NO: 55119 - RNA, 1410 nt, Artificial Sequence; identical to SEQ ID NO: 55097
  derived and/or modified CDS sequence (wt) from neuraminidase__InfluenzaA__AFN20047

SEQ ID NO: 55120 - RNA, 1410 nt, Artificial Sequence; identical to SEQ ID NO: 55094
  derived and/or modified CDS sequence (wt) from neuraminidase__InfluenzaA__AFN20063

SEQ ID NO: 55121 - RNA, 1410 nt, Artificial Sequence
  derived and/or modified CDS sequence (wt) from neuraminidase__InfluenzaA__AFN20077
augaauccaaaccaaaagauaauaaccauugguucggucuguaugacaauuggaauggcuaacuuaauauuacaaauuggaaacauaaucucaauauggauuagccacucaauucaacuugggaaucaaagucagauugaaacaugcaaucaaagcgucauuacuuaugaaaacaacacuuggguaaaucagacauauguuaacaucagcaacaccaacuuugcugcuggacagucagugguuuccgugaaauuagcgggcaauuccucucucugcccuguuaguggaugggcuauauacaguaaagacaacaguauaagaaucgguuccaagggggauguguuugucauaagggaaccauucauaucaugcucccccuuggaaugcagaaccuucuucuugacucaaggggccuugcuaaaugacaaacauuccaauggaaccauuaaagacaggagcccauaucgaacccuaaugagcuguccuauuggugaaguucccucuccauacaacucaagauuugagucagucgcuuggucagcaagugcuugucaugauggcaucaauuggcuaacaauuggaauuucuggcccagacaauggggcaguggcuguguuaaaguacaacggcauaauaacagacacuaucaagaguuggagaaacaauauauugagaacacaagagucugaaugugcauguguaaaugguucuugcuuuaccauaaugaccgauggaccaagugaugggcaggccucauacaagaucuucaaaauagaaaagggaaagauagucaaaucagucgaaaugaaugccccuaauuaucacuaugaggaaugcuccuguuauccugauucuagugaaaucacaugugugugcagggauaacuggcauggcucgaaucgaccgugggugucuuucaaccagaaucuggaauaucagauaggauacauaugcagugggauuuucggagacaauccacgcccuaaugauaagacaggcaguugugguccaguaucgucuaauggagcaaauggaguaaaaggauuuucauucaaauacggcaauggcguuuggauagggagaacuaaaagcauuaguucaagaaaagguuuugagaugauuugggauccaaacggauggacugggacagacaauaacuucucaauaaagcaagauaucguaggaauaaaugaguggucaggauauagcgggaguuuuguucagcauccagaacuaacagggcuggauuguauaagaccuugcuucuggguugaacuaaucagagggcgacccaaagagaacacaaucuggacuagcgggagcagcauauccuuuugugguguaaacagugacacuguggguuggucuuggccagacggugcugaguugccauuuaccauugacaaguaa

SEQ ID NO: 55122 - RNA, 1410 nt, Artificial Sequence
  derived and/or modified CDS sequence (wt) from neuraminidase__InfluenzaA__AFN20083
augaauccaaaccaaaagauaauaaccauugguucggucuguaugacaauuggaauggcuaacuuaauauuacaaauuggaaacauaaucucaauauggauuagccacucaauucaacuugggaaucaaagucagauugaaacaugcaaucaaagcgucauuacuuaugaaaacaauacuuggguaaaucagacauauguuaacaucagcaacaccaacuuugcugcuggacagucagugguuuccgugaaauuagcgggcaauuccucucucugcccuguuaguggaugggccauauacaguaaagacaacaguauaagaaucgguuccaagggggauguguuugucauaagggaaccauucauaucaugcucccccuuggaaugcagaaccuucuucuugacucaaggggccuugcuaaaugacaaacauuccaauggaaccauuaaagacaggagcccauaucgaacccuaaugagcuguccuauuggugaaguucccucuccauacaacucaagauuugagucagucgcuuggucagcaagugcuugucaugauggcaucaauuggcuaacaauuggaauuucuggcccagacaauggggcaguggcuguguuaaaguacaacggcauaauaacagacacuaucaagaguuggagaaacaauauauugagaacacaagagucugaaugugcauguguaaaugguucuugcuuuaccauaaugaccgauggaccaagugauggacaggccucauacaagaucuucagaauagaaaagggaaagauagucaaaucagucgaaaugaaugccccuaauuaucacuaugaggaaugcuccuguuauccugauucuagugaaaucacaugugugugcagggauaacuggcauggcucgaaucgaccgugggugucuuucaaccagaaucuggaauaucagauaggauacauaugcagugggauuuucggagacaauccacgcccuaaugauaagacaggcaguugugguccaguaucgucuaauggagcaaauggaguaaaaggauuuucauucaaauacggcaauggcguuuggauagggagaacuaaaagcauuaguucaagaaaagguuuugagaugauuugggauccaaacggauggacugggacagacaauaacuucucaauaaagcaagauaucguaggaauaaaugaguggucaggauauagcgggaguuuuguucagcauccagaacuaacagggcuggauuguauaagaccuugcuucuggguugaacuaaucagagggcgacccaaagagaacacaaucuggacuagcgggagcagcauauccuuuugugguguaaacagugacacuguggguuggucuuggccagacggugcugaguugccauuuaccauugacaaguaa

SEQ ID NO: 55123 - RNA, 1410 nt, Artificial Sequence
  derived and/or modified CDS sequence (wt) from neuraminidase__InfluenzaA__AFN20094
augaauccaaaccaaaagauaauaaccauugguucggucuguaugacaauuggaauggcuaacuuaauauuacaaauuggaaacauaaucucaauauggauuagccacucaauucaacuugggaaucaaagucagauugaaacaugcaaucaaagcgucauuauuuaugaaaacaacacuuggguaaaucagacauauguuaacaucagcaacaccaacuuugcugcuggacagucagugguuuccgugaaauuagcgggcaauuccucucucugcccuguuaguggaugggcuauauacaguaaagacaacaguauaagaaucgguuccaagggggauguguuugucauaagggaaccauucauaucaugcucccccuuggaaugcagaaccuucuucuugacucaaggggccuugcuaaaugacaaacauuccaauggaaccauuaaagacaggagcccauaucgaacccuaaugagcuguccuauuggugaaguucccucuccauacaacucaagauuugagucagucgcuuggucagcaagugcuugucaugauggcaucaauuggcuaacaauuggaauuucuggcccagacaauggggcaguggcuguguuaaaguacaacggcauaauaacagacacuaucaagaguuggagaaacaauauauugagaacacaagagucugaaugugcauguguaaaugguucuugcuuuaccauaaugaccgauggaccaagugauggacaggccucauacaagaucuucagaauagaaaagggaaagauagucaaaucagucgaaaugaaugccccuaauuaucacuaugaggaaugcuccuguuauccugauucuagugaaaucacaugugugugcagggauaacuggcauggcucgaaucgaccgugggugucuuucaaccagaaucuggaauaucagauaggauacauaugcagugggauuuuuggagacaauccacgcccuaaugauaaggcaggcaguugugguccaguaucgucuaauggagcaaauggaguaaaaggauuuucauucaaauacggcaaugguguuuggauagggagaacuaaaagcauuaguucaagaaaagguuuugagaugauuugggauccaaauggauggacugggacagacaauaacuucucaauaaagcaagauaucguaggaauaaaugaguggucaggauauagcgggaguuuuguucagcauccagaacuaacagggcuggauuguauaagaccuugcuucuggguugaacuaaucagagggcgacccaaagagaacacaaucuggacuagcgggagcagcauauccuuuugugguguaaacagugacacuauggguuggucuuggccagacggugcugaguugccauuuaccauugacaaguaa

SEQ ID NO: 55124 - RNA, 1410 nt, Artificial Sequence; identical to SEQ ID NO: 55106
  derived and/or modified CDS sequence (wt) from neuraminidase__InfluenzaA__AFN20100

SEQ ID NO: 55125 - RNA, 1410 nt, Artificial Sequence
  derived and/or modified CDS sequence (wt) from neuraminidase__InfluenzaA__AFN20114
augaauccaaaccaaaagauaauaaccauugguucggucuguaugacaauuggaauggcuaacuuaauauuacaaauuggaaacauaaucucaauauggauuagccacucaauucaacuugggaaucaaaaucagauugaaacaugcaaucaaagcgucauuacuuaugaaaacaacacuuggguaaaucagacauauguuaacaucagcaacaccaacuuugcugcuggacagucagugguuuccgugaaauuagcgggcaauuccucucucuguccuguuaguggaugggcuauauacaguaaagacaacaguauaagaaucgguuccaagggggauguguuugucauaagggaaccauucauaucaugcucccccuuggaaugcagaaccuucuucuugacucaaggggccuugcuaaaugacaaacauuccaauggaaccauuaaagacagaagcccauaucgaacccuaaugagcuguccuauuggugaaguuccuucuccauacaacucaagauuugagucagucgcuuggucagcaagugcuugucaugauggcaucaauuggcuaacaauuggaauuucuggcccagacaauggggcaguggcuguguuaaaguacaacggcauaauaacagacacuaucaagaguuggagaaacaauauauugagaacacaagagucugaaugugcauguguaaaugguucuugcuuuacuguaaugaccgauggaccaagugauggacaggccucauacaagaucuucaaaauagaaaagggaaagauagucaaaucagucgagaugaaugccccuaauuaucacuaugaggaaugcuccuguuauccugauucuagugaaaucacaugugugugcagggauaacuggcauggcucgaaucgaccgugggugucuuucaaccagaaucuggaauaucagauaggguacauaugcagugggauuuucggagacaauccacgcccuaaugauaagacaggcaguuguaguccaguaucgucuaauggagcaaauggaguaaaaggauuuucauucaaauacggcaaugguguuuggauagggagaacuaaaagcacuaguucaagaaacgguuuugagaugauuugggauccgaacggauggacugggacagacaauagcuucucaaugaagcaagauaucguaggaauaaaugaguggucaggauauagcgggaguuuuguucagcauccagaacuaacagggcuggauuguauaagaccuugcuucuggguugaacuaaucagagggcgaccuaaagagaacacagucuggacuagcgggagcagcauauccuuuugcgguguaaacagugacacuguggguuggucuuggccagacggugcugaguugccauuuaccauugacaaguaa

SEQ ID NO: 55126 - RNA, 1410 nt, Artificial Sequence
  derived and/or modified CDS sequence (wt) from neuraminidase__InfluenzaA__AFN20128
augaauccaaaccaaaagauaauaaccauugguucggucuguaugacaauuggaauggcuaacuuaauauuacaaauuggaaacauaaucucaauauggauuagccacucaauucaacuugggaaucaaagucagauugaaacaugcaaucaaagcgucauuacuuaugaaaacaacacuuggguaaaucagacauauguuaacaucagcaacaccaacuuugcugcuggacagucagugguuuccgugaaauuagcgggcaauuccucucucugcccuguuaguggaugggcuauauacaguaaagacaacaguauaagaaucgguuccaagggggauguguuugucauaagggaaccauucauaucaugcucccccuuggaaugcagaaccuucuucuugacucaaggggccuugcuaaaugacaaacauuccaauggaaccauuaaagacaggagcccauaucgaaccuuaaugagcuguccuauuggugaaguucccucuccauacaacucaagauuugagucagucgcuuggucagcaagugcuugucaugauggcaucaauuggcuaacaauuggaauuucuggcccagacaauggggcaguggcuguguuaaaguacaacggcauaauaacagacacuaucaggaguuggagaaacaauauauugagaacacaagagucugaaugugcauguguaaaugguucuugcuuuaccauaaugaccgauggaccaagugauggacaggccucauacaagaucuucagaauagaaaagggaaagauaaucaaaucagucgaaaugaaugccccuaauuaucacuaugaggaaugcuccuguuauccugauucuagugaaaucacaugugugugcagggauaacuggcauggcucgaaucgaccgugggugucuuucaaccagaaucuggaauaucagauaggauacauaugcagugggauuuucggagacaauccacgcucuaaugauaagacaggcaguugugguccaguaucgucuaauggagcaaauggaguaaaaggauuuucauucaaauacggcaaugguguuuggauagggagaacuaaaagcauuaguucaagaaaagguuuugagaugauuugggauccaaacggauggacugggacagacaauaacuucucaauaaagcaagauaucguaggaauaaaugaguggucaggauauagcgggaguuuuguucagcauccagaacuaacagggcuggauuguauaagaccuugcuucuggguugaacuaaucagagggcgacccaaagagaacacaaucuggacuagcgggagcagcauauccuuuugugguguaaauagugacacuguggguuggucuuggccagacggugcugaguugccauuuaccauugacaaguaa

SEQ ID NO: 55127 - RNA, 1410 nt, Artificial Sequence
  derived and/or modified CDS sequence (wt) from neuraminidase__InfluenzaA__AFN87935
augaauccaaaccaaaagauaauaaccauugguucggucuguaugacaauuggaauggcuaacuuaauauuacaaauuggaaacauaaucucaauauggauuagccacucaauucaacuugggaaucaaagucagauugaaacaugcaaucaaagcgucauuacuuaugaaaacaacacuuggguaaaucagacauauguuaacaucagcaacaccaacuuugcugcuggacagucagugguuuccgugaaauuagcgggcaauuccucucucugcccuguuaguggaugggcuauauacaguaaagacaacaguauaagaaucgguuccaagggggauguguuugucauaagggaaccauucauaucaugcucccccuuggaaugcagaaccuucuucuugacucaaggggccuugcuaaaugacaaacauuccaauggaaccauuaaagacaggagcccauaucgaacccuaaugagcuguccuauuggugaaguucccucuccauacaacucaagauuugagucagucgcuuggucagcaagugcuugucaugauggcaucaauuggcuaacaauuggaauuucuggcccagacaauggggcaguggcuguguuaaaguacaacggcauaauaacagacacuaucaagaguuggagaaacaauauauugaggacacaagagucugaaugugcauguguaaaugguucuugcuuuaccauaaugaccgauggaccaagugauggacaggccucauacaagaucuucagaauagaaaagggaaagauagucaaaucagucgaaaugaaugccccuaauuaucacuaugaggaaugcuccuguuauccugauucuagugaaaucacaugugugugcagggauaacuggcauggcucgaaucgaccgugggugucuuucaaccagaaucuggaauaucagauaggauacauaugcagugggauuuucggagacaauccacgcccuaaugauaagacaggcaguugugguccaguaucgucuaauggagcaaauggaguaaaaggauuuucauucaaauacggcaaugguguuuggauagggagaacuaaaagcauuaguucaagaaaagguuuugagaugauuugggauccaaacggauggacugggacagacaauaacuucucaauaaagcaagauaucguaggaauaaaugaguggucaggauauagcgggaguuuuguucagcauccagaacuaacagggcuggauuguauaagaccuugcuucuggguugaacuaaucagagggcgacccaaagagaacacaaucuggacuagcgggagcagcauauccuuuugugguguaaacagugacacuguggguuggucuuggccagacggugcugaguugccauuuaccauugacaaguaa

SEQ ID NO: 55128 - RNA, 1410 nt, Artificial Sequence
  derived and/or modified CDS sequence (wt) from neuraminidase__InfluenzaA__AFN87937
augaauccaaaccaaaagauaauaaccauugguucggucuguaugacaauuggaauggcuaacuuaauauuacaaauuggaaacauaaucucaauauggauuagccacucaauucaacuugggaaucaaaaucagauugaaacaugcaaucaaagcgucauuacuuaugaaaacaacacuuggguaaaucagacauauguuaauaucagcaacaccaacuuugcugcuggacagucagugguuuccgugaaauuagcgggcaauuccucucucuguccuguuaguggaugggcuauauacaguaaagacaacaguauaagaaucgguuccaagggggauguguuugucauaagggaaccauucauaucaugcucucccuuggaaugcagaaccuucuucuugacucaaggggccuugcuaaaugacaaacauuccaauggaaccauuaaagacagaagcccauaucgaacccuaaugagcuguccuauuggugaaguuccuucuccauacaacucaagauuugagucagucgcuuggucagcaagugcuugucaugauggcaucaauuggcuaacaauuggaauuucuggcccagacaauggggcaguggcuguguuaaaguacaacggcauaauaacagacacuaucaagaguuggagaaacaauauauugagaacacaagagucugaaugugcauguguaaaugguucuugcuuuacuguaaugaccgauggaccaagugauggacaggccucauacaagaucuucaaaauagaaaagggaaagauagucaaaucagucgagaugaaugccccuaauuaucacuaugaggaaugcuccuguuauccugauucuagugaaaucacaugugugugcagggauaacuggcauggcucgaaucgaccgugggugucuuucaaccagaaucuggaauaucagauaggguacauaugcagugggauuuucggagacaauccacgcccuaaugauaagacaggcaguugugguccaguaucgucuaauggagcaaauggaguaaaaggauuuucauucaaauacggcaaugguguuuggauagggagaacuaaaagcacuaguucaagaaaugguuuugagaugauuugggauccgaacggauggacugggacagacaauagcuucucaaugaagcaagauaucguaggaauaaaugaguggucaggauauagcgggaguuuuguucagcauccagaacuaacagggcuggauuguauaagaccuugcuucuggguugaacuaaucagagggcgaccuaaagagaacacagucuggacuagcgggagcagcauauccuuuugcgguguaaacagugacacuguggguuggucuuggccagacggugcugaguugccauuuaccauugacaaguaa

SEQ ID NO: 55129 - RNA, 1410 nt, Artificial Sequence
  derived and/or modified CDS sequence (wt) from neuraminidase__InfluenzaA__AFN87940
augaauccaaaccaaaagauaauaaccauugguucggucuguaugacaauuggaauggcuaacuuaauauuacaaauuggaaacauaaucucaauauggauuagccacucaauucaacuugggaaucaaaaucagauugaaacaugcaaucaaagcgucauuacuuaugaaaacaacacuuggguaaaucagacauauguuaacaucagcaacaccaacuuugcugcuggacagucagugguuuccgugaaauuagcgggcaauuccucucucugcccuguuaguggaugggcuauauacaguaaagacaacaguauaagaaucgguuccaagggggauguguuugucauaagggaaccauucauaucaugcucccccuuggaaugcagaaccuucuucuugacucaaggggccuugcuaaaugacaaacauuccaauggaaccauuaaagacagaagcccauaucgaacccuaaugagcuguccuauuggugaaguuccuucuccauacaacucgagauuugagucagucgcuuggucagcaagugcuugucaugauggcaucaauuggcuaacaauuggaauuucuggcccagacaauggggcaguggcuguguuaaaguacaacggcauaauaacagacacuaucaagaguuggagaaacaauauauugagaacacaagagucugaaugugcauguguaaaugguucuugcuuuacuguaaugaccgauggaccaagugauggacaggccucauacaagaucuucaaaauagaaaagggaaagauagucaaaucagucgagaugaaugccccuaauuaucacuaugaggaaugcuccuguuauccugauucuagugaaaucacaugugugugcagggauaacuggcauggcucgaaucgaccgugggugucuuucaaccagaaucuggaauaucagauaggguacauaugcagugggauuuucggagacaauccacgcccuaaugauaagacaggcaguugugguccaguaucgucuaauggagcaaauggaguaaaaggauuuucauucaaauacggcaaugguguuuggauagggagaacuaaaagcacuaguucaagaaacgguuuugagaugauuugggauccaaacggauggacugggacagacaauagcuucucaauaaagcaagauaucguaggaauaaaugaguggucaggauauagcgggaguuuuguucagcauccagaacuaacagggcuggauuguauaagaccuugcuucuggguugaacuaaucagagggcgaccuaaagagaacacaaucuggacuagcgggagcagcauauccuuuugcgguguaaacagugacacuguggguuggucuuggccagacggugcugaguugccauuuaccauugacaaguaa

SEQ ID NO: 55130 - RNA, 1410 nt, Artificial Sequence
  derived and/or modified CDS sequence (wt) from neuraminidase__InfluenzaA__AFN87942
augaauccaaaccaaaagauaauaaccauugguucggucuguaugacaauuggaauggcuaacuuaauauuacaaauuggaaacauaaucucaauauggauuagccacucaauucaacuugggaaucaaaaucagauugaaacaugcaaucaaagcgucauuacuuaugaaaacaacacuuggguaaaucagacauauguuaacaucagcaacaccaacuuugcugcuggacagucagugguuuccgugaaauuagcgggaaauuccucucucugcccuguuaguggaugggcuauauacaguaaagacaacaguauaagaaucgguuccaagggggauguguuugucauaagggaaccauucauaucaugcucccccuuggaaugcagaaccuucuucuugacucaaggggccuugcuaaaugacaaacauuccaauggaaccauuaaagacaggagcccauaucgaacccuaaugagcuguccuauuggugaaguucccucuccauacaacucaagauuugagucagucgcuuggucagcaagugcuugucaugauggcaucaauuggcuaacaauuggaauuucuggcccagacaauggggcaguggcuguguuaaaguacaacggcauaauaacagacacuaucaagaguuggagaaauaauauauugagaacacaagagucugaaugugcauguguaaaugguucuugcuuuacuguaaugaccgauggaccaagugauggacaggccucauacaagaucuucagaauagaaaagggaaagauagucaaaucagucgaaaugaaugccccuaauuaucacuaugaggaaugcuccuguuauccugauucuagugaaaucacaugugugugcagggauaacuggcauggcucgaaucgaccgugggugucuuucaaccagaaucuggaauaucagauaggguacauaugcagugggauuuucggagacaauccacgccccaaugauaagacaggaaguugugguccaguaucgucuaauggagcaaauggaguaaaaggauuuucauucaaauacggcaaugguguuuggauagggagaacuaaaagcauuaguucaagaaacgguuuugagaugauuugggauccgaacggauggacugggacagacaauaacuucucaauaaagcaagauaucguaggaauaaaugaguggucaggauauagugggaguuuuguacagcauccagaacuaacagggcuggauuguauaagaccuugcuucuggguugaacuaaucagagggcgacccaaagagaacacaaucuggacuagcgggagcagcauauccuuuugugguguaaacagugacacuguggguuggucuuggccagacggugcugaguugccauuuaccauugacaaguaa

SEQ ID NO: 55131 - RNA, 1410 nt, Artificial Sequence
  derived and/or modified CDS sequence (wt) from neuraminidase__InfluenzaA__AFN87944
augaauccaaaccaaaagauaauaaccauugguucggucuguaugacaauuggaauggcuaacuuaauauuacaaauuggaaacauaaucucaauauggauuagccacucaauucaacuugggaaucaaaaucagauugaaacaugcaaucaaagcgucauuacuuaugaaaacaacacuuggguaaaucagacauauguuaauaucagcaacaccaacuuugcugcuggacagucagugguuuccgugaaauuagcgggcaauuccucucucuguccuguuaguggaugggcuauauacaguaaagacaacaguauaagaaucgguuccaagggggauguguuugucauaagggaaccauucauaucaugcucucccuuggaaugcagaaccuucuucuugacucaaggggccuugcuaaaugacaaacauuccaauggaaccauuaaagacagaagcccauaucgaacccuaaugagcuguccuauuggugaaguuccuucuccauacaacucaagauuugagucagucgcuuggucagcaagugcuugucaugauggcaucaauuggcuaacaauuggaauuucuggcccagacaauggggcaguggcuguguuaaaguacaacggcauaauaacagacacuaucaagaguuggagaaacaauauauugagaacacaagagucugaaugugcauguguaaaugguucuugcuuuacuguaaugaccgauggaccaagugauggacaggccucauacaagaucuucaaaauagaaaagggaaagauagucaaaucagucgagaugaaugccccuaauuaucacuaugaggaaugcuccuguuauccugauucuagugaaaucacaugugugugcagggauaacuggcauggcucgaaucgaccgugggugucuuucaaccagaaucuggaauaucagauaggguacauaugcagugggauuuucggagacaauccacgcccuaaugauaagacaggcaguugugguccaguaucgucuaauggagcaaauggaguaaaaggauuuucauucaaauacggcaauggugucuggauagggagaacuaaaagcacuaguucaagaaaugguuuugagaugauuugggauccgaacggauggacugggacagacaauagcuucucaaugaagcaagauaucguaggaauaaaugaguggucaggauauagcgggaguuuuguucagcauccagaacuaacagggcuggauuguauaagaccuugcuucuggguugaacuaaucagagggcgaccuaaagagaacacagucuggacuagcgggagcagcauauccuuuugcgguguaaacagugacacuguggguuggucuuggccagacggugcugaguugccauuuaccauugacaaguaa

SEQ ID NO: 55132 - RNA, 1410 nt, Artificial Sequence
  derived and/or modified CDS sequence (wt) from neuraminidase__InfluenzaA__AFN87946
augaauccaaaccaaaagauaauaaccauugguucggucuguaugacaauuggaauggcuaacuuaacauuacaaauuggaaacauaaucucaauauggauuagccacucaauucaacuugggaaucaaaaucagauugaaaccugcaaucaaagcgucauuaauuaugaaaacaacacuuggguaaaucagacauauguuaacaucagcaacaccaacuuugcugcuggacagucagugguuuccgugaaauuagcgggcaauuccucucucugcccuguuaguggaugggcuauauacaguaaagacaacaguauaagaaucgguuccaagggggauguguuugucauaagggaaccauucguaucaugcucccccuuggaaugcagaaccuucuucuugacucaaggggccuugcuaaaugacaaacauuccaauggaaccauuaaagacaggagcccauaucgaacccuaaugagcuguccuauuggugaaguucccucuccauauaacucaagauuugagucagucgcuuggucagcaagugcuugucaugauggcaucaauuggcuaacaauuggaauuucuggcccagacaauggggcaguggcuguguuaaaguacaacggcauaauaacagacacuaucaagaguuggagaaacaauauauugaggacacaagagucugaaugugcauguguaaaugguucuugcuuuacuguaaugaccgauggaccaagugauggacaggccucauacaagaucuucagaauagaaaagggaaagauagucaaaucagucgaaaugaaugccccuaauuaucacuaugaggaaugcuccuguuauccugauucuagugaagucacaugugugugcagggauaacuggcauggcucaaaucgaccgugggugucuuucaaccagaaucuggaauaucagauaggauacauaugcagugggauuuucggagacaauccacgcccuaaugauaagacaggcaguugugguccaguaucgucuaauggagcaaauggaguaaaaggauuuucauucaaauacggcaauggugucuggauagggagaacuaaaagcauuaguucaagaaacgguuuugagaugauuugggauccgaacggauggacugggacagacaauaacuucucaauaaagcaagauaucguaggaauaaaugaguggucaggauauagcgggaguuuuguucagcauccagaacuaacaggacuggauuguauaagaccuugcuucuggguugaacuaaucagagggcgacccaaagagaacacaaucuggacuagcgggagcagcauauccuuuugugguguaaacagugacacuguggguuggucuuggccagacggugcugaguugccauuuaccauugacaaguaa

SEQ ID NO: 55133 - RNA, 1410 nt, Artificial Sequence
  derived and/or modified CDS sequence (wt) from neuraminidase__InfluenzaA__AFN87948
augaauccaaaccaaaagauaauaaccauugguucggucuguaugacaauuggaauggcuaacuuaauauuacaaauuggaaacauaaucucaauauggauuagccacucaauucaacuugggaaucaaaaucagauugaaacaugcaaucaaagcgucauuacuuaugaaaacaacacuuggguaaaucagacauauguuaacaucagcaacaccaacuuugcugcuggacagucagugguuuccgugaaauuagcgggcaauuccucucucugcccuguuaguggaugggcuauauacaguaaagacaacaguauaagaaucgguuccaagggggauguguuugucauaagggaaccauucauaucaugcucccccuuggagugcagaaccuucuucuugacucaaggggccuugcuaaaugacaaacauuccaauggaaccauuaaagacagaagcccauaucgaacccuaaugagcuguccuauuggugaaguuccuucuccauacaacucaagauuugagucagucgcuuggucagcaagugcuugucaugauggcaucaauuggcuaacaauuggaauuucuggcccagacaauggggcaguggcuguguuaaaguacaacggcauaauaacagacacuaucaagaguuggagaaacaauauauugagaacacaagagucugaaugugcauguguaaaugguucuugcuuuacuguaaugaccgauggaccaagugauggacaggccucauacaagaucuucaaaauagaaaagggaaagauagucaaaucagucgagaugaaugccccuaauuaucacuaugaggaaugcuccuguuauccugauucuagugaaaucacaugugugugcagggauaacuggcauggcucgaaucgaccgugggugucuuucaaccagaaucuggaauaucagauaggguacauaugcagugggauuuucggagacaauccacgcccuaaugauaagacaggcaguugugguccaguaucgucuaauggagcaaauggaguaaaaggauuuucauucaaauacggcaauggugucuggauagggagaacuaaaagcacuaguucaagaaacgguuuugagaugauuugggauccgaacggauggacugggacagacaauagcuucucaauaaagcaagauaucguaggaauaaaugaguggucaggauauagcgggaguuuuguucagcauccagaacuaacagggcuggauuguauaagaccuugcuucuggguugaacuaaucagagggcgaccuaaagagaacacaaucuggacuagcgggagcagcauauccuuuugcgguguaaacagugacauuguggguuggucuuggccagacggugcugaguugccauuuaccauugacaaguaa

SEQ ID NO: 55134 - RNA, 1410 nt, Artificial Sequence
  derived and/or modified CDS sequence (wt) from neuraminidase__InfluenzaA__AFN87950
augaauccaaaccaaaagauaauaaccauugguucggucuguaugacaauuggaauggcuaacuuaauauuacaaauuggaaacauaaucucaauauggauuagccacucaauucaacuugggaaucaaagucagauugaaacaugcaaucaaagcgucauuacuuaugaaaacaacacuuggguaaaucagacauauguuaacaucagcaacaccaacuuugcugcuggacagucagugguuuccgugaaauuagcgggcaauuccucucucugcccuguuaguggaugggcuauauacaguaaagacaacaguauaagaaucgguuccaagggggauguguuugucauaagggaaccauucauaucaugcucccccuuggaaugcagaaccuucuucuugacucaaggggccuugcuaaaugacaaacauuccaauggaaccauuaaagacaggagcccauaucguacccuaaugagcuguccuauuggugaaguucccucuccauacaacucaagauuugagucagucgcuuggucagcaagugcuugucaugauggcaucaauuggcuaacaauuggaauuucuggcccagacaauggggcaguggcuguguuaaaguacaacggcauaauaacagacacuaucaagaguuggagaaacaauauauugagaacacaagagucugaaugugcauguguaaaugguucuuguuuuacuguaaugaccgacggaccaagugauggacaggccucauacaagaucuucagaauagaaaagggaaagauagucaaaucagucgaaaugaaugccccuaauuaucacuaugaggaaugcuccuguuauccugauucuagugaaaucacaugugugugcagggauaacuggcauggcucgaaucgaccgugggugucuuucaaccagaaucugaaauaucagauaggauacauaugcagugggauuuucggggacaauccacgcccuaaugauaagacaggcaguugugguccaguaucgucuaauggagcaaauggaguaaaaggauuuucauucaaauacggcaaugguguuuggauagggagaacuaaaagcauuaguucaagaaaagguuuugagaugauuugggauccaaauggauggacugggacagacaauaacuucucaauaaagcaagauaucauaggaauaaaugaguggucaggauauagcgggaguuuuguucagcauccagaacuaacagggcuggauuguauaagaccuugcuucuggguugaacuaaucagagggcgacccaaagagaacacaaucuggacuagcgggagcagcauauccuuuugugguguaaacagugacacuguggguuggucuuggccagacggugcugaguugccauuuaccauugacaaguaa

SEQ ID NO: 55135 - RNA, 1410 nt, Artificial Sequence; identical to SEQ ID NO: 52817
  derived and/or modified CDS sequence (wt) from neuraminidase__InfluenzaA__AFN87952

SEQ ID NO: 55136 - RNA, 1410 nt, Artificial Sequence
  derived and/or modified CDS sequence (wt) from neuraminidase__InfluenzaA__AFN87954
augaauccaaaccaaaagauaauaaccauugguucggucuguaugacaauuggaauggcuaacuuaauauuacaaauuggaaacauaaucucaauauggauuagccacucaauucaacuugggaaucaaaaucagauugaaacaugcaaucaaagcgucauuacuuaugaaaacaacacuuggguaaaucagacauauguuaacaucagcaacaccaacuuugcugcuggacagucagugguuuccgugaaauuagcgggcaauuccucucucugcccuguuaguggaugggcuauauacaguaaagacaacaguauaagaaucgguuccaagggggauguguuugucauaagggaaccauucauaucaugcucccccuuggaaugcagaaccuucuucuugacucaaggggccuugcuaaaugacaaacauuccaauggaaccauuaaagacaggaguccauaucgaacccuaaugagcuguccuauuggugaaguucccucuccauacaacucaagauuugagucagucgcuuggucagcaagugcuugucaugauggcaucaauuggcuaacaauuggaauuucuggcccagacaauggggcaguggcuguguuaaaguacaacggcauaauaacagauacuaucaagaguuggagaaacaauauauugagaacacaagagucugaaugugcauguguaaaugguucuugcuuuacuguaaugaccgauggaccaagugauggacaggccucauacaagaucuucagaauagaaaagggaaagauagucaaaucagucgaaaugaaugccccuaauuaucacuaugaggaaugcuccuguuauccugauucuagugaaaucacauguguuugcagggauaacuggcauggcucgaaucgaccgugggugucuuucaaccagaaucuggaauaucagauaggguacauaugcagugggauuuucggagacaauccacgcccuaaugauaagacaggcaguugugguccaguaucgucuaauggagcaaauggaguaaaaggauuuucauucaaauacggcaaugguguuuggauagggagaacuaaaagcauuaguucaagaaaagguuuugagaugauuugggauccgaacggauggacugggacagacaauaauuucucaauaaagcaagauaucguaggaauaaaugaguggucaggauauagcgggaguuuuguucagcauccagaacuaacagggcuggauuguauaagaccuugcuucuggguugaacuaaucagagggcgacccaaagagaacacaaucuggacuagcgggagcagcauauccuuuugcgguguaaacagugacacuauggguuggucuuggccagacggugcugaguugccauuuaccauugacaaguaa

SEQ ID NO: 55137 - RNA, 1410 nt, Artificial Sequence
  derived and/or modified CDS sequence (wt) from neuraminidase__InfluenzaA__AFN87956
augaauccaaaccaaaagauaauaaccauugguucggucuguaugacaauuggaauggcuaacuuaauauuacaaauuggaaacauaaucucaauauggauuagccacucaauucaacuugggaaucaaagucagauugaaacaugcaaucaaagcgucauuacuuaugaaaacaacacuuggguaaaucagacauauguuaacaucagcaacaccaacuuugcugcuggacagucagugguuuccgugaaauuagugggcaauuccucucucugcccuguuaguggaugggcuauauacaguaaagacaacaguauaagaaucgguuccaagggggauguguuugucauaagggaaccauucauaucaugcucccccuuggaaugcagaaccuucuucuugacucaaggggccuugcuaaaugacaaacauuccaauggaacuauuaaagacagaagcccauaucgaacccuaaugagcuguccuauuggugaaguucccucuccauacaacucaagauuugagucagucgcuuggucagcaagugcuugucaugauggcaucaauuggcuaacaauuggaauuucuggcccagacaauggggcaguggcuguguuaaaguacaacggcauaauaacagacacuaucaagaguuggagaaacaauauauugagaacacaagagucugaaugugcauguguaaaugguucuugcuuuaccauaaugaccgauggaccaagugauggacaggccucauacaagaucuucagaauagaaaagggaaagauagucaaaucagucgaaaugaaugccccuaauuaucacuaugaggaaugcuccuguuauccugauucuagugaaaucacaugugugugcagggauaacuggcauggcucgaaucgaccgugggugucuuucaaccagaaucuggaauaucagauaggauacauaugcagugggauuuucggagacaauccacgcccuaaugauaagacaggcaguugugguccaguaucgucuaauggagcaaauggaguaaaaggauuuucauucaaauacggcaaugguguuuggauagggagaacuaaaagcauuaguucaagaaaagguuuugagaugauuugggauccaaacggauggacugggacagacaauaacuucucaauaaagcaagacaucguaggaacaaaugaguggucaggauauagcgggaguuuuguucagcauccagaacuaacagggcuggauuguauaagaccuugcuucuggguugaacuaaucagagggcgacccaaagagaacacaaucuggacuagcgggagcagcauauccuuuugugguguaaacagugacacuguggguuggucuuggccagacggugcugaguugccauuuaccauugacaauuaa

SEQ ID NO: 55138 - RNA, 1410 nt, Artificial Sequence
  derived and/or modified CDS sequence (wt) from neuraminidase__InfluenzaA__AFN87958
augaauccaaaccaaaagauaauaaccauugguucggucuguaugacaauuggaauggcuaacuuaauauuacaaauuggaaacauaaucucaauauggauuagccacucaauucaacuugggaaucaaaaucagauugaaacaugcaaucaaagcgucauuacuuaugaaaacaacacuuggguaaaucagacauauguuaauaucagcaacaccaacuuugcugcuggacagucagugguuuccgugaaauuagcgggcaauuccucucucuguccuguuaguggaugggcuauauacaguaaagacaacaguauaagaaucgguuccaagggggauguguuugucauaagggaaccauucauaucaugcucucccuuggaaugcagaaccuucuucuugacucaaggggccuugcuaaaugacaaacauuccaauggaaccauuaaagacagaagcccauaucgaacccuaaugagcuguccuauuggugaaguuccuucuccauacaacucaagauuugagucagucgcuuggucagcaagugcuugucaugauggcaucaauuggcuaacaauuggaauuucuggcccagacaauggggcaguggcuguguuaaaguacaacggcauaauaacagacacuaucaagaguuggagaaacaauauauugagaacacaagagucugaaugugcauguguaaaugguucuugcuuuacuguaaugaccgacggaccaagugauggacaggccucauacaagaucuucaaaauagaaaagggaaagauagucaaaucagucgagaugaaugccccuaauuaucacuaugaggaaugcuccuguuauccugauucuagugaaaucacaugugugugcagggauaacuggcauggcucgaaucgaccgugggugucuuucaaccagaaucuggaauaucagauaggguacauaugcagugggauuuucggagacaauccacgcccuaaugauaagacaggcaguugugguccagcaucgucuaauggagcaaauggaguaaaaggauuuucauucaaauacggcaaugguguuuggauagggagaacuaaaagcacuaguucaagaaaugguuuugagaugauuugggauccgaacggauggacugggacagacaauagcuucucaaugaagcaagauaucguaggaauaaaugaguggucaggauauagcgggaguuuuguucagcauccagaacuaacagggcuggauuguauaaggccuugcuucuggguugaacuaaucagagggcgaccuaaagagaacacagucuggacuagcgggagcagcauauccuuuugcgguguaaacagugacacuguggguuggucuuggccagacggugcugaguugccauuuaccauugacaaguaa

SEQ ID NO: 55139 - RNA, 1410 nt, Artificial Sequence
  derived and/or modified CDS sequence (wt) from neuraminidase__InfluenzaA__AFN87960
augaauccaaaccaaaagauaauaaccauugguucggucuguaugacaauuggaauggcuaacuuaauauuacaaauuggaaacauaaucucaauauggauuagccacucaauucaacuugggaaucaaagucagauugaaacaugcaaucaaagcgucauuacuuaugaaaacaacacuuggguaaaucagacauauguuaacaucagcaacaccaacuuugcugcuggacagucagugguuuccgugaaauuagcgggcaauuccucucucugcccuguuaguggaugggcuauauacaguaaagacaacaguauaagaaucgguuccaagggggauguguuugucauaagggaaccauucauaucaugcucccccuuggaaugcagaaccuucuucuugacucaaggggccuugcuaaaugacaaacauuccaauggaaccauuaaagacaggagcccauaucgaacccuaaugagcuguccuauuggugaaguucccucuccauacaacucaagauuugagucagucgcuuggucagcaagugcuugucaugauggcaucaauuggcuaacaauuggaauuucuggcccagacaauggggcaguggcuguguuaaaguacaacggcauaauaacagacacuaucaagaguuggagaaacaauauauugagaacacaagagucugaaugugcauguguaaaugguucuugcuuuaccauaaugaccgauggaccaagugauggacaggccucauacaagaucuucagaauagaaaagggaaagauagucaaaucagucgaaaugaaugccccuaauuaucacuaugaggaaugcuccuguuauccugauucuagugaaaucacaugugugugcagggauaacuggcauggcucgaaucgaccgugggugucuuucaaccaaaaucuggaauaucagauaggauacauaugcagugggauuuucggagacaauccacgcccuaaugauaagacaggcaguugugguccaguaucgucuaauggagcaaauggaguaaaaggauuuucauucaaauacggcaaugguguuuggauagggagaacuaaaagcauuaguucaagaaaagguuuugagaugauuugggauccaaauggauggacugggacagacaauaacuucucaauaaagcaagauaucguaggaauaaaugaguggucaggauauagcgggaguuuuguucagcauccagaacuaacagggcuggauuguauaagaccuugcuucuggauugaacuaaucagagggcgacccaaagagaacacaaucuggacuagcgggagcagcauauccuuuugugguguaaacagugacacuguggguuggucuuggccagacggugcugaguugccauuuaccauugacaaguaa

SEQ ID NO: 55140 - RNA, 1413 nt, Artificial Sequence
  derived and/or modified CDS sequence (wt) from neuraminidase__InfluenzaA__AFO64805
augaauccaaaucaaaaaauaauaaccauuggaucaaucaguauagcaaucggaauaauuagucuaauguugcaaauaggaaauauuauuucaauaugggcuagucacucaauccaaacuggaagucaaaaccacacuggaauaugcaaccaaagaaucaucacauaugaaaacagcaccugggugaaucacacauauguuaauauuaacaacacuaauguuguugcuggaaaggacaaaacuucagugacauuggccggcaauucaucucuuuguucuaucaguggaugggcuauauacacaaaagacaacagcauaagaauugguuccaaaggagauguuuuugucauaagagagccuuucauaucauguucucacuuggaaugcagaaccuuuuuucugacccaaggugcucuauuaaaugacaaacauucaaaugggaccguuaaggacagaaguccuuauagggccuuaaugagcuguccucuaggugaagcuccguccccauauaauucaaaguuugaaucaguugcuuggucagcaagcgcaugccaugauggcaugggcugguuaacaaucggaauuucugguccagacaauggagcaguggcuguacuaaaauacaacggcauaauaacugaaaccauaaaaaguuggaaaaagcgaauauuaagaacacaagagucugaaugugucugugugaacgggucauguuuuaccauaaugaccgauggcccgaauaauggggccgccucguacaaaaucuucaagaucgaaaaggggaagguuacuaaaucaauagaguugaaugcacccaauucucauuaugaggaauguuccuguuacccagacacuggcacagugauguguguaugcagagacaacuggcacgguucaaaucgaccuugggugucuuuuaaucaaaaccuggauuaucaaauaggauacaucugcagugggguguucggugacaauccgcgucccaaagauggagagggcagcuguaauccagugacuguugauggagcagacggaguaaagggauuuucauacaaauaugguaaugguguuuggauaggaaggacuaaaaguaacagacuuagaaagggguuugagaugauuugggauccuaauggauggacagauaccgacagugauuucucagugaaacaggauguuguggcaauaacugauuggucuggguacagcggaaguuucguucaacauccugaguuaacaggauuggacuguauaagaccuugcuucuggguugaguuagucagaggacugccuagagaaaauacaacaaucuggacuagugggagcagcauuucuuuuuguggcguaaauagugauacugcaaacuggucuuggccagacggugcugaguugccauucaccauugacaaguag

SEQ ID NO: 55141 - RNA, 1413 nt, Artificial Sequence
  derived and/or modified CDS sequence (wt) from neuraminidase__InfluenzaA__AFO64816
augaauccaaaucagaaaauaauaaccauaggaucaaucuguauggcaauaggaauaauuagucuaauauugcaaauaggaaauauuguuucaauauggaucagccacucaauccaaacuggaagucaaaacuacacuggaauaugcaaccaaagaaucauuaccuaugaaaauagcaccuggguaaaucaaacauauguuaauaucaacaacacuaauguuguugcuggacaggacacaacuucaguggcauuagccggcaauucaucucuuuguccuaucagugggugggcuauauacagcaaagacaacagcauaagaauugguuccaaaggagauguuuuugucauaagagaaccuuuuauaucauguucucacuuggaaugcagaaccuuuuuucugacccaaggugcucuauuaaaugacaagcauucaaauggaaccguuaaggacagaagcccuuauagggccuuaaugagcuguccuauaggugaagcuccgucucccuacaauucaagguuugaaucaguugcuuggucagcaagcgcaugucaugauggcaugggcuggcuaacaaucggaauuucugguccagaugauggagcaguggcuguacuaaaauacaacgguauaauaacugaaaccauaaaaaguuggaggaggcgaauauuaagaacacaagagucugaaugugucuguguaaacgguucauguuuuaccauaaugaccgauggcccgaauaaugggccugccucguacaaaaucuucaaaaucgagaaggggaagguuacuaaaucaauagaguuggaugcacccaauucucauuacgaggaauguuccuguuacccagacgccggcacagugaugugugugugcagagacaauuggcaugguucgaaucgaccuugggugucuuuuaaucaaaaccuggauuaucaaauaggauacaucugcagugguguuuuuggugacaauccgcgucccaaagauggaaaaggcagcugugauccaguaacuguugauggagcagacggaguaaagggguuuucauacagguaugguaaugguguuuggauaggaaggacuaaaaguaacagcuccagaagaggauuugagaugauuugggauccuaauggauggacagauaccgauaguaaauucuuagugaaacaggauguaguggcaaugacugauuggucaggguacagcggaagcuucguucaacauccugaacuaacaggauuggauuguaugaggccuugcuucuggguugaauugaucagaggacgaccuagagaaaauacaacaaucuggacuagugggagcagcauuucuuuuuguggcgugaauggugauacugcaaauuggucuuggccagacggugccgaguugccauucaccauugacaaguag

SEQ ID NO: 55142 - RNA, 1413 nt, Artificial Sequence
  derived and/or modified CDS sequence (wt) from neuraminidase__InfluenzaA__AFO64827
augaauccaaaucagaaaauaauaaccauuggaucaaucaguauggcaaucggaauaauuagucuaauauugcaaauaggaaauauuauuucaauauggguuagccacucaauccaaacuggaagucaaaaccauacuggaauaugcaaccaaagaaucauuacauaugaaaauagcaccuggguaaaucaaacauauguuaauauuaacaacacuaauguuauugcuggaaaggacaaaacuucagugacauuggccggcaauucaucucuuuguccuauccguggaugggcuauauacacaaaagacaacagcauaagaauugguuccaaaggagauguuuuugucauaagagaaccuuuuauaucauguucucacuuggaaugcagaaccuuuuuucugacccaaggugcucuauuaaaugacaagcauucaaaugggaccguuaaggacagaagcccuuauagggccuuaaugagcuguccucuaggugaagcuccgucuccauacaauucaagguuugaaucaguugcuuggucagcaagcgcaugccaugauggcaugggcuggcuaacaaucggaauuucugguccagaugauggagcaguggcuguacuaaaauacaacggcauaauaacugaaaccauaaaaaguuggaagaagcgaauauuaagaacacaagagucugaaugugucugugugaacgguucauguuuuaccauaaugaccgauggcccgaguaauggggccgccucguacagaaucuucaaaaucgaaaaggggaaaguuacuaaaucaauagaguuggaugcacccaauucucauuacgaggaauguuccuguuacccagacaccggcacagugaugugugugugcagagauaauuggcacgguucaaaucgaccuugggugucuuuuaaucaaaaccuggauuaucaaauaggauacaucugcagugggguguucggugacaauccgcgucccaaagauggaaaaggcagcugugauccagugacuguugauggagcagacggaguaaagggguuuucauacagguaugguaaugguguuuggauaggaaggacuaaaaguaacagauucagaaagggauuugagaugauuugggauccuaauggauggacagauaccgacagugauuucuuagugaaacaggauguaguggcaaugacugauuggucaggguacagcggaaguuucguucaacauccugagcuaacaggauuggacuguaugagaccuugcuucuggguugaauuagucagagggcggccuagagaaaauacaacaaucuggacuagugggagcagcauuucuuuuuguggcgugaauagugauacugcaaacuggucuuggccagacggugccgaguugccauucaccaucgacaaguag

SEQ ID NO: 55143 - RNA, 1413 nt, Artificial Sequence
  derived and/or modified CDS sequence (wt) from neuraminidase__InfluenzaA__AFO64838
augaauccaaaucaaaaaauaauaaccauuggaucaaucaguauggcaaucggaauaauuagucuaauauugcaaauaggaaauauuauuucaauaugggcuagccacucaauccaaacuggaagucaaaaccacacuggaauaugcaaccaaagaaucauuacauaugaaaauagcaccugggugaaucaaacauauguuaauauuaacaacacuaauguuguugcuggaaaggacaaaaccucagugacauuggccggcaauucaucucuuugcccuauccguggaugggcuauauacacaaaagacaacagcauaagaauugguuccaaaggagauguuuuugucauaagagagccuuuuauaucauguucucacuuggaaugcagaaccuuuuuucugacccaaggugcucuauuaaaugacaagcauucaaaugggaccguuaaggacagaagcccuuauagggccuuaaugagcuguccucuaggugaagcuccgucuccauacaauucaagauuugaaucaguugcuuggucagcaagcgcaugccaugauggcaugggcuggcuaacaaucggaauuucugguccagauaauggagcaguggcuguacuaaaauacaacggcauaauaacugaaaccauaaaaaguuggaagaagcgaauauuaagaacacaagagucugaaugugucugugugaacgguucauguuuuaccauaaugaccgauggcccgaguaauggggccgcaucguacagaaucuucaaaaucgagaaggggaggguuacuaaaucaauagaguuggaugcacccaauuaucauuacgaggaauguuccuguuacccagacaccggcacagugaugugugugugcagggacaauuggcacgguucaaaucgaccuugggugucuuuuaaucaaaaccuggauuaucaaauaggauacaucugcagugggguguucggugacaauccgcgucccaaagauggagaaggcagcuguaauccagugacuguugauggagcagacggaguaaagggguuuucauacagauaugguaaugguguuuggauaggaaggacuaaaaguaacagacucagaaagggauuugagaugauuugggauccuaauggauggacagauaccgacagugauuucucaaugaaacaggaugucguggcaaugacugauuggucaggguacagcggaaguuucguucaacauccugagcuaacaggauuggacuguaugagaccuugcuucuggguugaauuaguaagagggcuaccuagagaaaauacaacaaucuggacuagugggagcagcauuucuuuuuguggcguaaauagcgauacugcaaacuggucuuggccagacggugccgaguugccauucaccauugacaaguag

SEQ ID NO: 55144 - RNA, 1413 nt, Artificial Sequence
  derived and/or modified CDS sequence (wt) from neuraminidase__InfluenzaA__AFO64849
augaauccaaaucaaaaaauaauaaccauugggucaaucaguauggcaaucggaauaauuagucuaauauugcaaauaggaaauauuauuucaauaugggcuagccacucaauccaaaccggaagucaaaaccacacuggaauaugcaaccaaagaaucauuacauaugaaaauagcaccugggugaaucaaacauauguuaauauuaacaacacuaauguuguugcuggaaaggacaaaacuucagugacauuggccggcaauucaucucuuuguccuauccgugggugggcuauauacacaaaagacaacagcauaagaauugguuccaaaggagauguuuuugucauaagagagccuuuuauaucauguucucacuuggaaugcagaaccuuuuuucugacccaaggugcucuauuaaaugacaagcauucaaaugggaccguuaaggacagaagcccuuauagggccuuaaugagcuguccucuaggugaagcuccgucuccauacaauucaagguuugaaucaguugcuuggucagcaagcgcaugccaugauggcaugggcuggcuaacaaucggaauuucugguccagauaauggagcaguggcuguacuaaaauacaacggcauaauaacugaaaccauaaaaaguuggaagaagcaaauauuaagaacacaagagucugaaugugucugugugaacgguucauguuuuaccauaaugacugauggcccgaguaauggggccgccucguacagaaucuucaaaauugagaaggggaagauuacuaaaucaauagaguuggaugcacccaauucucauuacgaggaauguuccuguuacccagacaccggcacagugaugugugugugcagggacaauuggcacgguucaaaucgaccuugggugucuuucaaucaaaaccuggauuaucaaauaggauacaucugcagugggguguucggugacaauccgcgucccaaagauggagaaggcagcuguaauccagugacuguugauggagcagacggaguaaagggguuuucauacagauaugguaaugguguuuggauaggaaggacuaaaaguaacagacucagaaagggauuugagaugauuugggauccuaauggauggacagauaccgacagugauuucucagugaaacaggaugucguggcaaugacugauuggucaggguacagcggaaguuucguucaacauccugagcuaacaggauuggacuguaugagaccuugcuucuggguugaauuagucagggggcgaccuagagaaaaugcaacaaucuggacuagugggagcagcauuucuuuuuguggcguaaauagugauacugcaaacuggucuuggccagacggugccgaguugccauucaccauugacaaguag

SEQ ID NO: 55145 - RNA, 1413 nt, Artificial Sequence
  derived and/or modified CDS sequence (wt) from neuraminidase__InfluenzaA__AFO64860
augaauccaaaucaaaaaauaauaaccauuggaucaaucaguauugcaauuggaauaauuagucugauauugcaaauaggaaauauuauuucaauaugggcuagccacucaauccaaacuggaagucaaaaccacacuggaauaugcaaccaaagaaucauuacauaugaaaauagcaccuggguaaaucaaacauauguuaauauuaacaacacuaauguuguugcuggaaaggacaaaaccucaaugacauuggccggcaauucaucucuuugcccuauccguggaugggcuauauacacaaaagacaacagcauaagaauugguuccaaaggagauguuuuugucauaagagagccuuuuauaucauguucucacuuggaaugcagaaccuuuuuucugacccaaggugcucuauuaaaugacaagcauucaaaugggaccguuaaggacagaagcccuuauagggccuuaaugagcuguccucuaggugaagcuccgucuccauacaauucaagauuugaaucaguugcuuggucagcaagcgcaugccaugauggcuugggcuggcuaacaaucggaauuucugguccagauaauggggcaguggcuguacuaaaauacaacggcauaauaacugaaaccauuaaaaguuggaagaagcgaauauuaagaacacaagagucugaaugugucuguaugaacgguucauguuuuaccauaaugaccgauggcccgaguaauggggccgcaucguacagaaucuucaaaaucgagaaggggagaguuacuaaaucaauagaguuggaugcacccaauuaucauuacgaggaauguucauguuacccagacaccggcacagugaugugugugugcagggacaauuggcacgguucaaaucgaccuugggugucuuuuaaucaaaaccuggauuaucaaauaggauacaucugcagugggguguucggugacaauccgcgucccaaagauggagaaggcagcuguaauccagugacuguugauggagcagacggaguaaagggguuuucauacagauaugguaaugguguuuggauaggaaggacuaaaaguaacagacucagaaagggauuugagaugauuugggauccuaauggauggacagauaccgacagugauuucucaaugaaacaggauaucguggcaaugacugauuggucaggguacagcggaaguuuuguucaacauccugagcuaacaggauuggacuguaugagaccuugcuuuuggguugaauuagucagagggcuaccuagagaaaauacaacaaucuggacuagugggagcagcauuucuuuuuguggcguaaauagcgauacugcaaacuggucuuggccagacggugccgaguugccauucaccauugacaaguag

SEQ ID NO: 55146 - RNA, 1413 nt, Artificial Sequence
  derived and/or modified CDS sequence (wt) from neuraminidase__InfluenzaA__AFO64871
augaauccaaaucaaaaaauaauaaccauuggaucaaucaguauugcaauuggaauaauuagucugauauugcaaauaggaaauauuauuucaauaugggcuagccacucaauccaaacuggaagucaaaaccacacuggaguaugcaaccaaagaaucauuacauaugagaauagcaccuggguaaaucaaacauauguuaauauuaacaacacuaauguuguugcuggaaaggacaaaaccucaaugacauuggccggcaauucaucucuuugcccuauccguggaugggcuauauacacaaaagacaacagcauaagaauugguuccaaaggggauguuuuugucauaagagagccuuuuauaucauguucucacuuggaaugcagaaccuuuuuucugacccaaggugcucuauuaaaugacaagcauucaaaugggaccguuaaggacagaagcccuuauagggccuuaaugagcuguccucuaggugaagcuccgucuccauacaauucaagauuugaaucaguugcuuggucagcaagcgcaugccaugauggcuugggcuggcuaacaaucggaauuucugguccagauaauggggcaguggcuguacuaaaauacaacggcauaauaacugaaaccauuaaaaguuggaagaagcgaauauuaagaacacaagagucugaaugugucuguaugaacgguucauguuuuaccauaaugaccgauggcccgaguaauggggccgcaucguacagaaucuucaaaaucgagaaggggagaguuacuaaaucaauagaguuggaugcacccaauuaucauuacgaggaauguucauguuacccagacaccggcacagugaugugugugugcagggacaauuggcacgguucaaaucgaccuugggugucuuuuaaucaaaaccuggauuaucaaauaggauacaucugcagcgggguguucggugacaauccgcgucccaaagauggagaaggcagcuguaauccagugacuguugauggagcagacggaguaaagggguuuucauacagauaugguaaugguguuuggauaggaaggacuaaaaguaacagacucagaaagggauuugagaugauuugggauccuaauggauggacagauaccgacagugauuucucaaugagacaggauaucguggcaaugacugauuggucaggguacagcggaaguuuuguucaacauccugagcuaacaggauuggacuguaugagaccuugcuucuggguugaauuagucagagggcuaccuagagaaaauacaacaaucuggacuagugggagcagcauuucuuuuuguggcguaaauagcgauacugcaaacuggucuuggccagacggugccgaguugccauucaccauugacaaguag

SEQ ID NO: 55147 - RNA, 1413 nt, Artificial Sequence
  derived and/or modified CDS sequence (wt) from neuraminidase__InfluenzaA__AFO64882
augaauccaaaucaaaaaauaauaaccauuggaucaaucaguauagcaaucggaauaauuagucuaauguugcaaauaggaaauauuauuucaauaugggcuagucacucaauccaaacuggaagucaaaaccacacuggaauaugcaaccaaagaaucaucacauaugaaaacagcaccugggugaaucacacauauguuaauauuaacaacacuaauguuguugcuggaaaggacaaaacuucagugacauuggccggcaauucaucucuuuguucuaucaguggaugggcuauauacacaaaagacaacagcauaagaauugguuccaaaggagauguuuuugucauaagagagccuuucauaucauguucucacuuggaaugcagaaccuuuuuucugacccaaggugcucuauuaaaugacaaacauucaaaugggaccguuaaggacagaaguccuuauagggccuuaaugagcuguccucuaggugaagcuccgucuccauauaauucaaaguuugaaucaguugcuuggucagcaagcgcaugccaugauggcaugggcugguuaacaaucggaauuuccgguccagacaauggagcuguggcuguacuaaaauacaacggcauaauaacugaaaccauaaaaaguuggaaaaagcgaauauuaagaacacaagagucugaaugugucugugugaacgggucauguuuuaccauaaugaccgauggcccgaguaauggggccgccucguacaaaaucuucaagaucgaaaaggggaagguuacuaaaucaauagaguugaaugcacccaauucucauuaugaagaguguuccuguuacccagacacuggcacagugauguguguaugcagggacaacuggcacgguucaaaucgaccuugggugucuuuuaaucaaaaccuggauuaucaaauaggauacaucugcagugggguguucggugacaauccgcgucccaaagauggagagggcagcuguaauccagugacuguugauggagcagacggaguaaagggguuuucauacaaauaugguaaugguguuuggauaggaaggacuaaaaguaacagacuuagaaagggguuugagaugauuugggauccuaauggauggacagauaccgacagugauuucucagugaaacaggauguuguggcaauaacugauuggucaggguacagcggaaguuucguucaacauccugaguuaacaggguuggacuguauaagaccuugcuucuggguugaguuagucagaggacggccuagagaaaauacaacaaucuggacuagugggagcagcauuucuuuuuguggcguaaauagugauacugcaaacuggucuuggccagacggugcugaguugccauucaccauugacaaguag

SEQ ID NO: 55148 - RNA, 1413 nt, Artificial Sequence
  derived and/or modified CDS sequence (wt) from neuraminidase__InfluenzaA__AFO64893
augaauccaaaucaaaaaauaauaaccauuggaucaaucaguguagcaaucggaauaauuagucuaauguugcaaauaggaaauauuauuucaauaugggcuagucacucaauccaaacuggaagucaaaaccacacuggaauaugcaaccaaagaaucaucacauaugaaaacagcaccugggugaaucacacauaugucaauauuaacaacacuaauguuguugcuggaaaggacaaaacuucagugacauuggccggcaauucaucucuuuguucuaucaguggaugggcuauauacacaaaagacaacagcauaagaauugguuccaaaggagauguuuuugucauaagagagccuuucauaucauguucucauuuggaaugcagaaccuuuuuucugacccaaggugcucuauuaaaugacaaacauucaaaugggaccguuaaggacagaaguccuuauagggccuuaaugagcuguccucuaggugaagcuccgucuccauauaauucaaaguuugaaucaguugcuuggucagcaagcgcaugccaugauggcaugggcugguuaacaaucggaauuucugguccagacaauggagcaguggcuguacuaaaauacaacggcauaauaacugaaaccauaaaaaguuggaaaaagcgaauauuaagaacacaagagucugaaugugucugugugaacgggucauguuuuaccauaaugaccgauggcccgagugauggggccgccucguacaaaaucuucaagaucgaaaaggggaagguuacuaaaucaauagaguugaaugcacccaauucucauuaugaggaauguuccuguuacccagacacuggcacagugauguguguaugcagggacaacuggcacgguucaaaucgaccuugggugucuuuuaaucaaaaccuggauuaucaaauaggguacaucugcagugggguguucggugacaacccgcgucccaaagauggagagggcagcuguaauccagugacuguugauggagcagacggaguaaagggguuuucauacaaauaugguaaugguguuuggauaggaaggacuaaaaguaacagauuuagaaagggguuugagaugauuugggauccuaauggauggacagauaccgacagugauuucucagugaaacaggauguuguggcaauaacugauuggucaggguacagcggaaguuucguucaacauccugaguuaacaggauuggacuguauaagaccuugcuucuggguugaguuagucagaggacggccuagagaaaauacaacaaucuggacuagugggagcagcauuucuuuuuguggcguaaauagugauacugcaaacuggucuuggccagacggugcugaguugccauucaccauugacaaguag

SEQ ID NO: 55149 - RNA, 1413 nt, Artificial Sequence
  derived and/or modified CDS sequence (wt) from neuraminidase__InfluenzaA__AFO64904
augaauccaaaucaaaaaauaauaaccauuggaucaaucaguguggcaaucggaauaauuagucuaauauugcaaauaggaaauauuauuucaaugugggcuagccacucaauccaaacuggaagucaaaacuacacuggaauaugcaaccaaagaaucauuacauaugaaaauaacaccuggguaaaucaaacauauguuaauauuaacaacacuaauguuguugcuggaaaggacaaaaucucaaugacauuggccggcaauucaucucuuugcccuauccguggaugggcuauauacacaaaagacaacagcauaagaauugguuccaaaggagauguuuuugucauaagagagccuuuuauuucauguucucacuuggaaugcagaaccuuuuuucugacccaaggugcucuauuaaaugacaagcauucaaaugggaccguuaaggacagaagcccuuauagggccuuaaugagcuguccucugggugaagcuccgucuccauacaauucaagauuugaaucaguugcuuggucagcaagcgcaugccaugauggcuugggcuggcuaacaaucggaauuucugguccagauaauggagcaguggcuguacuaaaauacaacggcauaauaacugaaaccauaaaaaguuggaagaagcaaaucuuaagaacucaagagucugaaugugucugugugaacggcucauguuuuacaauaaugaccgauggcccgaguaauagggccgcaucguacagaaucuucaaaaucgagaaggggagaguuacuaaaucaauagaguuggaugcacccaauuaucauuacgaagaauguuccuguuacccagacaccggcacaguaaugugugugugcagggacaauuggcacgguucaaaucgaccuugggugucuuuuaaucaaaaccuugauuaucaaauaggauacaucugcagugggguguucggugacaauccgcgucccaaagauggagaaggcagcuguaauccagugacuguugacggagcagacggaguaaagggguuuucauacaaauaugguaaugguguuuggauaggaaggacuaaaaguaacagacuaagaaagggauuugagaugauuugggauccuaauggauggacagauaccgacagugauuucucaaugaaacaggaugucguggcaaugacugauuggucaggguacagcggaaguuuuguucaacauccugagcuaacaggauuggacuguaugagaccuugcuucuggguugaauuagucagagggcuaccuagagaaaauacaacgaucuggacuagugggagcagcauuucuuuuuguggcguaaauagcgagacugcaaacuggucuuggccagacggugcugaguugccauucacuauugacaaguag

SEQ ID NO: 55150 - RNA, 1413 nt, Artificial Sequence
  derived and/or modified CDS sequence (wt) from neuraminidase__InfluenzaA__AFO65019
augaauccaaaucaaaaaauaauaaccauuggaucaaucaguauagcaaucggaauaauuagucuaauguugcaaauaggaaauauuauuucaauaugggcuagucauucaauccaaacuggaagucaaaaccacacuggaauaugcaaccaaagaaucaucacauaugaaaacagcaccugggugaaucauacauauguuaauauuaacaacacuaauguuguugcuggaaaggacaaaacuucagugacauuggccggcaauucaucucuuuguucuaucaguggaugggcuauauacacaaaagacaacagcauaagaauugguuccaaaggagauguuuuugucauaagagagccuuucauaucauguucucacuuggaaugcagaaccuuuuuucugacccaaggugcucuauuaaaugacaaacauucaaaugggaccguuaaggacagaaguccuuauagggccuuaaugagcuguccucuaggugaagcuccgucuccauauaauucaaaguuugaaucaguugcuuggucagcaagcgcaugccaugauggcaugggcugguuaacaaucggaauuucugguccagacaauggagcaguggcuguacuaaaauacaacggcauaauaacugaaaccauaaaaaguuggaaaaagcgaauauuaagaacacaagagucugaaugugucugugugaacgggucauguuuuaccauaaugaccgauggcccgaguaauggggccgccucguacaaaaucuucaagaucgaaaaggggaagguuacuaaaucaauagaguugaacgcacccaauucucauuaugaggaauguuccuguuacccagacacuggcacagugauguguguaugccgggacaacuggcacgguucaaaucggccuugggugucuuuuaaucaaaaccuggauuaucaaauaggauacaucugcagugggguguucggugacaauccgcgucccaaagauggagagggcagcuguaauccagugacugcugauggagcagacggaguaaagggguuuucauacaaauaugguaaugguguuuggauaggaaggacuaaaaguaacagacuuagaaagggguucgagaugauuugggauccuaauggauggacagauaccgacagugauuucucagugaaacaagauguuguggcaauaacugauuggucaggguacagcggaaguuucguucaacauccugaguuaacaggauuggacuguauaaggccuugcuucuggguugaguuagucagaggacggccuagagaaaauacaacaaucuggacuagugggagcagcauuucuuuuuguggcguaaauagugauacugcaaacuggucuuggccagacggugcugaguugccauucaccauugacaaguag

SEQ ID NO: 55151 - RNA, 1413 nt, Artificial Sequence
  derived and/or modified CDS sequence (wt) from neuraminidase__InfluenzaA__AFO65030
augaauccaaaucaaaaaauaauaaccauuggaucaaucaguauagcaaucggaauaauuagucuaauguugcaaauaggaaauauuauuucaauaugggcuagucacucaauccaaacuggaagucaaaaccacacuggaguaugcaaccaaagaaucaucacauaugaaaacagcaccugggugaaucacacauauguuaauauuaacaacacuaauguuguugccggaaaggacaaaacuucagugacauuggccggcaauucaucucuuuguucuaucaguggaugggcuauauacacaaaagacaacagcauaagaauuggcuccaaaggagauguuuuugucauaagagaaccuuucauaucauguucucacuuggaaugcagaaccuuuuuucugacccaaggugcucuauuaaaugacaaacauucaaaugggaccguuaaggacagaaguccuuauagggccuuaaugagcuguccucuaggugaagcuccguccccauacaauucaaaguuugaaucaguugcauggucagcaagcgcaugccaugauggcaugggcugguuaacaaucggaauuucugguccagacaauggagcuguggcuguacuaaaauacaacggcauaauaacugaaaccauaaaaaguuggaaaaagcgaauauuaagaacacaagagucugaaugugucugugugaacgggucauguuucaccauaaugaccgauggcccgaguaauggggccgccucguacaaaaucuucaagaucgaaaaggggaagguuacuaaaucaauagaguugaaugcacccaauuuucauuaugaggaauguuccuguuacccagacacuggcacagugauguguguaugcagggacaacuggcaugguucaaaucgaccuugggugucuuuuaaucaaaaccuggauuaucaaauaggauacaucugcagugggguguucggugacaauccgcgucccaaagauggagagggcagcuguaauccagugacuguugauggagcagacggaguaaagggguuuucauacaaauaugguaaugguguuuggauaggaaggacuaaaaguaacagacuuagaaagggguuugagaugauuugggauccuaauggauggacagauaccgacagugauuucucagugaaacaggauguuguggcaauaacugauuggucaggguacagcggaaguuucguucaacauccugaguuaacaggauuggacuguauaagaccuugcuucuggguugaguuagucagaggacugccuagagaaaauacaacaaucuggacuagugggagcagcauuucuuuuuguggcguaaauagugauacugcaaacuggucuuggccagacggugcugaguugccguucaccauugacaaguag

SEQ ID NO: 55152 - RNA, 1413 nt, Artificial Sequence
  derived and/or modified CDS sequence (wt) from neuraminidase__InfluenzaA__AFO65041
augaauccaaaucaaaaaauaauaaccauugggucaaucaguauagcaaucggaauaauuagucuaauguugcaaauaggaaauauuauuucaauaugggcuagucacucaauccaaacuggaagucaaaaccacacuggaguaugcaaccaaagaaucaucacauaugaaaacagcaccugggugaaucacacauauguuaauauuaacaacacuaauguuguugcuggaaaggacaaaacuucagugacauuggccggcaauucaucucuuuguucuaucaguggaugggcuauauacacaaaagacaacagcauaagaauugguuccaaaggagauguuuuugucauaagagagccuuucauaucauguucucacuuggaaugcagaaccuuuuuucugacccaaggugcucuauuaaaugacaaacauucaaaugggaccguuaaggacagaagucccuauagggcuuuaaugagcuguccucuaggugaagcuccguccccauacaauucaaaguuugaaucaguugcuuggucagcaagcgcaugccaugauggcaugggcugguuaacaaucggaauuucugguccagacaauggagcaguggcuguacuaaaauacaacggcauaauaacugaaaccauaaaaaguuggaaaaagcaaauauuaagaacacaagagucugaaugugucugugugaacgggucauguuucaccauaaugaccgauggcccgaguaauggggccgccucguacaaaaucuucaagaucgaaaagggaaagguuacuaaaucaauagaguugaaugcacccaauuuucauuaugaggaauguuccuguuacccagacacuggcacagugauguguguaugcagggacaacuggcaugguucaaaucgaccuugggugucuuuuaaucaaaaccuggauuaucaaauaggauacaucugcagugggguguucggugacaauccgcgucccaaagauggagagggcagcuguaauccagugacuguugauggagcaaacggaguaaagggguuuucauacaaauaugguaaugguguuuggauaggaaggacuaaaaguaacagacuuagaaagggguuugagaugauuugggauccuaauggauggacagauaccgacagugauuucucagugaaacaggauguuguggcaauaacugauuggucaggguacagcggaaguuucguucaacauccugaguuaacaggauuggacuguauaagaccuugcuucuggguugaguuagucagaggacugccuagagaaaauacaacaaucuggacuagugggagcagcauuucuuuuuguggcguaaauagugauacugcaaacuggucuuggccagacggugcugaguugccguucaccauugacaaguag

SEQ ID NO: 55153 - RNA, 1413 nt, Artificial Sequence
  derived and/or modified CDS sequence (wt) from neuraminidase__InfluenzaA__AFO65052
augaauccaaaucaaaaaauaauaaccauuggaucaaucaguauagcaaucggaauaauuagucuaauguugcaaauaggaaauauuauuucaauaugggcuagucacucaauccaaacuggaagucaaaaccacacuggaguaugcaaccaaagaaucaucacauaugaaaacagcaccugggugaaucacacauauguuaauauuaacaacacuaauguuauugcuggaaaggacaaaacuucaaugacauuggccggcaauucaucucuuuguucuaucaguggaugggcuauauacacaaaagacaacagcauaagaauugguuccaaaggagauguuuuugucauaagagagccuuucauaucauguucucacuuggaaugcagaaccuuuuuucugacccaaggugcucuauuaaaugacaaacauucaaaugggaccguuaaggacagaagucccuauagggcuuuaaugagcuguccucuaggugaagcuccguccccauacaauucaaaguuugaaucaguugcuuggucagcaagcgcaugcaaugauggcaugggcugguuaacaaucggaauuucugguccagacaauggagcaguggcuguacuaaaauacaacggcauaauaacugaaaccauaaaaaguuggaaaaagcaaauauuaagaacacaagagucugaaugugucugugugaacgggucauguuucaccauaaugaccgauggcccgaguaauggggccgccucguacaaaaucuucaagaucgaaaagggaaagguuacuaaaucaauagaguugaaugcacccaauuuucauuaugaggaauguuccuguuacccagacacuggcacagugauguguguaugcagggacaacuggcaugguucaaaucgaccuugggugucuuuuaaucaaaaccuggauuaucaaauaggauacaucugcagugggguguucggugacaauccgcgucccaaagauggagagggcagcuguaauccagugacuguugauggagcaaacggaguaaagggguuuucauacaaauaugguaaugguguuuggauaggaaggacuaaaaguaacagacuuagaaagggguuugagaugauuugggauccuaauggauggacagauaccgacagugauuucucagugaaacaggauguuguggcaauaacugauuggucaggguacagcggaaguuucguucaacauccugaguuaacaggauuggacuguauaagaccuugcuucuggguugaguuagucagaggacugccuagagaaaauacaacaaucuggacuagugggagcagcauuucuuuuuguggcguaaauagugauacugcaaacuggucuuggccagacggugcugaguugccguucaccauugacaaguag

SEQ ID NO: 55154 - RNA, 1413 nt, Artificial Sequence
  derived and/or modified CDS sequence (wt) from neuraminidase__InfluenzaA__AFO66139
augaauccaaaucaaaaaauaauaaccauuggaucaaucaguauagcaaucggaauaauuagucuaauguugcaaauaggaaauauuauuucaauaugggcuagucacucaauccaaacuggaagucaaaaccacacuggaauaugcaaccaaagaaucaucacauaugaaaacagcaccugggugaaucacacauauguuaauauuaacaacacuaauguuguugcuggaaaggacaaaacuucagugacauuggccggcaauucaucucuuuguucuaucaguggaugggcuauauacacaaaagacaacagcauaagaauuggauccaaaggagauguuuuugucauaagagaaccuuucauaucauguucucacuuggaaugcagaaccuuuuuucugacccaaggugcucuauuaaaugacaaacauucaaaugggaccguuaaggacagaaguccuuauagggccuuaaugagcugcccucuaggugaagcuccguccccauacaauucaaaguuugaaucaguugcauggucagcaagcgcaugccaugauggcaugggcugguuaacaaucggaauuucugguccagacaauggagcuguggcuguacuaaaauacaacggcauaauaacugaaaccauaaaaaguuggaaaaagcgaauauuaagaacacaagagucugaaugugucugugugaacgggucauguuucaccauaaugaccgauggcccgaguaauggggccgccucguacaaaaucuucaagaucgaaaaggggaagguuacuaaaucaauagaguugaaugcacccaauuuucauuaugaggaauguuccuguuacccagacacuggcacagugauguguguaugcagggacaacuggcaugguucaaaucgaccuugggugucuuuuaaucaaaaccuggauuaucaaauaggauacaucugcagugggguguucggugacaauccgcgucccaaagauggagagggcagcuguaauccagugacuguugauggagcagacggaguaaagggguuuucauacaaauaugguaaugguguuuggauaggaaggacuaaaaguaacagacuuagaaagggguuugagaugauuugggauccuaauggauggacagauaccgacaguaauuucucagugaaacaggauguuguggcaauaacugauuggucaggguacagcggaaguuucguccaacauccugaguuaacaggauuggacuguauaagaccuugcuucuggguugaguuggucagaggacugccuagagaaaauacaacaaucuggacuagugggagcagcauuucuuuuuguggcguaaauagugauacugcaaacuggucuuggccagacggugcugaguugccguucaccauugacaaguag

SEQ ID NO: 55155 - RNA, 1413 nt, Artificial Sequence
  derived and/or modified CDS sequence (wt) from neuraminidase__InfluenzaA__AFO66150
augaauccaaaucaaaaaauaauaaccauuggaucaaucaguguggcaaucggaauaauuagucuaauauugcaaauaggaaauauuauuucaauaugggcuagccacucaauccaaacuggaagucaaaacuacacuggaauaugcaaccaaagaaucauuacauaugaaaauaggaccuggguaaaucaaacauauguuaauauuaacaacacuaauguuguugcuggaaaggacaaaaccucgaugacauuggccggcaauucaucucuuugcccuauccguggaugggcaauauacacaaaagacaacagcauaagaauugguuccaaaggagauguuuuugucauaagagagccuuuuauaucauguucucacuuggaaugcagaaccuuuuuucugacccaaggugcucuauuaaaugacaagcauucaaaugggaccauuaaggacagaagcccuuuuagggccuuaaugagcuguccucugggugaagcuccgucuccauacaauucaagauuugaaucaguugcuuggucagcaagcgcaugccaugauggccugggcuggcuaacaaucggaauuucugguccagauaauggagcaguggcuguacuaaaauacaacggcauaauaacugaaaccauaaaaaguuggaaaaagcaaauccuaagaacacaagagucugaaugugucugugugaacgguucauguuuuaccauaaugaccgauggcccgaguaacagggccgcaucguacagaaucuucaaaauugagaaggggagaguuacuaaaucaauagaguuggaugcacccaauuaucauuacgaggaauguuccuguuauccagacaccggcacaguaaugugugugugcagggacaauuggcacgguucaaaucgaccuuggguguccuuuaaucaaaaccuggauuaucaaauaggauacaucugcagugggguguucggugacaauccgcgucccaaagauggagaaggcagcuguaauccagugacuguugauggagcagacggaguaaagggguuuucauacagauaugguaaugguguuuggauaggaaggacuaagaguaacagaauaagaaagggauuugagaugauuugggauccuaauggauggacagauaccgacagugauuucucaaugaaacaggaugucguggcaaugacugauuggucaggguacagcggaaguuuuguucaacauccugagcuaacaggauuggacuguaugagaccuugcuucuggguugaauuagucagagggcuaccuagagaaaacacaacaaucuggacuagugggagcagcauuucuuuuuguggcgugaauagcgagacugcaaacuggucuuggccagacggugcugaguugccauucaccauugacaaguag

SEQ ID NO: 55156 - RNA, 1413 nt, Artificial Sequence
  derived and/or modified CDS sequence (wt) from neuraminidase__InfluenzaA__AFO66161
augaauccaaaucaaaaaauaauaaccauuggaucaaucaguauagcaaucggaauaauuagccuaauguugcaaauaggaaacauuauuucaauaugggcuagucacucaauccaaacuggaagucaaaaccacacuggaguaugcaaccaaagaaucaucacauaugaaaacagcaccugggugaaucacacauauguuaauauuaacaacaccaauguuauugcuggaaaggacaaaacuucagugacauuggccggcaauucaucucuuuguucuaucaguggaugggcuauauacacaaaagacaacagcauaagaauugguuccaaaggagauguuuuugucauaagagagccuuucauaucauguucucacuuggaaugcagaaccuuuuuucugacccaaggugcucuauuaaaugacaaacauucaaaugggaccguuaaggacagaagccccuauagggcuuuaaugagcuguccucuaggugaagcuccguccccauacaauucaaaguuugaaucaguugcuuggucggcaagcgcaugccaugauggcaugggcugguuaacaaucggaauuucugguccagacaauggagcaguggcuguacuaaaauacaacggcauaauaacugaaaccauaaaaaguuggaaaaagcaaauauuaagaacacaggagucugaaugugucuguguaaacgggucauguuucaccauaaugaccgauggcccgaguaauggggccgccucguacaaaaucuucaagaucgaaaagggaaagguuacuaaaucaauagaguugaaugcacccaauuuucauuaugaggaauguuccuguuacccagacacuggcacagugauuuguguaugcagggacaacuggcaugguucaaaucgacccugggugucuuuuaaucaaaaccuggauuaucaaauaggauacaucugcagugggguguucggugacaauccgcgucccaaagauggagagggcagcuguaauccagugacuguugauggagcaaacggaguaaagggguuuucauacaaauaugguaaugguguuuggauaggaaggacuaaaaguaacagacuuagaaagggguuugagaugauuugggauccuaauggauggacagacaccgacagugauuucucagugaaacaggauguuguggcaauaacugauuggucuggguacagcggaaguuucguucaacauccugaguuaacaggauuggacuguauaagaccuugcuucuggguugaguuagucagaggacugccaaaagaaaauacaacaaucuggacuagugggagcagcauuucuuuuuguggcguaaauagugauacugcaaacuggucuuggccagacggugcugaguugccguuuaccauugacaaguaa

SEQ ID NO: 55157 - RNA, 1413 nt, Artificial Sequence
  derived and/or modified CDS sequence (wt) from neuraminidase__InfluenzaA__AFO66172
augaacccaaaucaaaaaauaauaaccauuggaucaaucaguauagcaaucggaauaauuagucuaauguugcaaauaggaaauauuauuucaauaugggcuagucacucaauccaaacuggaagucaaaaccacacuggaauaugcaaccaaagaaucaucacauaugaaaacagcaccugggugaaucacacauauguuaauauuaacaacacuaauguuguugcuggaaaggacaaaacuucagugacauuggccggcaauucaucucuuuguucuaucaguggaugggcuauauacacaaaagacaacagcauaagaauuggcuccaaaggagauguuuuugucauaagagaaccuuucauaucauguucucacuuggaaugcagaaccuuuuuucugacccaaggugcucuauuaaaugacaaacauucaaaugggaccguaaaggacagaaguccuuauagggccuuaaugagcuguccucuaggugaagcuccguccccauacaauucaaaguucgaaucaguugcauggucagcaagcgcaugccaugauggcaugggcugguuaacaaucggaauuucugguccagacaauggagcuguggcuguacuaaaauacaacggaauaauaacugaaaccauaaaaaguuggaaaaagcgaauauuaagaacacaagagucugaaugugucuguaugaacgggucauguuucaccauaaugaccgauggcccgaguaauggggccgccucguacaaaauuuucaagaucgaaaaggggaagguuacuaaaucaauagaguugaaugcacccaauuuucauuaugaggaauguuccuguuacccagacacuggcacagugauguguguaugcagggacaacuggcaugguucaaaucgaccgugggugucuuuuaaucaaaacuuggauuaucaaauaggauacaucugcaguggaguguucggugacaauccgcgucccaaagauggagagggcagcugcaauccagugacuguugauggagcagacggaguaaaaggguuuucauacaaauaugguaaugguguuuggauaggaaggacuaaaaguaacagacuuagaaagggguuugaaaugauuugggauccuaauggguggacagauaccgacagugauuucucagugaaacaagauguuguagcaauaacugauuggucaggguacagcggaaguuucguucaacauccugaguuaacaggauuggacuguauaagaccuugcuucuggguugaguuagucagagggcugccuagagaaaauacaacaaucuggacuagugggagcagcauuucuuuuuguggcguuaauagugauacugcaaacuggucuuggccagacggugcugaguugccguucaccauugacaaguag

SEQ ID NO: 55158 - RNA, 1413 nt, Artificial Sequence; identical to SEQ ID NO: 46942
  derived and/or modified CDS sequence (wt) from neuraminidase__InfluenzaA__AFO66183

SEQ ID NO: 55159 - RNA, 1413 nt, Artificial Sequence
  derived and/or modified CDS sequence (wt) from neuraminidase__InfluenzaA__AFO66194
augaauccaaaucaaaaaauaauaaccauuggaucaaucaguauagcaaucggaauaauuagccuaauguugcaaauaggaaacauuauuucaauaugggcuagucacucaauccaaacuggaagucaaaaccacacuggaguaugcaaccaaagaaucaucacauaugaaaacagcaccugggugaaucacacauauguuaauauuaacaacaccaauguuauugcuggaaaggacaaaacuucagugacauuggccggcaauucaucucuuuguucuaucaguggaugggcuauauacacaaaagacaacagcauaagaauugguuccaaaggagauguuuuugucauaagagagccuuucauaucauguucucacuuggaaugcagaaccuuuuuucugacccaaggugcucuauuaaaugacaaacauucaaaugggaccguuaaggacagaagucccuauagggcuuuaaugagcuguccucuaggugaagcuccguccccauacaauucaaaguuugaaucaguugcuuggucagcaagcgcaugccaugauggcaugggcugguuaacaaucggaauuucugguccagacaauggagcaguggcuguacuaaaauacaacggcauaauaacugaaaccauaaaaaguuggaaaaagcaaauauuaagaacacaagagucugaaugugucugugugaacgggucauguuucaccauaaugaccgauggcccgaguaauggggccgccucguacaaaaucuucaagaucgaaaagggaaagguuacuaaaucaauagaguugaaugcacccaauuuucauuaugaggaauguuccuguuacccagacacuggcacagugauguguguaugcagggacaacuggcaugguucaaaucgacccugggugucuuuuaaucaaaaccuggauuaucaaauaggauacaucugcagugggguguucggugacaauccgcgucccaaagauggagagggcagcuguaauccagugacuguugauggagcaaacggaguaaagggguuuucauacaaauaugguaaugguguuuggauaggaaggacuaaaaguaacagacuuagaaagggguuugagaugauuugggauccuaauggauggacagauaccgacagugauuucucagugaaacaggauauuguggcaauaacugauuggucaggguacagcggaaguuucguucaacauccugaguuaacaggauuggacuguauaagaccuugcuucuggguugaguuagucagaggacugccaaaagaaaauacaacaaucuggacuagugggagcagcauuucuuuuuguggcguaaauagugauacugcaaacuggucuuggccagacggugcugaguugccguuuaccauugacaaguag

SEQ ID NO: 55160 - RNA, 1410 nt, Artificial Sequence
  derived and/or modified CDS sequence (wt) from neuraminidase__InfluenzaA__AFO66205
augaauccaaaucaaaaaauaauaacgauuggcucuguuucucucaccauugccacaauaugcuuccuuacgcaaauugccauccugguaacuacuguaacauugcauuucaagcaauaugaaugcaacucccccccaaacaaccaagugaugcugugugaaccaacaauaauagaaagaaacauaacagagauaguguaucugaccaacaccaccauagagaaggaaauaugccccaaacuagcagaauacagaaauuggucaaagccgcaauguaacauuacuggauuugcaccuuuuucuaaggacaauucgauucggcuuuccgcugguggggacaucuggguuacaagagaaccuuaugugucaugcgauccugacaaguguuaucaauuugcccuuggacagggaacaacacuaaacaacgggcauucaaaugacacaguacaugauaggaccccuuaucggacccuauugaugaaugaguuggguguuccauuucauuugggaaccaagcaagugugcauagcaugguccagcucaaguugucacgauggaaaagcauggcugcauguuuguguaacgggggaugauaaaaaugcaacugcuagcuucauuuacaaugggaggcuuguagauaguauagguucaugguccaaaaaaauccucaggacccaggagucggaaugcguuuguaucaauggaacuuguacaguaguaaugacugaugggagugcuucaggaaaagcugauacuaaaauacuauucauugaggaggggaaaaucguucauacuagccuauugucagggagugcucagcaugucgaggagugcuccuguuauccucgauauccuggugucagaugugucugcagagacaacuggaaaggcuccaauaggcccaucguagauauaaauguaaaggauuauagcauuguuuccaguuaugugugcucaggacuuguuggagacacacccagaaaaaacgacagcuccagcaguagccauugcuuggauccuaacaaugaggaagguggucauggagugaaaggcugggccuuugaugauggaaaugacguguggaugggaagaacgaucagcgagaaguuacgcucaggauaugaaaccuucaaagucauugaaggcugguccaaaccuaacuccaaacugcagauaaauaggcaagucauaguugacagagguaauagguccgguuauucugguauuuucucuguugaaggcaaaagcugcaucaaucggugcuuuuauguggagcugauaaggggaaggaaccaggaaacugaagucuuguggaccucaaacaguauuguuguguuuuguggcaccucagguacauauggaacaggcucauggccugauggggcggacaucaaucucaugccuauauaa

SEQ ID NO: 55161 - RNA, 1413 nt, Artificial Sequence
  derived and/or modified CDS sequence (wt) from neuraminidase__InfluenzaA__AFO66216
augaauccaaaucaaaaaauaauaaccauuggaucaaucaguauagcaaucggaauaauuagucuaauguugcaaauaggaaauauuauuucaauaugggcuagucacucaauccaaacuggaagucaaaaccacacuggaauaugcaaccaaagaaucaucacauaugaaaacagcaccugggugaaucacaccuauguuaauauuaacaacacuaauguuguugcuggaaaggacaaaacuucagugacauuggccggcaauucaucucuuuguucuaucaguggaugggcuauauacacaaaagacaacagcauaagaauuggcuccaaaggagauguuuuugucauaagagaaccuuucauaucauguucucacuuggaaugcagaaccuuuuuucugacccaaggugcucuauuaaaugacaaacauucaaaugggaccguuaaggacagaaguccuuauagggccuuaaugagcuguccucuaggugaagcuccguccccauacaauucaaaguuugaaucaguugcauggucagcaagcgcaugccaugauggcaugggcugguuaacaaucggaauuucugguccagacaauggagcuguggcuguacuaaaauacaacggaauaauaacugaaaccauaaaaaguuggaaaaagcgaauauuaagaacacaagagucugaaugugucugugugaacgggucauguuucaccauaaugaccgauggcccgaguaauggggccgccucguacaaaaucuucaagaucgaaaaggggaagguuacuaaaucaauagaguugaaugcacccaauuuucauuaugaggaauguuccuguuacccagacacuggcacagugauguguguaugcagggacaacuggcaugguucaaaucgaccuugggugucuuuuaaucaaaacuuggauuaucaaauaggauacaucugcaguggaguguucggugacaauccgcgucccaaagauggagagggcagcuguaauccagugacuguugauggagcagacggaguaaaggguuuuucauacaaauaugguaaugguguuuggauaggaaggacuaaaaguaacagacuuagaaagggguuugagaugauuugggauccuaauggauggacagauaccgacagugauuucucagugaaacaggauguuguggcaauaacugauuggucaggguacagcggaaguuucguucaacauccugaguuaacaggauuggacuguauaagaccuugcuucuggguugaguuagucagaggacugccuagagaaaauacaacaaucuggacuagugggagcagcauuucuuuuuguggcguuaauagugauacugcaaacuggucuuggccagacggugcugaguugccguucaccauugacaaguag

SEQ ID NO: 55162 - RNA, 1413 nt, Artificial Sequence; identical to SEQ ID NO: 46398
  derived and/or modified CDS sequence (wt) from neuraminidase__InfluenzaA__AFO66227

SEQ ID NO: 55163 - RNA, 1413 nt, Artificial Sequence
  derived and/or modified CDS sequence (wt) from neuraminidase__InfluenzaA__AFO66238
augaacccaaaucaaaaaauaauaaccauuggaucaaucaguauagcaaucggaauaauuagucuaauguugcaaauaggaaauauuauuucaauaugggcuagucacucaauccaaacuggaagucaaaaccacacuggaauaugcaaccaaagaaucaucacauaugaaaacagcaccugggugaaucacacauauguuaauauuaacaacacuaauguuguugcuggaaaggacaaaacuucagugacauuggccggcaauucaucucuuuguucuaucaguggaugggcuauauacacaaaagacaacagcauaagaauuggcuccaaaggagauguuuuugucauaagagaaccuuucauaucauguucucacuuggaaugcagaaccuuuuuucugacccaaggcgcucuauuaaaugacaaacauucaaaugggaccguaaaggacagaaguccuuauagggccuuaaugagcuguccucuaggugaagcuccguccccauacaauucaaaguucgaaucaguugcauggucagcaagcgcaugccaugauggcaugggcugguuaacaaucggaauuucugguccagacaauggagcuguggcuguacuaaaauacaacggaauaauaacugaaaccauaaaaaguuggaaaaagcaaauauuaagaacacaagagucugaaugugucuguaugaacgggucauguuucaccauaaugaccgauggcccgaguaauggggccgccucguacaaaauuuucaagaucgaaaaggggaagguuacuaaaucaauagaguugaaugcacccaauuuucauuaugaggaauguuccuguuacccagacacuggcacagugauguguguaugcagggacaacuggcaugguucaaaucgaccuugggugucuuuuaaucaaaacuuggauuaucaaauaggauacaucugcaguggaguguucggugacaauccgcgucccaaagauggagagggcagcugcaauccagugacuguugauggagcagacggaguaaaaggguuuucauacaaauaugguaaugguguuuggauaggaaggaccaaaaguaacagacuuagaaagggguuugagaugauuugggauccuaauggauggacaaauaccgacagugauuucucagugaaacaggauguuguagcaauaacugauuggucaggguacagcggaaguuucguccaacauccugaguuaacaggauuggacuguauaagaccuugcuucuggguugaguuagucagagggcugccuagagaaaauacaacaaucuggacuagugggagcagcauuucuuuuuguggcguuaauagugauacugcaaacuggucuuggccagacggugcugaguugccguucaccauugacaaguag

SEQ ID NO: 55164 - RNA, 1413 nt, Artificial Sequence
  derived and/or modified CDS sequence (wt) from neuraminidase__InfluenzaA__AFO66249
augaacccaaaucaaaaaauaauaaccauuggaucaaucaguauagcaaucggaauaauuagucuaauguugcaaauaggaaauauuauuucaauaugggcuagucacucaauccaaacuggaagucaaaaccacacuggaauaugcaaccaaagaaucaucacauaugaaaacagcaccugggugaaucacacauauguuaauauuaacaacacuaauguuguugcuggaaaggacaaaacuucagugacauuggccggcaauucaucucuuuguucuaucaguggaugggcuauauacacaaaagacaacagcauaagaauuggcuccaaaggagauguuuuugucauaagagaaccuuucauaucauguucucacuuggaaugcagaaccuuuuuucugacccaaggcgcucuauuaaaugacaaacauucaaaugggaccguaaaggacagaaguccuuauagggccuuaaugagcuguccucuaggugaagcuccguccccauacaauucaaaguucgaaucaguugcauggucagcaagcgcaugccaugauggcaugggcugguuaacaaucggaauuucugguccagacaauggagcuguggcuguacuaaaauacaacggaauaauaacuggaaccauaaaaaguuggaaaaagcaaauauuaagaacacaagagucugaaugugucuguaugaacgggucauguuucaccauaaugaccgauggcccgaguaauggggccgccucguacaaaauuuucaagaucgaaaaggggaagguuacuaaaucaauagaguugaaugcacccaauuuucauuaugaggaauguuccuguuacccagacacuggcacagugauguguguaugcagggacaacuggcaugguucaaaucgaccuugggugucuuuuaaucaaaacuuggauuaucaaauaggauacaucugcaguggaguguucggugacaauccgcgucccaaagauggagagggcagcugcaauccagugacuguugauggagcagacggaguaaaaggguuuucauacaaauaugguaaugguguuuggauaggaaggaccaaaaguaacagacuuagaaagggguuugagaugauuugggauccuaauggauggacaaauaccgacagugauuucucagugaaacaggauguuguagcaauaacugauuggucaggguacagcggaaguuucguccaacauccugaguuaacaggauuggacuguauaagaccuugcuucuggguugaguuagucagagggcugccuagagaaaauacaacaaucuggacuagugggagcagcauuucuuuuuguggcguuaauagugauacugcaaacuggucuuggccagacggugcugaguugccguucaccauugacaaguag

SEQ ID NO: 55165 - RNA, 1413 nt, Artificial Sequence
  derived and/or modified CDS sequence (wt) from neuraminidase__InfluenzaA__AFP33330
augaauccaaaucaaaaaauaauaaccauuggaucaaucaguguggcaaucggaauaauuagucuaauauugcaaauaggaaauauuauuucaauaugggcuagccacucaauccaagcuggaagucaaaacuacacuggaauaugcaaccaaaaaaucauuacauaugaaaauagaaccuggguaaaucaaacauauguuaauauuaacaacacuaauguuguugcuggaaaggacaaaaccucgaugacauuggccggcaauucaucucuuugcccuauccguggaugggcaauauacacaaaagacaacagcauaagaauugguuccaaaggagauguuuuugucauaagagagccuuuuauaucauguucucacuuggaaugcagaaccuuuuuucugacccaaggugcucuauuaaaugacaagcauucaaaugggaccauuaaggacagaagcccuuuuagggccuuaaugagcuguccucugggugaagcuccgucuccauacaauucaagauuugaaucaguugcuuggucagcaagcgcaugccaugauggccugggcuggcuaacaaucggaauuucugguccagauaauggagcaguggcuguacuaaaauacaacggcauaauaacugaaaccauaaaaaguuggaaaaagcaaauccuaagaacacaagagucugaaugugucugugugaacgguucauguuuuaccauaaugaccgauggcccgaguaacagggccgcaucguacagaaucuucaaaauugagaaggggagaguuacuaaaucaauagaguuggaugcacccaauuaucauuacgaggaauguuccuguuauccagacaccggcacaguaaugugugugugcagggacaauuggcacgguucaaaucgaccuuggguguccuuuaaucaaaaccuggauuaucaaauaggauacaucugcagugggguguucggugacaauccgcgucccaaagauggagaaggcagcuguaauccagugacuguugauggagcagacggaguaaagggguuuucauacagauaugguaaugguguuuggauaggaaggacuaaaaguaacagacuaagaaagggauuugagaugauuugggauccuaauggauggacagauaccgacagugauuucucaaugaaacaggaugucguggcaaugacugauuggucaggguacagcggaaguuuuguucaacauccugagcuaacaggauuggacuguaugagaccuugcuucuggguugaauuagucagagggcuaccuagagaaaauacaacaaucuggacuagugggagcagcauuucuuuuuguggcgugaauagcgagacugcaaacuggucuuggccagacggugcugaguugccauucaccauugacaaguag

SEQ ID NO: 55166 - RNA, 1413 nt, Artificial Sequence
  derived and/or modified CDS sequence (wt) from neuraminidase__InfluenzaA__AFP33331
augaauccaaaucaaaaaauaauaaccauuggaucaaucaguauagcaaucggaauaauuagucuaauguugcaaauaggaaauauuauuucaauaugggcuagucacucaauccaaacuggaagucaaaaccacacuggaauaugcaaccaaagaaucaucacauaugaaaacagcacuugggugaaucacacauauguuaauauuaacaacacuaauguuauugcuggaaaggacaaaacuucagugacauuggccggcaauucaucucuuuguucuaucaguggaugggcuauauacacaaaagacaacagcauaagaauuggauccaaaggagauguuuuugucauaagagaaccuuucauaucauguucucacuuggaaugcagaaccuuuuuucugacccaaggugcucuauuaaaugacaaacauucaaaugggaccguuaaggacagaaguccuuauagggccuuaaugagcuguccucuaggugaagcuccguccccauacaauucaaaauuugaaucaguugcauggucagcaagcgcaugccaugauggcaugggcugguuaacaaucggaauuucugguccagacaauggagcuguggcuguacuaaaauacaacggcauaauaacugaaaccauaaaaaguuggaaaaagcgaauauuaagaacacaagagucugaaugugucugugugaacgggucauguuucaccauaaugaccgauggcccgaguaauggggccgccucguacaaaaucuucaagaucgaaaaggggaagguuacuaaaucaauagaguugaaugcacccaauuuucauuaugaggaauguuccuguuacccagacacuggcacagugauguguguaugcagggacaacuggcaugguucaaaucgaccuugggugucuuuuaaucaaaaccuggauuaucaaauaggauacaucugcagugggguguucggugacaauccgcgucccaaagauggagagggcagcuguaauccagugacuguugauggagcagacggaguaaagggguuuucauacaaauaugguaaugguguuuggauaggaaggacuaaaaguaacagacuuagaaagggguuugagaugauuugggauccuaauggauggacagauaccgacagugauuucucagugaaacaggauguuguggcaauaacugauuggucaggguacagcggaaguuucguucaacauccugaguuaacaggauuggacugcauaagaccuugcuucuggguugaguuagucagaggacugccuagagaaaauacaacaaucuggacuagugggagcagcauuucuuuuuguggcguaaauagugauacugcaaacuggucuuggccagacggugcugaguugccguucaccauugacaaguag

SEQ ID NO: 55167 - RNA, 1410 nt, Artificial Sequence
  derived and/or modified CDS sequence (wt) from neuraminidase__InfluenzaA__AFQ32576
augaauccaaaucaaaagauaauaacgauuggcucuguuucucucaccauuuccacaauaugcuucuucaugcaaauugccaucuugauaacuacuguaacauugcauuucaagcaauaugaauucaacucccccccaaacaaccaagugaugcugugugaaccaacaauaauagaaagaaacauaacagagauaguguaucugaccaacaccaccauagagaaggaaauaugccccaaacuagcagaauacagaaauuggucaaagccgcaaugugacauuacaggauuugcaccuuuuucuaaggacaauucgauuaggcuuuccgcugguggggacaucugggugacaagagaaccuuaugugucaugcgauccugacaaguguuaucaauuugcccuuggacagggaacaacacuaaacaacgugcauucaaauaacacaguacgugauaggaccccuuaucggacccuauugaugaaugaguuagguguuccuuuucaucuggggaccaaacaagugugcauagcaugguccagcucaaguugucacgauggaaaagcauggcugcauguuuguauaacgggggaugauaaaaaugcaacugcuagcuucauuuacaaugggaagcuuguagauaguguuguuucaugguccaaagaaauccuuaggacccaggagucagaaugcguuuguaucaauggaacuuguacaguaguaaugacugaugggagugcuucaggaaaagcugauacuaaaauacuauucauugaggaggggaaaaucguucauacuagcacauugucaggaagugcucagcaugucgaggagugcucuugcuauccucgauauccuggugucagaugugucugcagagacaacuggaaaggcuccaauaggcccaucguagauauaaacauaaaggaucauaguauuguuuccaguuauguguguucaggacuuguuggagacacacccagaaaaaacgacagcuccagcaguagccauuguuuggauccuaacaaugaggaagguggucauggagugaaaggcugggccuuugaugauggaaaugacguguggaugggaagaacgaucaacgagacgucacguuuaggguaugaaaccuucaaagucauugaaggcugguccaacccuaaguccaaauugcagauaaauaggcaagucauaguugacagagguaauagguccgguuauucugguauuuucucuguugaaggcaaaagcugcaucaaucggugcuuuuauguggaguugauuaggggaagaaaagaggaaacugaagucuuauggaccucaaacaguauuguuguguuuuguggcaccucagguacauauggaacaggcucauggccugauggggcggaucucaaucucaugccuauauaa

SEQ ID NO: 55168 - RNA, 1410 nt, Artificial Sequence
  derived and/or modified CDS sequence (wt) from neuraminidase__InfluenzaA__AFQ37282
augaauccaaaccaaaagauaauaaccauugguucggucuguaugacaauuggaauggcuaaccuaauauuacaaauuggaaacauaaucucaauauggauuagccacucaauucaacuugggaaucaaaaucagauugaaacaugcaaucaaagcgucauuacuuaugaaaacaacacuuggguaaaucagacauauguuaacaucagcaacaccaacuuugcugcuggacagucagugguuuccgugaaauuagcgggcaauuccucucucugcccuguuaguggaugggcuauauacaguaaagacaacaguauaagaaucgguuccaagggggauguguuugucauaagggaaccauucauaucaugcucccccuuggaaugcagaaccuucuucuugacccaaggggccuugcuaaaugacaaacauuccaauggaaccauuaaagacaggagcccauaucgaacccuaaugagcuguccuauuggugaaguucccucuccauacaacucaagauuugagucagucgcuuggucagcaagugcuugucaugauggcaucaauuggcuaacaauuggaauuucuggcccagacaauggggcaguggcuguguuaaaguacaacggcauaauaacagacacuaucaagaguuggagaaacaauauauugagaacacaagaguccgaaugugcauguguaaaugguucuugcuuuacuguaaugaccgauggaccaagugauggacaggccucauacaagaucuucagaauagaaaagggaaaaauagucaaaucagucgaaaugaaugccccuaauuaucacuaugaggaaugcucuuguuauccugauucuagugaaaucacaugugugugcagggauaacuggcauggcucgaaucgaccgugggugucuuucaaccagaaucuggaauaucagauaggauacauaugcagugggauuuucggggacaauccacgcccuaaugauaagacaggcaguugugguccaguaucgucuaauggagcaaauggaguaaaaggguuuucauucaaauacggcaaugguguuuggauagggagaacuaaaagcauuaguucaagaaacgguuuugagaugauuugggauccgaacggauggacugggacagacaauaacuucucaauaaagcaagauaucguaggaauaaaugaauggucaggauauagcgggaguuuuguucagcauccagaacuaacagggcuggauuguauaagaccuugcuucuggguugaacuaaucagagggcgacccaaagagaacacaaucuggacuggcgggagcagcauauccuuuugugguguaaacagugacacuguggguuggucuuggccagacggugcugaguugccauuuaccauugacaaguaa

SEQ ID NO: 55169 - RNA, 1410 nt, Artificial Sequence
  derived and/or modified CDS sequence (wt) from neuraminidase__InfluenzaA__AFQ55691
augaauccaaaucagaagauaauaacaaucgggguagugaauaccacucugucaacaauagcccuucucauuggagugggaaacuuagucuucaacacagucauacaugagaaaauuggagaucaccaaacagugacccauccaacaacaacgaccccugcgauaccgaacugcagcgacacuauaauaacauacaauaacacuauaauaaacaacauaacaacaacgauaauaacugaagcagaaaggccuuucaagucuccacuaccgcugugccccuucagaggauucuucccuuuucacaaggacaaugcaauacgacugggugagaacaaagacgucauagucacaagggagcccuacgucagcugugauaaugacaacugcugguccuuugcucucgcacaaggggcauugcuagggacuaaacauagcaauggaaccauuaaagacagaacaccauaucggucccuaauucguuucccaauaggaacagcuccaguacuagggaauuauaaggaaauaugcauugcuuggucgagcaguaguugcuuugacgggaaagaguggaugcaugugugcaugacagggaaugauaaugaugcaagugcccagauaauauaugcagggaaaaugacagacuccauuaaaucauggagaaaggacauacuaaggacccaggagucugaaugccagugcauugacgggacuuguguuguugcugucacagacggcccugcugcuaguagugcagaccacaggauuuacuggauacgggaggggaaaauaauaaaguaugaagauguucccaagacaaagauacaacacuuagaagaauguuccugcuauguggacguugauguuuacuguauauguagggacaauuggaaggguuccaauaggccuuggaugagaaucaacaacgagacuauacuggaaacaggguaugugugcaguaaauuucacucagacacucccaggccagccgacccuucuacagugucaugugacuccccaagcaaugucaauggaggacccggaguaaagggguuugguuucaaagccggcaaugauguaugguuagggagaacagugucaacuagugguagaucaggcuuugaaauuaucaaaguuacagagggguggaucaacucucccaaucaugccaaaucaauuacacaaacacugauguccaacaaugacuggucgggcuacucaggcagcuucauuaucaaaaccaaggacuguuuucagcccugcuuuuauguugagcucauacgagggaggcccaacaagaaugaugaugucucuuggacaagcaauaguauaguuacuuucuguggguuagacaaugaaccuggaucgggaaauuggccggaugguucuaacauuggguuuaugcccaaguaa

SEQ ID NO: 55170 - RNA, 1410 nt, Artificial Sequence
  derived and/or modified CDS sequence (wt) from neuraminidase__InfluenzaA__AFR68156
augaauccaaaccaaaagauaauaaccauugguucggucuguaugacaauuggaauggcuaacuuaauauuacaaauuggaaacauaaucucaauauggauuagccacucaauucaacuuaggaaucaaagucagauugaaacaugcaaucaaagcgucauuacuuaugaaaacaacacuuggguaaaucagacauauguuaacaucagcaacaccaacuuugcugcuggacagucagugguuuccgugaaauuagcgggcaauuccucucucugcccuguuaguggaugggcuauauacaguaaagacaacaguauaagaaucgguuccaagggggauguguuugucauaagggaaccauucauaucaugcucccccuuggaaugcagaaccuucuucuugacccaaggggccuugcuaaaugacaaacauuccaauggaaccauuaaagacaggagcccauaucgaacccuaaugagcuguccuauuggugaaguucccucuccauacaacucaagauuugagucagucgcuuggucagcaagugcuugucaugauggcaucaauuggcuaacaauuggaauuucuggcccagacaauggggcaguggcuguguuaaaguacaauggcauaauaacagacacuaucaagaguuggagaaauaauauauugagaacacaagaaucugaaugugcauguguaaaugguucuugcuuuaccauaaugaccgauggaccaagugauggacaggccucauacaagaucuucagaauagaaaagggaaagauagucaaaucagucgaaaugaaugccccuaauuaucacuaugaggaaugcuccuguuauccugauucuagugaaaucacaugugugugcagggauaacuggcauggcucgaaucgaccguggguuucuuucaaccagaaucuggaauaucagauaggauacauaugcagugggauuuucggagacaauccacgcccuaaugauaagacaggcaguugugguccaguaucgucuaauggagcaaauggaguaaaaggauuuucauucaaauacggcaaugguguuuggauagggagaacuaaaagcauuaguucaagaaaagguuuugagaugauuugggauccaaacggauggacugggacagacaauaacuucucaauaaagcaagauaucguaggaauaaaugaguggucaggauacagcgggaguuuuguucagcauccagaacuaacagggcuggauuguauaagaccuugcuucuggguugaacuaaucagaggacgacccaaagagaacacaaucuggacuagcgggagcagcauauccuuuugugguguaaacagugacacuguggguuggucuuggccagacggugcugaguugccauuuaccauugacaaguaa

SEQ ID NO: 55171 - RNA, 1410 nt, Artificial Sequence
  derived and/or modified CDS sequence (wt) from neuraminidase__InfluenzaA__AFR68166
augaauccaaaccaaaagauaauaaccauugguucggucuguaugacaauuggaauggcuaacuuaauauuacaaauuggaaacauaaucucaauauggauuagccacucaauucaacuuaggaaucaaagucagauugaaacaugcaaucaaagcgucauuacuuaugaaaacaacacuuggguaaaucagacauauguuaacaucagcaacaccaacuuugcugcuggacagucagugguuuccgugaaauuagcgggcaauuccucucucugcccuguuaguggaugggcuauauacaguaaagacaacaguauaagaaucgguuccaagggggauguguuugucauaagggaaccauucauaucaugcucccccuuggaaugcagaaccuucuucuugacccaaggggccuugcuaaaugacaaacauuccaauggaaccauuaaagacaggagcccauaucgaacccuaaugagcuguccuauuggugaaguucccucuccauacaacucaagauuugagucagucgcuuggucagcaagugcuugucaugauggcaucaauuggcuaacaauuggaauuucuggcccagacaauggggcaguggcuguguuaaaguacaacggcauaauaacagacacuaucaagaguuggagaaauaauauauugagaacacaagaaucugaaugugcauguguaaaugguucuugcuuuaccauaaugaccgauggaccaagugauggacaggccucauacaagaucuucagaauagaaaagggaaagauagucaaaucagucgaaaugaaugccccuaauuaucacuaugaggaaugcuccuguuauccugauucuagugaaaucacaugugugugcagggauaacuggcauggcucgaaucgaccgugggugucuuucaaccagaaucuggaauaucagauaggauacauaugcagugggauuuucggagacaauccacgcccuaaugauaagacaggcaguugugguccaguaucgucuaauggagcaaauggaguaaaaggauuuucauucaaauacggcaaugguguuuggauagggagaacuaaaagcauuaguucaagaaaagguuuugagaugauuugggauccaaacggauggacugggacagacaauaacuucucaauaaagcaagauaucguaggaauaaaugaguggucaggauacagcgggaguuuuguucagcauccagaacuaacagggcuggauuguauaagaccuugcuucuggguugaacuaaucagaggacgacccaaagagaacacaaucuggacuagcgggagcagcauauccuuuugugguguaaacagugacacuguggguuggucuuggccagacggugcugaguugccauuuaccauugacaaguaa

SEQ ID NO: 55172 - RNA, 1410 nt, Artificial Sequence
  derived and/or modified CDS sequence (wt) from neuraminidase__InfluenzaA__AFR68176
augaacccaaaucaaaagauaauaacgauuggcucuguuucucucaccauuuccacaauaugcuucuucaugcaaauugccaucuugauaacuacuguaacauugcauuucaagcaauaugaauucaacucccccccaaacaaccaagugaugcugugugaaccaacaauaauagaaagaaacauaacagagauaguguaucugaccaacaccaccauagagaaggaaauaugccccaaacuagcagaauacagaaauuggucaaagccgcaaugugacauuacaggauuugcaccuuuuucuaaggacaauucgauuaggcuuuccgcugguggggacaucugggugacaagagaaccuuaugugucaugcgauccugacaaguguuaucaauuugcccuuggacagggaacaacacuaaacaacgugcauucaaauaacacaguacgugauaggaccccuuaucggacccuauugaugaaugaguuagguguuccuuuucaucuggggaccaagcaagugugcauagcaugguccagcucaaguugucacgauggaaaagcauggcugcauguuuguauaacgggggaugauaaaaaugcaacugcuagcuucauuuacaaugggaggcuuguagauaguguugcuucaugguccaaagacauccucaggacccaggagucagaaugcguuuguaucaauggaacuugugcgguaguaaugacugaugggagugcuucaggaaaagcugauacuaaaauacuauucauuaaggaggggaaaaucguucauacuagcacauugucaggaagugcucagcaugucgaggagugcucuugcuauccucgauauccuggugucagaugugucugcagagacaacuggaaaggcuccaauaggcccaucguagauauaaacauaaaggaucauagcauuguuuccaguuauguguguucaggacuuguuggagacacacccagaaaaaacgacagcuccagcaguggccauuguuuggauccuaacaaugaagaagguggucauggaguaaaaggcugggccuuugaugauggaaaugacguguggaugggaagaacgaucaacgagacgucacgcuuaggguaugaaaccuucaaagucauugaaggcugguccaacccgaaguccaaauugcagauaaauaggcaagucauaguugacagagguaauagguccgguuauucugguauuuucucuguugaaggcaagaacugcaucaaucggugcuuuuauguggaguugauuaggggaagaaaagaggaaacugaagucuuguggaccucaaacaguauuguuguguuuuguggcaccucagguacauauggaacaggcucauggccugauggggcggaccucaaucucaugccuauauaa

SEQ ID NO: 55173 - RNA, 1410 nt, Artificial Sequence; identical to SEQ ID NO: 48750
  derived and/or modified CDS sequence (wt) from neuraminidase__InfluenzaA__AFR84677

SEQ ID NO: 55174 - RNA, 1410 nt, Artificial Sequence; identical to SEQ ID NO: 53327
  derived and/or modified CDS sequence (wt) from neuraminidase__InfluenzaA__AFR84687

SEQ ID NO: 55175 - RNA, 1410 nt, Artificial Sequence; identical to SEQ ID NO: 48749
  derived and/or modified CDS sequence (wt) from neuraminidase__InfluenzaA__AFR84696

SEQ ID NO: 55176 - RNA, 1410 nt, Artificial Sequence; identical to SEQ ID NO: 49070
  derived and/or modified CDS sequence (wt) from neuraminidase__InfluenzaA__AFR84706

SEQ ID NO: 55177 - RNA, 1410 nt, Artificial Sequence; identical to SEQ ID NO: 48749
  derived and/or modified CDS sequence (wt) from neuraminidase__InfluenzaA__AFR84716

SEQ ID NO: 55178 - RNA, 1410 nt, Artificial Sequence; identical to SEQ ID NO: 48749
  derived and/or modified CDS sequence (wt) from neuraminidase__InfluenzaA__AFR84726

SEQ ID NO: 55179 - RNA, 1410 nt, Artificial Sequence; identical to SEQ ID NO: 48749
  derived and/or modified CDS sequence (wt) from neuraminidase__InfluenzaA__AFR84736

SEQ ID NO: 55180 - RNA, 1410 nt, Artificial Sequence; identical to SEQ ID NO: 48749
  derived and/or modified CDS sequence (wt) from neuraminidase__InfluenzaA__AFR84746

SEQ ID NO: 55181 - RNA, 1410 nt, Artificial Sequence; identical to SEQ ID NO: 48749
  derived and/or modified CDS sequence (wt) from neuraminidase__InfluenzaA__AFR84756

SEQ ID NO: 55182 - RNA, 1410 nt, Artificial Sequence; identical to SEQ ID NO: 48749
  derived and/or modified CDS sequence (wt) from neuraminidase__InfluenzaA__AFR84766

SEQ ID NO: 55183 - RNA, 1410 nt, Artificial Sequence; identical to SEQ ID NO: 48749
  derived and/or modified CDS sequence (wt) from neuraminidase__InfluenzaA__AFR84776

SEQ ID NO: 55184 - RNA, 1410 nt, Artificial Sequence; identical to SEQ ID NO: 48749
  derived and/or modified CDS sequence (wt) from neuraminidase__InfluenzaA__AFR84786

SEQ ID NO: 55185 - RNA, 1410 nt, Artificial Sequence; identical to SEQ ID NO: 48749
  derived and/or modified CDS sequence (wt) from neuraminidase__InfluenzaA__AFR84796

SEQ ID NO: 55186 - RNA, 1410 nt, Artificial Sequence; identical to SEQ ID NO: 48750
  derived and/or modified CDS sequence (wt) from neuraminidase__InfluenzaA__AFR84806

SEQ ID NO: 55187 - RNA, 1410 nt, Artificial Sequence; identical to SEQ ID NO: 48749
  derived and/or modified CDS sequence (wt) from neuraminidase__InfluenzaA__AFR84816

SEQ ID NO: 55188 - RNA, 1410 nt, Artificial Sequence; identical to SEQ ID NO: 48750
  derived and/or modified CDS sequence (wt) from neuraminidase__InfluenzaA__AFR84826

SEQ ID NO: 55189 - RNA, 1410 nt, Artificial Sequence
  derived and/or modified CDS sequence (wt) from neuraminidase__InfluenzaA__AFR84836
augaauccaaaccaaaagauaauaaccauugguucggucuguaugacaauuggaauggcuaacuuaauauuacaaauuggaaacauaaucucaauauggauuagccacucaauucaacuugggaaucaaaaucagauugaaacaugcaaucaaagcgucauuacuuaugaaaacaacacuuggguaaaucagacauauguuaacaucagcaacaccaacuuugcugcuggacagucagugguuuccgugaaauuagcgggcaauuccucucucugcccuguugguggaugggcuauauacaguaaagacaacaguguaagaaucgguuccaagggggauguguuugucauaagggaaccauucauaucaugcucccccuuggaaugcagaaccuucuucuugacucaaggggccuugcuaaaugacaaacauuccaauggaaccauuaaagacaggagcccauaucgaacccuaaugagcuguccuauuggugaaguucccucuccauacaacucaagauuugagucagucgcuuggucagcaagugcuugucaugauggcaucaauuggcuaacaauuggaauuucuggcccagacaauggggcaguggcuguguuaaaguacaacggcauaauaacagacacuaucaagaguuggagaaacaauauauugagaacacaagagucugaaugugcauguguaaaugguucuugcuuuacuguaaugaccgauggaccaaguaauggacaggccucauacaagaucuucagaauagaaaagggaaagauagucaaaucagucgaaaugaaugccccuaauuaucacuaugaggaaugcuccuguuauccugauucuagugaaaucacaugugugugcagggauaacuggcauggcucgaaucgaccgugggugucuuucaaccagaaucuggaauaucagauaggauacauaugcagugggauuuucggagacaauccacgcccuaaugauaagacaggcaguugugguccaguaucgucuaauggagcaaauggaguaaaaggauuuucauucaaauacggcaaugguguuuggauagggagaacuaaaagcauuaguucaagaaacgguuuugagaugauuugggauccgaacggauggacugagacagacaauaacuucucaauaaagcaagauaucguaggaauaaaugaguggucaggauauagcgggaguuuuguucagcauccagaacuaacagggcuggauuguauaagaccuugcuucuggguugaacuaaucagagggcgacccaaagagaacacaaucuggacuagcgggagcagcauauccuuuugugguguaaacagugacacuguggguuggucuuggccagacggugcugaguugccauuuaccauugacaaguaa

SEQ ID NO: 55190 - RNA, 1410 nt, Artificial Sequence; identical to SEQ ID NO: 53372
  derived and/or modified CDS sequence (wt) from neuraminidase__InfluenzaA__AFR84846

SEQ ID NO: 55191 - RNA, 1410 nt, Artificial Sequence; identical to SEQ ID NO: 48750
  derived and/or modified CDS sequence (wt) from neuraminidase__InfluenzaA__AFR84856

SEQ ID NO: 55192 - RNA, 1410 nt, Artificial Sequence
  derived and/or modified CDS sequence (wt) from neuraminidase__InfluenzaA__AFR84866
augaauccaaaccaaaagauaauaaccauugguucggucuguaugacaauuggaauggcuaacuuaauauuacaaauuggaaacauaaucucaauauggauuagccacucaauucaacuugggaaucaaaaucagauugaaacaugcaaucaaagcgucauuacuuaugaaaacaacacuuggguaaaucagacauauguuaacaucagcaacaccaacuuugcugcuggacagucagugguuuccgugaaauuagcgggcaauuccucucucugcccuguuaguggaugggcuauauacaguaaagacaacaguauaagaaucgguuccaagggggauguguuugucauaagggaaccauucauaucaugcucccccuuggaaugcagaaccuucuucuugacucaaggggccuugcuaaaugacaaacauuccaauggaaccauuaaagacaggagcccauuucgaacccuaaugagcuguccuauuggugaaguucccucuccauacaacucaagauuugagucagucgcuuggucagcaagugcuugucaugauggcaucaauuggcuaacaauuggaauuucuggcccagacaauggggcaguggcuguguuaaaguacaacggcauaauaacagacacuaucaagaguuggagaaacaauauauugagaacacaagagucugaaugugcauguguaaaugguucuugcuuuacuguaaugaccgauggaccaagugauggacaggccucauacaagaucuucagaauagaaaagggaaagauagucaaaucagucgaaaugaaugccccuaauuaucacuaugaggaaugcuccuguuauccugauucuagugaaaucacaugugugugcagggauaacuggcauggcucgaaucgaccgugggugucuuucaaccagaaucuggaauaucagauaggauacauaugcagugggauuuucggagacaauccacgcccuaaugauaagacaggcaguugugguccaguaucgucuaauggagcaaauggaguaaaaggauuuucauucaaauacggcaaugguguuuggauagggagaacuaaaagcauuaguucaagaaacgguuuugagaugauuugggauccgaacggauggacugggacagacaauaacuucucaauaaagcaagauaucguaggaauaaaugaguggucaggauauagcgggaguuuuguucagcauccagaacuaacagggcuggauuguauaagaccuugcuucuggguugaacuaaucagagggcgacccaaagagaacacaaucuggacuagcgggagcagcauauccuuuugugguguaaacagugacacuguggguuggucuuggccagacggugcugaguugccauuuaccauugacaaguaa

SEQ ID NO: 55193 - RNA, 1410 nt, Artificial Sequence; identical to SEQ ID NO: 49647
  derived and/or modified CDS sequence (wt) from neuraminidase__InfluenzaA__AFR84876

SEQ ID NO: 55194 - RNA, 1410 nt, Artificial Sequence; identical to SEQ ID NO: 53372
  derived and/or modified CDS sequence (wt) from neuraminidase__InfluenzaA__AFR84895

SEQ ID NO: 55195 - RNA, 1410 nt, Artificial Sequence; identical to SEQ ID NO: 53372
  derived and/or modified CDS sequence (wt) from neuraminidase__InfluenzaA__AFR84905

SEQ ID NO: 55196 - RNA, 1410 nt, Artificial Sequence; identical to SEQ ID NO: 53372
  derived and/or modified CDS sequence (wt) from neuraminidase__InfluenzaA__AFR84915

SEQ ID NO: 55197 - RNA, 1410 nt, Artificial Sequence; identical to SEQ ID NO: 53372
  derived and/or modified CDS sequence (wt) from neuraminidase__InfluenzaA__AFR84925

SEQ ID NO: 55198 - RNA, 1353 nt, Artificial Sequence
  derived and/or modified CDS sequence (wt) from neuraminidase__InfluenzaA__AFU83119
augaauccaaaucagaagauaauaacaaucggcucugucucucuaaccauugcaacaguguguuuccucaugcagauugccauccuagcaacgacuguaacgcugcacuucaagcaaaaugaaugcaguauccccucgagcaaucaaguggugccaugugagccaaucauaguagaaagaaacguaacagaauacagggauuggucgaaaccgcagugccagauuacaggguuugcuccuuuuuccaaggacaacucaauccggcuuucugcugguggggacaucuggguaacaagggaaccuuaugugucgugcagccccgauaaauguuaucaauucgcacuugggcagggaacaacgcuggacaacaaacacucaaauggcacaauacaugauaggauuccucaccggacccuuuugaugaacgaguuggguguuccguuucauuuggggacuaaacaggucugcauagcgugguccagcucaagcugccacgauggaagagcaugguugcacguuuguguuacuggggacgauaggaaugcaacugcuaguuucauuuaugauggggugcuuguugacaguauugguucauggucucaaaacauucucagaacucaggagucagaaugcgucuguauuaauggaacuuguacaguaguaaugacugauggaagugcaucaggaagggcugauaccagaauauuguucauuaaagaggggaaaauuguccaugucagcccauuaucaggaagugcucaacauauagaggaauguuccuguuauccccguuauccagacguuagaugugucuguagagacaauuggaaagguucaaauaggcccauuauagauauaaguauggcagauuauggcauugauucuaguuaugugugcucggggcuuguuggagacacaccaagaaacgaugauaguucuagcaacagcaacugcaaggauccuaauaacgagagaggaaauccaggagugaaagggugggcuuuugacuauggaaaugauguuuggaugggaagaacaaucagcaaggauucacgcucagguuaugagacuuucagagucauuggcgguuggaccauagcuaauuccaaaucucagguaaacaggcaagucauaguugacaauaauaacuggucugguuauucuggcaucuucucuguugaaggcaaaagcugcaucaauagguguuuuuauguugaguugauaagaggaaggccacaagagacuagagugugguggaccucaaacaguauuguugcauuuuguggcacuucagguacuuauggaacaggcucauggccugauggagcgaacaucaauuucaugccuauauaa

SEQ ID NO: 55199 - RNA, 1410 nt, Artificial Sequence
  derived and/or modified CDS sequence (wt) from neuraminidase__InfluenzaA__AFV53208
augaauccaaaucaaaagauaauaacaauuggcucugucucucucaccauugcaacaguaugcuuccucauucagauugccauccugguaacuacuguaacauugcauuuuaagcaacaugagugcgacucccccgcgagcaaccaaguaaugccgugugaaccaauaauaauagaaaggaacauaacagagauaguguauuugaauaacaccaccauagagaaagagauaugccccaaaguaguggaauacagaaauuggucaaagccgcaaugucaaauuacaggauuugcaccuuuuucuaaggacaauucaauccggcuuucugcugguggggacauuugggugacgagggaaccuuaugugucaugcgauccuggcaaguguuaucaauuugcacucgggcaagggaccacacuagacaacaaacauucaaaugacacaauacaugauagaaucccucaucgaacccuauuaaugaaugaguuggguguuccauuucauuuaggaaccaggcaaguguguauagcaugguccagcucaaguugucacgauggaaaagcauggcugcauguuuguaucacuggggaugauaaaaaugcaacugcuagcuucauuuaugacgggaggcuuauggacaguauugguucauggucucaaaauauccucagaacccaggagucggaaugcguuuguaucaaugggacuugcacaguaguaaugacugauggaagugcuucaggaagagccgauacuagaauacuauucauugaagaggggaaaauuguccauauuagcccauugucaggaagugcucagcauguagaggaguguuccuguuauccucgauauccuggcgucagauguaucugcagagacaacuggaaaggcucuaauaggcccgucauagacauaaauauggaagauuauagcauugauuccaguuaugugugcucagggcuuguuggcgacacaccuagaaacgacgacagaucuagcaauagcaauugcaggaauccuaacaaugagagagggaaucaaggagugaaaggcugggccuuugacaauggagaugacguguggaugggaagaacgaucagcaaggauuuacgcucagguuaugaaacuuucaaagucauuggugguugguccacaccuaauuccaaaucgcagaucaauaggcaagucauaguugacagcgauaaucggucagguuacucugguauuuucucuguugagggcaaaagcugcaucaauaggugcuuuuauguggaguugauaaggggaaggaaacaggagacuagaguaugguggaccucaaacaguauuguuguguuuuguggcacuucagguaccuauggaacaggcucauggccugauggggcgaacaucaauuucaugccuauauaa

SEQ ID NO: 55200 - RNA, 1410 nt, Artificial Sequence
  derived and/or modified CDS sequence (wt) from neuraminidase__InfluenzaA__AFV53219
augaauccaaaucaaaagacaauaacaauuggcucugucucucucaccauugcaacaguaugcuuccucaugcagauugccauccuggcaacuacugugacauugcauuuuaaacaacaugagugcgacucccccgcgagcaaccaaguaaugccaugugaaccaauaauaauagaaaggaacauaacagagauaguguauuugaauaacaccaccauagagaaagagauuugccccgaaguaguggaauacagaaauuggucaaagccgcaaugucaaauuacaggauuugcaccuuuuucuaaggacaauucaauccggcuuucugcugguggggacauuugggugacgagagaaccuuaugugucaugcgacccuggcaaguguuaucaauuugcacucgggcaggggaccacacuagacaacaaacauucaaauggcacaauacaugauagaaucccucaccgaacccuauuaaugaaugaguuggguguuccauuucauuuaggaaccaaacaaguguguguagcaugguccagcucaaguugucacgauggaaaagcaugguugcauguuugugucacuggggaugauagaaaugcgacugcuagcuucauuuaugacgggaggcuuguggacaguauugguucauggucucaaaauauccucaggacccaggagucggaaugcguuuguaucaaugggacuugcacaguaguaaugacugauggaagugcaucaggaagagccgauacuagaauacuauucauuaaagaggggaaaauuguccauauuagcccauugucaggaagugcucagcauauagaggaguguuccuguuacccucgauauccugacguaagauguaucugcagagacaacuggaaaggcucuaauaggcccguuauagacauaaauauggaagauuauagcauugauuccaguuaugugugcucagggcuuguuggcgacacacccaggaacgacgacagcucuagcaauagcaauugcagggauccuaacaaugaaagagggaauccaggagugaaaggcugggccuuugacaauggagaugauguauggaugggaagaacaaucaacaaagaaucacgcucagguuaugaaacuuucaaagucauuggugguugguccacaccuaauuccaaaucgcaggucaauagacaggucauaguugacaacaauaauuggucugguuacucugguauuuucucuguugagggcaaaagcugcaucaauaggugcuuuuauguggaguugauaaggggaaggccacaggagacuagaguaugguggaccucaaacaguauuguuguguuuuguggcacuucagguacuuauggaacaggcucauggccugauggggcgaacaucaauuucaugccuauauaa

SEQ ID NO: 55201 - RNA, 1410 nt, Artificial Sequence
  derived and/or modified CDS sequence (wt) from neuraminidase__InfluenzaA__AFV53230
augaauccaaaucaaaagauaauaacaauuggcucugucucucucaccauugcaacaguaugcuuccucaugcagauugccauccugguaacuacuguaacauugcauuucaagcaacaugagugcgacucccccgcgagcaaccaaguaaugccgugugaaccaauaauaauagaaaggaacauaacagagauaguguauuugaauaacaccaccauagagaaagagauaugccccaaaguaguggaauacagaaauuggucaaagccgcaauguaaaauuacaggauuugcaccuuuuucuaaggacaauucaauccggcuuucugcugguggggacauuugggugacgagagaaccuuaugugucaugcgauccuggcaaguguuaucaauuugcacucgggcaggggaccacacuagacaacaaacauucaaaugacacaauacaugauagaaucccucaucgaacccuauugaugaaugaguuggguguuccauuucauuuaggaaccaggcaaguguguauagcaugguccagcucaaguugucacgauggaaaagcauggcugcauguuugugucacuggggaugauaaaaaugcaacugcuagcuucauuuaugacgggaggcuuguggacaguauugguucauggucucaaaauauccucaggacccaggagucggaaugcguuuguaucaaugggacuuguacaguaguaaugacugauggaagugcuucaggaagagccgauacuaaaauacuauucauugaagaggggaaaauuguccauauuagcccauugucaggaagugcucagcauguagaggaguguuccuguuauccucgauacccugacgucagauguaucugcagagacaacuggaaaggcuccaauaggcccgucguagacauaaguauggaagauuauagcauugauuccaguuaugugugcucagggcuuguuggcgacacaccuagaaacgacgacagaucuagcaauagcaauugcaggaauccuaacaaugagagagggaaucaaggagugaaaggcugggccuuugacaauggagaugacguguggaugggaagaacgaucagcaaggauuuacgcucagguuaugaaacuuucaaagucauuggugguugguccacaccuaauuccaaaucgcagaucaauaggcaagucauaguugacagcgauaauaggucagguuauucugguauuuucucuguugagggcaaaagcugcaucaauaggugcuuuuauguggaguugauaaggggaaggaaacaggagacuagaguaugguggaccucaaacaguauuguuguguuuuguggcacuucagguaccuaugggacaggcucauggccugauggggcgaacaucaaucucaugccuauauaa

SEQ ID NO: 55202 - RNA, 1410 nt, Artificial Sequence
  derived and/or modified CDS sequence (wt) from neuraminidase__InfluenzaA__AFV53241
augaauccaaaucaaaagauaauaacaauuggcucugucucucucaccauugcaacaguaugcuuccucaugcagauugccauccugguaacuacuguaacauugcauuuuaagcaacaugagugcgacucccccgcgagcaaccaaguaaugccgugugaaccaauaauaauagaaaggaacauaacagagauaguguauuugaauaacaccaccauagagaaagagaucugccccgaaguaguggaauacagaaauuggucaaagccgcaaugucaaauuacaggauuugcaccuuuuucuaaggacaauucaauccggcuuucugcugguggggacauuugggugacgagagaaccuuaugugucaugcgauccuggcaaguguuaucaauuugcacucgggcaggggaccacacuagacaacaaacauucaaaugacacaauacaugauagaaucccucaucgaacccuauuaaugaaugaguuggguguuccauuucauuuaggaaccaggcaaguguguguagcaugguccagcucaaguugucacgauggaaaagcaugguugcauguuugugucacuggggaugauaaaaaugcaacugcuagcuucauuuaugacgggaggcuuauggacaguauugguucauggucucaaaauauccucaggacccaggagucggaaugcguuuguaucaaugggacuugcacaguaguaaugacugauggaagugcuucaggaagagccgauacuagaauacuauucauugaagaggggaaaauuguccauauuagcccauugucaggaagugcucagcauguagaggaguguuccuguuauccucgauauccugacgucagauguaucugcagagacaacuggaaaggcucuaauaggcccgucauagacauaaauauggaagauuauagcauugauuccaguuaugugugcucagggcuuguuggcgacacacccagaaacgacgacagaucuagcaauaguaauugcaggaauccuaacaaugagagagggaauccaggagugaaaggcugggccuuugacaauggagaugacguguggaugggaagaacgaucagcaaggauuuacgcucagguuaugaaacuuucaaagucauuggugguugguccacaccuaauuccaaaucgcagaucaauagacaggucauaguugacagcaauaauuggucagguuacucugguauuuucucuguugagggcaaaagaugcaucaauaggugcuuuuauguggaguugauaaggggaaggcaacaggagacuagaguaugguggaccucaaacaguauuguuguguuuuguggcacuucagguacuuauggaacaggcucauggccugauggggcgaacaucaauuucaugccuauauaa

SEQ ID NO: 55203 - RNA, 1410 nt, Artificial Sequence
  derived and/or modified CDS sequence (wt) from neuraminidase__InfluenzaA__AFV53252
augaauccaaaucaaaagauaauaacaauuggcucugucucucucaccauugcaacaguaugcuuccucaugcagauugccauccugguaacuacuguaacauugcauuuuaagcaacaugagugcgacucccccgcgagcaaccaaguaaugccgugugaaccaauaauaauagaaaggaacauaacagagauaguguauuugaauaacaccaccauagagaaagagauaugccccaaaguagugggauacagaaauuggucaaagccgcaaugucaaauuacaggauuugcaccuuuuucuaaggacaauucaauccggcuuucugcugguggggacauuugggugacgagagaaccuuaugugucaugcgauccuggcaaguguuaucaauuugcacucgggcagggaaccacacuagacaacaaacauucaaaugacacaauacaugauagaaucccucaucgaacccuauuaaugaaugaguuggguguuccauuucaucuaggaaccaggcaaguguguauagcaugguccagcucaaguugucacgauggaaaagcauggcugcauguuuguaucacuggggaugauaaaaaugcaacugcuagcuucauuuaugacgggaggcuuguggacaguauugguucauggucucaaaauauccucagaacccaggagucggaaugcguuuguaucaaugggacuugcacaguaguaaugacugauggaagugcuucaggaagagccgauacuagaauacuauucauugaagaggggaaaauuguccauauuagcccauugucaggaagugcucagcauguagaggaguguuccuguuauccucgauauccgggcguaagauguaucugcagagacaacuggaaaggcucuaauaggcccgucguagacauaaauauggaagauuauagcauugauuccaguuaugugugcucagggcuuguuggcgacacaccuagaaacgacgacagaucuagcaauagcaauugcaggaauccuaacaaugagagagggaaucaaggagugaaaggcugggccuuugacaauggagaugacguguggaugggaagaacgaucagcaaggauuuacgcucagguuaugaaacuuucaaagucauuggugguugguccacaccuaauuccaaaucucagaucaauagacaagucauaguugacagcgauaaucggucagguuacuccgguauuuucucuguugagggcaaaagcugcaucaauaggugcuuuuauguggaguugauaaggggaaggaaacaggaaacuagaguaugguggaccucaaacaguauuguuguguuuuguggcacuucagguaccuauggaacaggcucauggccugauggggcgaacaucaauuucaugccuauauaa

SEQ ID NO: 55204 - RNA, 1413 nt, Artificial Sequence
  derived and/or modified CDS sequence (wt) from neuraminidase__InfluenzaA__AFV53263
augaacccaaaucagaaaauaauaaccauuggaucaaucuguauggcaaucggaacaaucagucuaauacugcaaauagggaauauuaucucaauauggauuagccacucaauucaaacuggaagucaaaaccauacuggaauaugcaaccaaagaaucauuaccuaugaaaauaauaccuggguaaaucaaaccuauguuaauauuagcaacacuaacguuguugcuggaaaggacacaacuucaaugauauuagccggcaauucaucucuuuguccuauccgugggugggcuauauacagcaaggacaacagcauaagaauugguuccaaaggagauguuuuugucauaagagaaccuuuuauaucaugcucucacuuggaaugcagaaccuuuuuucugacccaaggcgcucuguuaaaugacaagcauucaaaugggaccguuaaggacagaagcccuuauagggccuuaaugagcuguccuauuggugaagcuccgucuccguacaauucaagauuugaaucgguugcuuggucagcgagugcaugucaugauggcaugggcuggcuaacaaucggaauuucugguccagaugauggagcaguggcuguauuaaaauacaacggcauaauaacugaaaucauaaaaaguuggaggaaacaaauauuaagaacacaagagucugaaugugucuguguaaacgguucauguuuuaccauaaugaccgaugguccgaguaauaggccggccucguacagaaucuucaaaaucgagaaggggaagauuacuaaaucaauagaguuggaugcaccuaauucucauuacgaggaauguuccuguuacccagacaccggcaaagugaugugugugugcagagacaauuggcaugguucgaaucgaccgugggugucuuuuaaccaaaaccuggauuaucaaauaggauacaucugcagugggguuuucggugacaauccgcgucccaaagauggaaagggcagcugugauccaguaaauguugauggagcagacggaguaaagggguuuucauacagguaugguaaugguguuuggauaggaaggacuaaaaguaacaguuccagaaagggguuugagaugauuugggauccuaauggguggacaaauaccgaugguaauuucucagugaaacaggaugugguggcaaugacugauuggucaggguauaguggaaguuucguucaacauccugagcuaacaggauuggacuguauaagaccuugcuucuggguugaauuaaucagaggacgacccagagaagaaacaacuaucuggacuagugggagcagcauuucuuuuuguggcgugaauagugauacuguaaauuggucuuggccagacggugccgaguugccauucaccauugacaaguag

SEQ ID NO: 55205 - RNA, 1410 nt, Artificial Sequence
  derived and/or modified CDS sequence (wt) from neuraminidase__InfluenzaA__AFV53274
augaauccaaaucaaaagauaauaacaauuggcucugucucucucaucauugcaacaguaugcuuccucaugcagauugccauccugguaacuacuguaacauugcauuuuaagcaacaugagugcgacucccccgcgagcaaccaaguaaugccgugugaaccaauaauaauagaaaggaacauaacagagauaguguauuugaauaacaccaccauagagaaagagaucugccccaaaguaguggaauacagaaauuggucaaagccgcaaugucaaauuacaggauuugcaccuuuuucuaaggacaauucaauccggcuuucugcugguggggacauuugggugacgagagaaccuuaugugucaugcgauccuggcaaguguuaucaauuugcacucgggcaggggaccacacuagacaacaaacauucaaaugacacaauacaugauagaaucccucaucgaacccuauuaaugaaugaguuggguguuccauuucauuuaggaaccaggcaaguguguguagcaugguccagcucaaguugucacgauggaaaagcaugguugcauguuugugucacuggggaugauaaaaaugcaacugcuagcuucauuuaugacgggaggcuuguggacaguauugguucauggucucaaaauauccucaggacccaggaaucggaaugcguuuguaucaaugggacuugcacaguaguaaugacugauggaagugcuucaggaagagccgauacuagaauacuauucauugaagaggggaaaauuguccauauuagcccauugucaggaagugcucagcauguagaggaguguuccuguuauccucgauauccugacgucagauguaucugcagagacaacuggaaaggcucuaauaggcccgucauagacauaaauauggaagauuauagcauugauuccaguuaugugugcucagggcuuguuggcgacacacccagaaacgacgacagaucuagcaauaguaauugcaggaauccuaacaaugagagagggaaucccggagugaaaggcugggccuuugacaauggagaugacguguggaugggaagaacgaucagcaaggauuuacgcucagguuaugaaacuuucaaagucauuggugguugguccacaccuaauuccaaaucgcagaucaauagacaggucauaguugacagcaauaauuggucagguuacucugguauuuucucuguugagggcaaaagcugcaucaauaggugcuuuuauguggaguugauaaggggaaggcaacaggagacuagaguaugguggaccucaaacaguauuguuguguuuuguggcacuucagguacuuauggaacaggcucauggccugauggggcgaacaucaauuucaugccuauauaa

SEQ ID NO: 55206 - RNA, 1410 nt, Artificial Sequence
  derived and/or modified CDS sequence (wt) from neuraminidase__InfluenzaA__AFV53285
augaauccaaaucaaaagauaauaacaauuggcucugucucucucaccauugcaacaguaugcuuccucaugcagauugccauccuggcaacuacugugacauugcauuuuaaacaacaugagugcgacucccccgcgagcaaccaaguaaugccaugugaaccaauaauaauagaaaggaacauaacagagauaguguauuugaauaacaccaccauagagaaagagauuugccccgaaguaguggaauacagaaauuggucaaagccgcaaugucaaauuacaggauuugcaccuuuuucuaaggacaauucaauccggcuuucugcugguggggacauuugggugacgagagaaccuuaugugucaugcgauccuggcaaguguuaucaauuugcacucgggcaggggaccacacuagacaacaaacauucaaauggcacaauacaugauagaaucccucaucgaacccuauuaaugaaugaguuggguguuccauuucauuuaggaaccaaacaaguguguguagcaugguccagcucaaguugucacgauggaaaagcaugguugcauguuugugucacuggggaugauagaaaugcgacugcuagcuucauuuaugacgggaggcuuguggacaguauugguucauggucucaaaauauccucaggacccaggagucggaaugcguuuguaucaaugggacuugcacaguaguaaugacugauggaagugcaucaggaagagccgauacuagaauacuauucauuaaagaggggaaaauuguccauauuagcccauugucaggaagugcucagcauauagaggaguguuccuguuacccucgacauccugacgucagauguaucugcagagacaacuggaaaggaucuaauaggcccguuauaaacauaaauauggaagauuauagcauugauuccaguuaugugugcucagggcuuguuggcgacacacccaggaacgacgacagcucuagcaauagcaauugcagggauccuaacaaugagagagggaauccaggagugaaaggcugggccuuugacaauggagaugauguauggaugggaagaacaaucaacaaagauucacgcucagguuaugaaacuuucaaagucauuggugguugguccacaccuaauuccaaaucgcaggucaauagacaggucauaguugacaacaauaauuggucugguuacucugguauuuucucuguugagggcaaaagcugcaucaauaggugcuuuuauguggaguugauaaggggaaggccacaggagacuagaguaugguggaccucaaacaguauuguuguguuuuguggcacuucagguacuuauggaacaggcucauggccugauggggcgaacaucaauuucaugccuauauaa

SEQ ID NO: 55207 - RNA, 1410 nt, Artificial Sequence
  derived and/or modified CDS sequence (wt) from neuraminidase__InfluenzaA__AFV53296
augaauccaaaucaaaagauaauaauaauuggcucugucucucucaccauugcaacaguaugcuuccucaugcagauugccauccugguaacuacuguaacauugcauuuuaagcaacaugagugcgacucccccgcgagcaaccaaguaaugccaugugaaccaauaauaauagaaaggaacauaacagagauaguguauuugaauaacaccaccauagagaaagagaucugccccgaaguaguggaauacagaaauuggucaaagccgcaaugucaaauuacaggauuugcaccuuuuucuaaggacaauucaauccggcuuucugcugguggggacauuugggugacgagagaaccuuaugugucaugcgauccuagcaaguguuaucaauuugcacucgggcaggggaccacacuagacaacaaacauucaaaugacacaauacaugauagaaucccucaucgaacccuauuaaugaaugaguuggguguuccauuucauuuaggaaccaggcaaguguguguagcaugguccagcucaaguugucacgauggaaaagcaugguugcauguuugugucacuggggaugauaaaaaugcaacugcuagcuucauuuaugacgggaggcuuguggacaguauugguucauggucucaaaauauccucaggacccaggagucggaaugcguuuguaucaaugggacuugcacaguaguaaugacugauggaagugcuucaggaagagccgauacuagaauacuauucauugaagaggggaaaauuguccauauuagcccauugucaggaagugcucagcauguagaggaguguuccuguuauccucgauauccugacgucagauguaucugcagagauaacuggaaaggcucuaauaggcccgucauagacauaaauauggaagauuauagcauugauuccaguuaugugugcucagggcuuguuggcgacacacccagaaacgacgauagaucuagcaauagcaauugcagggauccuaacaaugagagagggaauccaggagugaaaggcugggccuuugacaauggagaugacguguggaugggaagaacgaucagcaaggauuuacgcucagguuaugaaacuuucaaagucauuggugguugguccacaccuaauuccaaaucgcagaucaauagacaggucauaguugacagcaauaauuggucagguuacucugguauuuucucuguugagggcaaaagcugcaucaauaggugcuuuuauguggaguugauaaggggaaggcaacaggagacuagaguaugguggaccucaaacaguauuguuguguuuuguggcacuucagguacuuauggaacaggcucauggccugauggggcgaacaucaauuucaugccuauauaa

SEQ ID NO: 55208 - RNA, 1410 nt, Artificial Sequence
  derived and/or modified CDS sequence (wt) from neuraminidase__InfluenzaA__AFV53307
augaauccaaaucaaaagauaauaacaauuggcucugucucucucaccauugcaacaguaugcuuccucaugcagauugccauccuggcaacuacugugacauugcauuuuaaacaacaugagugcgacucccccgcgagcaaccaaguaaugccaugugaaccaauaauaauagaaaggaacauaacagagauaguguauuugaauaacaccaccauagagaaagagauuugccccgaaguaguggaauacagaaauuggucaaagccgcaaugucaaauuacaggauuugcaccuuuuucuaaggacaauucaauccggcuuucugcugguggggacauuugggugacgagagaaccuuaugugucaugcgauccuggcaaguguuaucaauuugcacucgggcaggggaccacacuagacaacaaacauucaaauggcacaauacaugauagaaucccucaucgaacccuauuaaugaaugaguuggguguuccauuucauuuaggaaccaaacaaguguguguagcaugguccagcucaaguugucacgauggaaaagcaugguugcauguuugugucacuggggaugauagaaaugcgacugcuagcuucauuuaugacgggaggcuuguggacaguauugguucauggucucaaaauauccucaggacccaggagucggaaugcguuuguaucaaugggacuugcacaguaguaaugacugauggaagugcaucaggaagagccgauacuagaauacuauucauuaaagaggggaaaauuguccauauuagcccauugucaggaagugcucagcauguagaggaguguuccuguuacccucgauauccugacgucagauguaucugcagagacaacuggaaaggcucuaauaggcccguuauagacauaaauauggaagauuauagcauugauuccaguuaugugugcucagggcuuguuggcgacacacccaggaacgacgacagcucuagcaauagcaauugcagggauccuaacaaugagagagggaauccaggagugaaaggcugggccuuugacaauggagaugauguauggaugggaagaacaaucaacaaagauucacgcucagguuaugaaacuuucaaagucauuggugguugguccacaccuaauuccaaaucgcaggucaauagacaggucauaguugacaacaauaauuggucugguuacucugguauuuucucuguugagggcaaaagcugcaucaauaggugcuuuuauguggaguugauaaggggaaggccacaggagacuagaguaugguggaccucaaacaguauuguuguguuuuguggcacuucagguacuuauggaacaggcucauggccugauggggcgaacaucaauuucaugccuauauaa

SEQ ID NO: 55209 - RNA, 1410 nt, Artificial Sequence
  derived and/or modified CDS sequence (wt) from neuraminidase__InfluenzaA__AFV53317
augaauccaaaucaaaagauaauaacaauuggcucugucucucucaccauugcaacaguaugcuuccucaugcagauugccauccuggcaacuacugugacauugcauuuuaagcaacaugagugcgacucccccgcgagcaaccaaguaaugccaugugaaccaauaauaauagaaaggaacauaacagagauaguguauuugaauaacaccaccauagagaaagagauuugccccgaaguaguggaauacagaaauuggucaaagccgcaaugucaaauuacaggauuugcaccuuuuucuaaggacaauucaauccggcuuucugcugguggggacauuugggugacgagagaaccuuaugugucaugcgauccuggcaaguguuaucaauuugcacucgggcaggggaccacacuagacaacaaacauucaaauggcacaauacaugauagaagcccucaucgaacccuauuaaugaaugaguuggguguuccauuucauuuaggaaccaaacaagugugugcagcaugguccagcucaaguugucacgauggaaaagcaugguugcauguuugugucacuggggaugauagaaaugcaacugcuagcuucauuuaugacgggaggcuuguggacaguauugguucauggucucaaaauauccucaggacccaggagucggaaugcguuuguaucaaugggacuugcacaguaguaaugacugauggaagugcaucaggaagagccgauacuagaauacuauucauuaaagaggggaaaauuguccauauuggcccauugucaggaagugcucagcauauagaggaguguucuuguuacccucgauauccugacgucagauguaucugcagagacaacuggaaaggcucuaauaggcccguuauagacauaaauauggaagauuauagcauugauuccaguuaugugugcucagggcuuguuggcgacacacccaggaacgacgacagcucuagcaauagcaauugcagggauccuaacaaugagagagggaauccaggagugaaaggcugggccuuugacaauggagaugauguauggaugggaagaacaaucagcaaagauuuacgcucagguuaugaaacuuucaaagucauuggugguugguccacaccuaauuccaaaucgcaggucaauagacaggucauaguugacaacaauaauuggucugguuacucugguauuuucucuguugagggcaaaagcugcaucaauaggugcuuuuauguggaguugauaaggggaaggccacaggagacuagaguaugguggaccucaaacaguauuguuguauuuuguggcacuucagguacuuauggaacaggcucauggccugauggggcgaacaucaauuucaugccuauauaa

SEQ ID NO: 55210 - RNA, 1410 nt, Artificial Sequence
  derived and/or modified CDS sequence (wt) from neuraminidase__InfluenzaA__AFV53328
augaauccaaaucaaaagauaauaacaauuggcucugucucucucaccaucgcaacaguaugcuuccucaugcauauugccauccuggcaacuacugugacauugcacuucaagcaacaugagugcgacucccccgcgagcaaccaagcaaugccaugcgaaccaauaauaauagaaaggaacauaacagagauaguguauuugaauaacaccaccauagagaaagagauuugccccgaaguaguagaauacagaaauuggucaaagccgcaaugucaaauuacaggauuugcaccuuuuucuaaggacaauucaauccggcuuucugcugguggggacauuugggugacgagagaaccuuaugugucaugcgauccuggcaaguguuaucaauuugcacucgggcaggggaccacacuagacaacaaacauucaaauggcacaauacaugauagaaucccucaucgaacccuauuaaugaaugaguuggguguuccauuucauuuaggaaccaaacaaguguguguagcaugguccagcucaaguugucacgauggaaaagcaugguugcauguuuguaucacuggggaugauagaaaugcaacugcuagcuucauuuaugacgggaggcuuguggacaguauugguucauggucucaaaauauccucaggacccaggagucggaaugcguuuguaucaaugggacuugcacaguaguaaugacugauggaagugcaucaggaagagccgauacuagaauacuauucauuaaagaggggaaaauuguccauauuagcccauugucaggaagugcucagcauauagaggaguguuccuguuacccucgauauccugacgucagauguaucugcagagacaacuggaaaggcucuaauaggcccguuauagacauaaauauggaagauuauagcauugauuccaguuaugugugcucagggcuuguuggcgacacacccaggaacgacgacagcucuagcaauagcaauugcagggauccuaacaaugagagagggaauccaggagugaaaggcugggccuuugacaauggagaugauguauggaugggaagaacaaucagcaaagauuuacgcucagguuaugaaacuuucaaagucauuggugguugguccacaccuaauuccaaaucgcaggucaauagacaggucauaguugacaacaauaauuggucugguuacucugguauuuucucuguugagggcaaaagcugcaucaauaggugcuuuuauguggaguugauaaggggaaggccacaggagacuagaguaugguggaccucaaacaguauuguuguguuuuguggcacuucagguacuuauggaacaggcucauggccugauggggcgaacaucaauuucaugccuauauaa

SEQ ID NO: 55211 - RNA, 1410 nt, Artificial Sequence
  derived and/or modified CDS sequence (wt) from neuraminidase__InfluenzaA__AFV53339
augaauccaaaucaaaagauaauaacaauuggcucugccucucucaccauugcaacaguaugcuuccucaugcagauugccauccugguaacuacuguaacauugcauuucaagcaacaugagugcgacucccccgcgagcaaccaaguaaugccgugugaaccaauaauaauagaaaggaacauaacagagauaguguauuugaauaacaccaccauagagaaagagauaugccccaaaguaguggaauacagaaauuggucaaagccgcaauguaaaauuacaggauuugcaccuuuuucuaaggacaauucaauccggcuuucugcugguggggacauuugggugacgagagaaccuuaugugucaugcgauccuggcaaguguuaucaauuugcacucgggcaggggaccacacuagacaacaaacauucaaaugacacaauacaugauagaaucccucaucgaacccuauugaugaaugaguuggguguuccauuucauuuaggaaccaggcaaguguguauagcaugguccagcucaaguugucacgauggaaaagcauggcugcauguuugugucacuggggaugauaaaaaugcaacugcuagcuucauuuaugacgggaggcuuguggacaguauugguucauggucucaaaauauccucaggacccaggagucggaaugcguuuguaucaaugggacuuguacaguaguaaugacugauggaagugcuucaggaagagccgauacuagaauacuauucauugaagaggggaaaauuguccauaugagcccauugucaggaagugcucagcauguagaggaguguuccuguuauccucgauauccugacgucagauguaucugcagagacaacuggaaaggcucuaauaggcccgucguagacauaaauauggaagauuauagcauugauuccaguuaugugugcucagggcuuguuggagacacaccuagaaacgacgacagaucuagcaauagcaauugcagaaauccuaacaaugagaaagggaaucaaggagugaaaggcugggccuuugacaauggagaugacguguggaugggaagaacgaucagcaaggauuuacgcucagguuaugaaacuuucaaagucauuggugguugguccacaccuaauuccaaaucgcagaucaauaggcaagucauaguugacagcgauaauaggucagguuauucugguauuuucucuguugagggcaaaagcugcaucaauaggugcuuuuauguggaguugauaaggggaaggaaacaggagacuagaguaugguggaccucaaacaguauuguuguguucuguggcacuucagguaccuaugggacaggcucauggccugauggggcgaacaucaaucucaugccuauauaa

SEQ ID NO: 55212 - RNA, 1410 nt, Artificial Sequence
  derived and/or modified CDS sequence (wt) from neuraminidase__InfluenzaA__AFX96367
augaauccaaaccaaaagauaauaaccauugguucggucuguaugacaauuggaauggcuaacuuaauauuacaaauuggaaacauaaucucaauauggauuagccacucaauucaacuugggaaucaaaaucagauugaaacaugcaaucaaagcgucauuacuuaugaaaacaacacuuggguaaaucagacauauguuaacaucagcaacaccaacuuugcugcuggacagucagugguuuccgugaaauuagcgggcaauuccucucucugcccuguuaguggaugggcuauauacaguaaagacaacaguauaagaaucgguuccaagggggauguguuugucauaagggaaccauucauaucaugcucccccuuggaaugcagaaccuucuucuugacucaaggggccuugcuaaaugacaaacauuccaaugggaccauuaaagacaggagcccauaucgaacccuaaugagcuguccuauuggugaaguucccucuccauacaacucaagauuugagucagucgcuuggucagcaagugcuugucaugauggcaucaauuggcuaacaauuggaauuucuggcccagacaauggggcaguggcuguguuaaaguacaacggcauaauaacagacacuaucaagaguuggagaaacaauauauugagaacacaagagucugaaugugcauguguaaaugguucuugcuuuacuguaaugaccgauggaccaagugauggacaggccucauacaagaucuucagaauagaaaagggaaagauagucaaaucagucgaaaugaaugccccuaauuaucacuaugaggaaugcuccuguuauccugauucuagugaaaucacaugugugugcagggauaacuggcauggcucgaaucgaccgugggugucuuucaaccagaaucuggaauaucagauaggauacauaugcagugggauuuucggagacaacccacgcccuaaugauaagacaggcaguugugguccaguaucgucuaauggagcaaauggaguaaaaggauuuucauucaaauacggcaaugguguuuggauagggagaacuaaaagcauuaguucaagaaacgguuuugagaugauuugggauccgaacggauggacugggacagacaauaacuucucaauaaagcaagauaucguaggaauaaaugaguggucaggauauagcgggaguuuuguucagcauccagaacuaacagggcuggauuguauaagaccuugcuucuggguugaacuaaucagagggcgacccaaagagaacacaaucuggacuagcgggagcagcauauccuuuugugguguaaacagugacacuguggguuggucuuggccagacggugcugaguugccauuuaccauugacaaguaa

SEQ ID NO: 55213 - RNA, 1410 nt, Artificial Sequence
  derived and/or modified CDS sequence (wt) from neuraminidase__InfluenzaA__AFX96386
augaauccaaaccaaaagauaauaaccauugguucggucuguaugacaauuggaauggcuaacuuaauauuacaaauuggaaacauaaucucaauauggauuagccacucaauucaacuugggaaucaaaaucagauugaaacaugcaaucaaagcgucauuacuuaugaaaacaacacuuggguaaaucagacauauguuaacaucagcaacaccaacuuugcugcugggcagucagugguuuccgugaaauuagcgggcaauuccucucucugcccuguuaguggaugggcuauauacaguaaagacaacaguauaagaaucgguuccaagggggauguguuugucauaagggaaccauucauaucaugcucccccuuggaaugcagaaccuucuucuugacucaaggggccuugcuaaaugacaaacauuccaauggaaccauuaaagacaggagcccauaucgaacucuaaugagcuguccuauuggugaaguucccucuccauacaacucaagauuugagucagucgcuuggucagcaagugcuugucaugauggcaucaauuggcuaacaauuggaauuucuggcccagacaauggggcaguggcuguguuaaaguacaacggcauaauaacagacacuaucaagaguuggagaaacaauauauugagaacacaagagucugaaugugcauguguaaaugguucuugcuuuacuguaaugaccgauggaccaagugauggacaggccucauacaagaucuucagaauagaaaagggaaagauagucaaaucagucgaaaugaaugccccuaauuaucacuaugaggaaugcuccuguuauccugauucuagugaaaucacaugugugugcagggauaacuggcauggcucgaaucgaccgugggugucuuucaaccagaaucuggaauaucagauaggauacauaugcagugggauuuucggagacaauccacgcccuaaugauaagacaggcaguugugguccaguaucgucuaauggagcaaauggaguaaaaggauuuucauucaaauacggcaaugguguuuggauagggagaacuaaaagcauuaguucaagaaacgguuuugagaugauuugggauccgaacggauggacuggaacagacaauaacuucucaauaaagcaagauaucguaggaauaaaugaguggucaggauauagcgggaguuuuguucagcauccagaacuaacagggcuggauuguauaagaccuugcuucuggguugaacuaaucagagggcgacccaaagagaacacaaucuggacuagcgggagcagcauauccuuuugugguguaaacagugacacuguggguuggucuuggccagacggugcugaguugccauuuaccauugacaaguaa

SEQ ID NO: 55214 - RNA, 1410 nt, Artificial Sequence
  derived and/or modified CDS sequence (wt) from neuraminidase__InfluenzaA__AFX96401
augaauccaaaccaaaagauaauaaccauugguucggucuguaugacaauuggaauggcuaacuuaauauuacaaauuggaaacauaaucucaauauggauuagccacucaauucaacuugggaaucaaaaucagauugaaacaugcaaucaaagcgucauuacuuaugaaaacaacacuuggguaaaucagacauauguuaacaucagcaacaccaacuuugcugcuggacagucagugguuuccgugaaauuagcgggcaauuccucucucugcccuguuaguggaugggcuauauacaguaaagacaacaguauaagaaucgguuccaagggggauguguuugucauaagggaaccauucauaucaugcucccccuuggaaugcagaaccuucuucuugacucaaggggccuugcuaaaugacaaacauuccaauggaaccauuaaagacaggagcccauaucgaacccuaaugagcuguccuauuggugaaguucccucuccauacaacucaagauuugagucagucgcuuggucagcaagugcuugucaugauggcaucaauuggcuaacaauuggaauuucuggcccagacaauggggcaguggcuguguuaaaguacaacggcauaauaacagacacuaucaaaaguuggagaaacaauauauugagaacacaagagucugaaugugcauguguaaaugguucuugcuuuacuguaaugaccgauggaccaagugauggacaggccucauacaagaucuucagaauagaaaagggaaagauagucaaaucagucgaaaugaaugccccuaauuauuacuaugaggaaugcuccuguuauccugauucuagugaaaucacaugugugugcagggauaacuggcauggcucgaaucgaccgugggugucuuucaaccagaaucuggaauaucagauaggauacauaugcagugggauuuucggagacaauccacgcccuaaugauaagacaggcaguugugguccaguaucgucuaauggagcaaauggaguaaaaggauuuucauucaaauacggcaaugguguuuggauagggagaacuaaaagcauuaguucaagaaacgguuuugagaugauuugggauccgaacggauggacugggacagacaauaacuucucaauaaagcaagauaucguaggaauaaaugaguggucaggauauagcgggaguuuuguucagcauccagaacuaacagggcuggauuguauaagaccuugcuucuggguugaacuaaucagagggcgacccaaagagaacacaaucuggacuagcgggagcagcauauccuuuugugguguaaacagugacacuguggguuggucuuggccagacggugcugaguugccauuuaccauugacaaguaa

SEQ ID NO: 55215 - RNA, 1410 nt, Artificial Sequence; identical to SEQ ID NO: 55214
  derived and/or modified CDS sequence (wt) from neuraminidase__InfluenzaA__AFX96411

SEQ ID NO: 55216 - RNA, 1410 nt, Artificial Sequence; identical to SEQ ID NO: 55214
  derived and/or modified CDS sequence (wt) from neuraminidase__InfluenzaA__AFX96421

SEQ ID NO: 55217 - RNA, 1410 nt, Artificial Sequence; identical to SEQ ID NO: 55214
  derived and/or modified CDS sequence (wt) from neuraminidase__InfluenzaA__AFX96431

SEQ ID NO: 55218 - RNA, 1410 nt, Artificial Sequence; identical to SEQ ID NO: 55214
  derived and/or modified CDS sequence (wt) from neuraminidase__InfluenzaA__AFX96441

SEQ ID NO: 55219 - RNA, 1410 nt, Artificial Sequence; identical to SEQ ID NO: 55214
  derived and/or modified CDS sequence (wt) from neuraminidase__InfluenzaA__AFX96451

SEQ ID NO: 55220 - RNA, 1410 nt, Artificial Sequence; identical to SEQ ID NO: 55214
  derived and/or modified CDS sequence (wt) from neuraminidase__InfluenzaA__AFX96461

SEQ ID NO: 55221 - RNA, 1410 nt, Artificial Sequence; identical to SEQ ID NO: 48750
  derived and/or modified CDS sequence (wt) from neuraminidase__InfluenzaA__AFX96471

SEQ ID NO: 55222 - RNA, 1410 nt, Artificial Sequence; identical to SEQ ID NO: 48750
  derived and/or modified CDS sequence (wt) from neuraminidase__InfluenzaA__AFX96481

SEQ ID NO: 55223 - RNA, 1410 nt, Artificial Sequence; identical to SEQ ID NO: 48750
  derived and/or modified CDS sequence (wt) from neuraminidase__InfluenzaA__AFX96491

SEQ ID NO: 55224 - RNA, 1410 nt, Artificial Sequence; identical to SEQ ID NO: 48750
  derived and/or modified CDS sequence (wt) from neuraminidase__InfluenzaA__AFX96501

SEQ ID NO: 55225 - RNA, 1410 nt, Artificial Sequence; identical to SEQ ID NO: 50011
  derived and/or modified CDS sequence (wt) from neuraminidase__InfluenzaA__AFX96511

SEQ ID NO: 55226 - RNA, 1410 nt, Artificial Sequence
  derived and/or modified CDS sequence (wt) from neuraminidase__InfluenzaA__AFX96521
augaauccaaaccaaaagauaauaaccauugguucggucuguaugacaauuggaauggcuaacuuaauauuacaaauuggaaacauaaucucaauauggauuagccacucaauucaacuugggaaucaaaaucagauugaaacaugcaaucaaagcgucauuacuuaugaaaacaacacuuggguaaaucagacauauguuaacaucagcaacaccaacuuugcugcuaggcagucagugguuuccgugaaauuagcgggcaauuccucucucugcccuguuaguggaugggcuauauacaguaaagacaacaguauaagaaucgguuccaagggggauguguuugucauaagggaaccauucauaucaugcucccccuuggaaugcagaaccuucuucuugacucaaggggccuugcuaaaugacaaacauuccaauggaaccauuaaagacaggagcccauaucgaacucuaaugagcuguccuauuggugaaguucccucuccauacaacucaagauuugagucagucgcuuggucagcaagugcuugucaugauggcaucaauuggcuaacaauuggaauuucuggcccagacaauggggcaguggcuguguuaaaguacaacggcauaauaacagacacuaucaagaguuggagaaacaauauauugagaacacaagagucugaaugugcauguguaaaugguucuugcuuuacuguaaugaccgauggaccaagugauggacaggccucauacaagaucuucagaauagaaaagggaaagauagucaaaucagucgaaaugaaugccccuaauuaucacuaugaggaaugcuccuguuauccugauucuagugaaaucacaugugugugcagggauaacuggcauggcucgaaucgaccgugggugucuuucaaccagaaucuggaauaucagauaggauacauaugcagugggauuuucggagacaauccacgcccuaaugauaagacaggcaguugugguccaguaucgucuaauggagcaaauggaguaaaaggauuuucauucaaauacggcaaugguguuuggauagggagaacuaaaagcauuaguucaagaaacgguuuugagaugauuugggauccgaacggauggacuggaacagacaauaacuucucaauaaagcaagauaucguaggaauaaaugaguggucaggauauagcgggaguuuuguucagcauccagaacuaacagggcuggauuguauaagaccuugcuucuggguugaacuaaucagagggcgacccaaagagaacacaaucuggacuagcgggagcagcauauccuuuugugguguaaacagugacacuguggguuggucuuggccagacggugcugaguugccauuuaccauugacaaguaa

SEQ ID NO: 55227 - RNA, 1410 nt, Artificial Sequence; identical to SEQ ID NO: 48750
  derived and/or modified CDS sequence (wt) from neuraminidase__InfluenzaA__AFX96531

SEQ ID NO: 55228 - RNA, 1410 nt, Artificial Sequence; identical to SEQ ID NO: 55213
  derived and/or modified CDS sequence (wt) from neuraminidase__InfluenzaA__AFX96541

SEQ ID NO: 55229 - RNA, 1410 nt, Artificial Sequence
  derived and/or modified CDS sequence (wt) from neuraminidase__InfluenzaA__AFX96551
augaauccaaaccaaaagauaauaaccauugguucggucuguaugacaauuggaauggcuaacuuaauauuacaaauuggaaacauaaucucaauauggauuagccacucaauucaacuugggaaucaaaaucagauugaaacaugcaaucaaagcgucauuacuuaugaaaacaacacuuggguaaaucagacauauguuaacaucagcaacaccaacuuugcugcugggcagucagugguuuccgugaaauuagcgggcaauuccucucucugcccuguuaguggaugggcuauauacaguaaagacaacaguauaagaaucgguuccaagggggauguguuugucauaagggaaccauucauaucaugcucccccuuggaaugcagaaccuucuucuugacucaaggggccuugcuaaaugacaaacauuccaauggaaccauuaaagacaggagcccauaucgaacucuaaugagcuguccuauuggugaaguucccucuccauacaacucaagauuugagucagucgcuuggucagcaagugcuugucaugauggcaucaauuggcuaacaauuggaauuucuggcccagacaauggggcaguggcuguguuaaaguacaacggcauaauaacagacacuaucaagaguuggagaaacaauauauugagaacacaagagucugaaugugcauguguaaaugguucuugcuuuacuguaaugaccgauggaccaagugauggacaggccucauacaagaucuucagaauagaaaagggaaagauagucaaaucagucgaaaugaaugccccuaauuaucacuaugaggaaugcucuuguuauccugauucuagugaaaucacaugugugugcagggauaacuggcauggcucgaaucgaccgugggugucuuucaaccagaaucuggaauaucagauaggauacauaugcagugggauuuucggagacaauccacgcccuaaugauaagacaggcaguugugguccaguaucgucuaauggagcaaauggaguaaaaggauuuucauucaaauacggcaaugguguuuggauagggagaacuaaaagcauuaguucaagaaacgguuuugagaugauuugggauccgaacggauggacugggacagacaauaacuucucaauaaagcaagauaucguaggaauaaaugaguggucaggauauagcgggaguuuuguucagcauccagaacuaacagggcuggauuguauaagaccuugcuucuggguugaacuaaucagagggcgacccaaagagaacacaaucuggacuagcgggagcagcauauccuuuugugguguaaacagugacacuguggguuggucuuggccagacggugcugaguugccauuuaccauugacaaguaa

SEQ ID NO: 55230 - RNA, 1410 nt, Artificial Sequence
  derived and/or modified CDS sequence (wt) from neuraminidase__InfluenzaA__AFX96561
augaauccaaaccaaaagauaauaaccauugguuuggucuguaugacaauuggaauggcuaacuuaauauuacaaauuggaaacauaaucucaauauggauuagccacucaauucaacuugggaaucaaaaucagauugaaacaugcaaucaaagcgucauuacuuaugaaaacaacacuuggguaaaucagacauauguuaacaucagcaacaccaacuuugcugcuggacagucagugguuuccgugaaauuagcgggcaauuccucucucugcccuguuaguggaugggcuauauacaguaaagacaacaguauaagaaucgguuccaagggggauguguuugucauaagggaaccauucauaucaugcucccccuuggaaugcagaaccuucuucuugacucaaggggccuugcuaaaugacaaacauuccaauggaaccauuaaagacaggagcccauaucgaacccuaaugagcuguccuauuggugaaguucccucuccauacaacucaagauuugagucagucgcuuggucagcaagugcuugucaugauggcaucaauuggcuaacaauuggaauuucuggcccagacaauggggcaguggcuguguuaaaguacaacggcauaauaacagacacuaucaagaguuggagaaacaauauauugagaacacaagagucugaaugugcauguguaaaugguucuugcuuuacuguaaugaccgauggaccaagugauggacaggccucauacaagaucuucagaauagaaaagggaaagauagucaaaucagucgaaaugaaugccccuaauuaucacuaugaggaaugcuccuguuauccugauucuagugaaaucacaugugugugcagggauaacuggcauggcucgaaucgaccgugggugucuuucaaccagaaucuggaauaucagauaggauacauaugcagugggauuuucggagacaauccacgcccuaaugauaagacaggcaguugugguccaguaucgucuaauggagcaaauggaguaaaaggauuuucauucaaauacggcaaugguguuuggauagggagaacuaaaagcauuaguucaagaaacgguuuugagaugauuugggauccgaacggauggacugggacagacaauaacuucucaauaaagcaagauaucguaggaauaaaugaguggucaggauauagcgggaguuuuguucagcauccagaacuaacagggcuggauuguauaagaccuugcuucuggguugaacuaaucagagggcgacccaaagagaacacaaucuggacuagcgggagcagcauauccuuuugugguguaaacagugacacuguggguuggucuuggccagacggugcugaguugccauuuaccauugacaaguaa

SEQ ID NO: 55231 - RNA, 1410 nt, Artificial Sequence; identical to SEQ ID NO: 50104
  derived and/or modified CDS sequence (wt) from neuraminidase__InfluenzaA__AFX96571

SEQ ID NO: 55232 - RNA, 1410 nt, Artificial Sequence; identical to SEQ ID NO: 50104
  derived and/or modified CDS sequence (wt) from neuraminidase__InfluenzaA__AFX96581

SEQ ID NO: 55233 - RNA, 1410 nt, Artificial Sequence; identical to SEQ ID NO: 48750
  derived and/or modified CDS sequence (wt) from neuraminidase__InfluenzaA__AFX96591

SEQ ID NO: 55234 - RNA, 1410 nt, Artificial Sequence; identical to SEQ ID NO: 48750
  derived and/or modified CDS sequence (wt) from neuraminidase__InfluenzaA__AFX96601

SEQ ID NO: 55235 - RNA, 1410 nt, Artificial Sequence
  derived and/or modified CDS sequence (wt) from neuraminidase__InfluenzaA__AFX96611
augaauccaaaccaaaagauaauaaccauugguucggucuguaugacaauuggaauggcuaacuuaauauuacaaauuggaaacauaaucucaauauggauuagccacucaauucaacuugggaaucaaaaucagauugaaacaugcaaucaaagcgucauuacuuaugaaaacaacacuuggguaaaucagacauauguuaacaucagcaacaccaacuuugcugcuggacagucagugguuuccgugaaauuagcgggcaauuccucucucugcccuguuaguggaugggcuauauacaguaaagacaacaguauaagaaucgguuccaagggggauguguuugucauaagggaaccauucauaucaugcucccccuuggaaugcagaaccuucuucuugacucaaggggccuugcuaaaugacaaacauuccaauggaaccauuaaagacaggagcccauaucgaacccuaaugagcuguccuauuggugaaguucccucuccauacaacucaagauuugagucagucgcuuggucagcaagugcuugucaugauggcaucaauuggcuaacaauuggaauuucuggcccagacaauggggcaguggcuguguuaaaguacaacggcauaauaacagacacuaucaagaguuggagaaacaauauauuaagaacacaagagucugaaugugcauguguaaaugguucuugcuuuacuguaaugaccgauggaccaagugauggacaggccucauacaagaucuucagaauagaaaagggaaagauagucaaaucagucgaaaugaaugccccuaauuaucacuaugaggaaugcuccuguuauccugauucuagugaaaucacaugugugugcagggauaacuggcauggcucgaaucgaccgugggugucuuucaaccagaaucuggaauaucagauaggauacauaugcagugggauuuucggagacaauccacgcccuaaugauaagacaggcaguugugguccaguaucgucuaauggagcaaauggaguaaaaggauuuucauucaaauacggcaaugguguuuggauagggagaacuaaaagcauuaguucaagaaacgguuuugagaugauuugggauccgaacggauggacugggacagacaauaacuucucaauaaagcaagauaucguaggaauaaaugaguggucaggauauagcgggaguuuuguucagcauccagaacuaacagggcuggauuguauaagaccuugcuucuggguugaacuaaucagagggcgacccaaagagaacacaaucuggacuagcgggagcagcauauccuuuugugguguaaacagugacacuguggguuggucuuggccagacggugcugaguugccauuuaccauugacaaguaa

SEQ ID NO: 55236 - RNA, 1410 nt, Artificial Sequence; identical to SEQ ID NO: 52998
  derived and/or modified CDS sequence (wt) from neuraminidase__InfluenzaA__AFX96621

SEQ ID NO: 55237 - RNA, 1410 nt, Artificial Sequence; identical to SEQ ID NO: 50104
  derived and/or modified CDS sequence (wt) from neuraminidase__InfluenzaA__AFX96631

SEQ ID NO: 55238 - RNA, 1410 nt, Artificial Sequence
  derived and/or modified CDS sequence (wt) from neuraminidase__InfluenzaA__AFX96641
augaauccaaaccaaaagauaauaaccauugguucggucuguaugacaauuggaauggcuaacuuaauauuacaaauuggaaauauaaucucaauauggauuagccacucaauucaacuugggaaucaaaaucagauugaaacaugcaaucaaagcgucauuacuuaugaaaacaacacuuggguaaaucagacauauguuaacaucagcaacaccaacuuugcugcuggacagucagugguuuccgugaaauuagcgggcaauuccucucucugcccuguuaguggaugggcuauauacaguaaagacaacaguauaagaaucgguuccaagggggauguguuugucauaagggaaccauucauaucaugcucccccuuggaaugcagaaccuucuucuugacucaaggggccuugcuaaaugacaaacauuccaauggaaccauuaaagacaggagcccauaucgaacccuaaugagcuguccuauuggugaaguucccucuccauacaacucaaaauuugagucagucgcuuggucagcaagugcuugucaugauggcaucaauuggcuaacaauuggaauuucuggcccagacaauggggcaguggcuguguuaaaguacaacggcauaauaacagacacuaucaagaguuggagaaacaauauauugagaacacaagagucugaaugugcauguguaaaugguucuugcuuuacuguaaugaccgauggaccaagugauggacaggccucauacaagaucuucagaauagaaaagggaaagauagucaaaucagucgaaaugaaugccccuaauuaucacuaugaggaaugcuccuguuauccugauucuagugaaaucacaugugugugcagggauaacuggcauggcucgaaucgaccgugggugucuuucaaccagaaucuggaauaucagauaggauacauaugcagugggauuuucggagacaauccacgcccuaaugauaagacaggcaguugugguccaguaucgucuaauggagcaaauggaguaaaaggauuuucauucaaauacggcaaugguguuuggauagggagaacuaaaagcauuaguucaagaaacgguuuugagaugauuugggauccgaacggauggacugggacagacaauaacuucucaauaaagcaagauaucguaggaauaaaugaguggucaggauauagcgggaguuuuguucagcauccagaacuaacagggcuggauuguauaagaccuugcuucuggguugaacuaaucagagggcgacccaaagagaacacaaucuggacuagcgggagcagcauauccuuuugugguguaaacagugacacuguggguuggucuuggccagacggugcugaguugccauuuaccauugacaaguaa

SEQ ID NO: 55239 - RNA, 1410 nt, Artificial Sequence; identical to SEQ ID NO: 49819
  derived and/or modified CDS sequence (wt) from neuraminidase__InfluenzaA__AFX96651

SEQ ID NO: 55240 - RNA, 1410 nt, Artificial Sequence
  derived and/or modified CDS sequence (wt) from neuraminidase__InfluenzaA__AFX96661
augaauccaaaccaaaagauaauaaccauugguucggucuguaugacaauuggaauggcuaacuuaauauuacaaauuggaaacauaaucucaauauggauuagccacucaauucaacuugggaaucaaaaucagauugaaacaugcaaucaaagcgucauuacuuaugaaaacaacacuuggguaaaucagacauauguuaacaucagcaacaccaacuuugcugcuggacagucagugguuuccgugaaauuagcgggcaauuccucucucugcccuguuaguggaugggcuauauacaguaaagacaacaguauaagaaucgguuccaagggggauguguuugucauaagggaaccauucauaucaugcucccccuuggaaugcagaaccuucuucuugacucaaggggccuugcuaaaugacaaacauuccaauggaaccauuaaagacaggagcccauaucgaacccuaaugagcuguccuauuggugaaguucccucuccauacaacucaagauuugagucagucgcuuggucagcaagugcuugucaugauggcaucaauuggcuaacaauuggaauuucuggcccagacaauggggcaguggcuguguuaaaguacaacggcauaauaacagacacuaucaagaguuggagaaacaauauauugagaacacaagagucugaaugugcauguguaaaugguucuugcuuuacuguaaugaccgauggaccaagugauggacaggccucauacaagaucuucagaauagaaaaaggaaagauagucaaaucagucgaaaugaaugccccuaauuaucacuaugaggaaugcuccuguuauccugauucuagugaaaucacaugugugugcagggauaacuggcauggcucgaaucgaccgugggugucuuucaaccagaaucuggaauaucagauaggauacauaugcagugggauuuucggagacaauccacgcccuaaugauaagacaggcaguugugguccaguaucgucuaauggagcaaauggaguaaaaggauuuucauucaaauacggcaaugguguuuggauagggagaacuaaaagcauuaguucaaggaacgguuuugagaugauuugggauccgaacggauggacugggacagacaauaacuucucaauaaagcaagauaucguaggaauaaaugaguggucaggauauagcgggaguuuuguucagcauccagaacuaacagggcuggauuguauaagaccuugcuucuggguugaacuaaucagagggcgacccaaagagaacacaaucuggacuagcgggagcagcauauccuuuugugguguaaacagugacacuguggguuggucuuggccagacggugcugaguugccauuuaccauugacaaguaa

SEQ ID NO: 55241 - RNA, 1410 nt, Artificial Sequence
  derived and/or modified CDS sequence (wt) from neuraminidase__InfluenzaA__AFX96671
augaauccaaaccaaaagauaauaaccauugguucggucuguaugacaauuggaauggcuaacuuaauauuacaaauuggaaacauaaucucaauauggauuagccacucaauucaacuugggaaucaaaaucagauugaaacaugcaaucaaagcgucauuacuuaugaaaacaacacuuggguaaaucagacauauguuaacaucagcaacaccaacuuugcugcuggacagucagugguuuccgugaaauuagcgggcaauuccucucucugcccuguuaguggaugggcuauauacaguaaagacaacaguauaagaaucgguuccaagggggauguguuugucauaagggaaccauucauaucaugcucccccuuggaaugcagaaccuucuucuugacucaaggggccuugcuaaaugacaaacauuccaauggaaccauuaaagacaggagcccauaucgaacccuaaugagcuguccuauuggugaaguucccucuccauacaacucaagauuugagucagucgcuuggucagcaagugcuugucaugauggcaucaauuggcuaacaauuggaauuucuggcccagacaauggggcaguggcuguguuaaaguacaacggcauaauaacagacacuaucaagaguuggagaaacaauauauugagaacacaagagucugaaugugcauguguaaaugguucuugcuuuacuguaaugaccgauggaccaagugauggacaggccucauacaagaucuucagaauagaaaagggaaagauagucaaaucagucgaaaugaaugccccuaauuaucacuaugaggaaugcuccuguuauccugauucuagugaaaucacaugugugugcagggauaacuggcauggcucgaaucgaccgugggugucuuucaaccagaaucuggaauaucagauaggauacauaugcagugggauuuucggagacaauccacgcccuaaugauaagacaggcaguugugguccaguaucgucuaauggagcaaauggaguaaaaggauuuucauucaaauacggcaaugguguuuggauagggagaacuaaaagcauuaguucaagaaacgguuuugagaugauuugggauccgaacggauggacugggacagacaauaacuucucaauaaagcaagauaucguaggaauaaaugaguggucaggauauagcgggaguuuuguucagcauccagaacuaacaggacuggauuguauaagaccuugcuucuggguugaacuaaucagagggcgacccaaagagaacacaaucuggacuagcgggagcagcauauccuuuugugguguaaacagugacacuguggguuggucuuggccagacggugcugaguugccauuuaccauugacaaguaa

SEQ ID NO: 55242 - RNA, 1410 nt, Artificial Sequence; identical to SEQ ID NO: 48750
  derived and/or modified CDS sequence (wt) from neuraminidase__InfluenzaA__AFX96681

SEQ ID NO: 55243 - RNA, 1410 nt, Artificial Sequence; identical to SEQ ID NO: 50104
  derived and/or modified CDS sequence (wt) from neuraminidase__InfluenzaA__AFX96691

SEQ ID NO: 55244 - RNA, 1410 nt, Artificial Sequence
  derived and/or modified CDS sequence (wt) from neuraminidase__InfluenzaA__AFX96701
augaauccaaaccaaaagauaauaaccauugguucggucuguaugacaauuggaauggcuaacuuaauauuacaaauuggaaacauaauaucgauauggauuagccacucaauucaacuugggaaucaaaaucagauugaaacaugcaaucaaagcaucauuacuuaugaaaacaacacuuggguaaaucagacauauguuaacaucagcaacaccaacuuugcugcuggacagucagugguuuccgugaaauuagcgggcaauuccucucucugcccuguuaguggaugggcuauauacaguaaagacaacaguauaagaaucgguuccaagggggauguguuugucauaagggaaccauucauaucaugcucccccuuggaaugcagaaccuucuucuugacucaaggggccuugcuaaaugacaaacauuccaauggaaccauuaaagacaggagcccauaucgaacccuaaugagcuguccuauuggugaaguucccucuccauacaacucaagauuugagucagucgcuuggucagcaagugcuugucaugauggcaucaauuggcuaacaauuggaauuucuggcccagacaauggggcaguggcuguguuaaaguacaacggcauaauaacagacacuaucaagaguuggagaaacaauauauugagaacacaagagucugaaugugcauguguaaaugguucuugcuuuacuguaaugaccgauggaccaagugauggacaggccucauacaagaucuucagaauagaaaagggaaagauagucaaaucagucgaaaugaaugccccuaauuaucacuaugaggaaugcuccuguuauccugauucuagugaaaucacaugugugugcagggauaacuggcauggcucgaaucgaccgugggugucuuucaaccagaaucuggaauaucagauaggauacauaugcagugggauuuucggagacaauccacgcccuaaugauaagacaggcaguugugguccaguaucguuuaauggagcaaauggaguaaaaggauuuucauucaaauacggcaaugguguuuggauagggagaacuaaaagcauuaguucaagaaacgguuuugagaugauuugggauccgaacggauggacugggacagacaauaacuucucaauaaagcaagauaucguaggaauaaaugaguggucaggauauagcgggaguuuuguucagcauccagaacuaacagggcuggauuguauaagaccuugcuucuggguugaacuaaucagagggcgacccaaagagaacacaaucuggacuagcgggagcaucauauccuuuugugguguaaacagugacacuguggguuggucuuggccagacggugcugaguugccauuuaccauugacaaguaa

SEQ ID NO: 55245 - RNA, 1410 nt, Artificial Sequence
  derived and/or modified CDS sequence (wt) from neuraminidase__InfluenzaA__AFX96711
augaauccaaaccaaaagauaauaaccauugguucggucuguaugacaauuggaauggcuaacuuaauauuacaaauuggaaacauaaucucaauauggauuagccacucaauucaacuugggaaucaaaaucagauugaaacaugcaaucaaagcgucauuacuuaugaaaacaacacuuggguaaaucagacauauguuaacaucagcaacaccaacuuugcugcugggcagucagugguuuccgugaaauuagcgggcaauuccucucucugcccuguuaguggaugggcuauauacaguaaagacaacaguauaagaaucgguuccaagggggauguguuugucauaagggaaccauucauaucaugcucccccuuggaaugcagaaccuucuucuugacucaaggggccuugcuaaaugacaaacauuccaauggaaccauuaaagacaggagcccauaucgaacucuaaugagcuguccuauuggugaaguucccucuccauacaacucaagauuugagucagucgcuuggucagcaagugcuugucaugauggcaucaauuggcuaacaauuggaauuucuggcccagacaauggggcaguggcuguguuaaaguacaacggcauaauaacagacacuaucaagaguuggagaaacaauauauugagaacacaagagucugaaugugcauguguaaaugguucuugcuuuacuguaaugaccgauggaccaagugauggacaggccucauacaagaucuucagaauagaaaagggaaagauagucaaaucagucgaaaugaaugccccuaauuaucacuaugaggaaugcuccuguuauccugauucuagugaaaucacaugugugugcagggauaacuggcauggcucgaaucgaccgugggugucuuucaaccagaaucuggaauaucagauaggauacauaugcagugggauuuucggagacaauccacgcccuaaugauaagacaggcaguugugguccaguaucgucuaauggagcaaauggaguaaaaggauuuucauucaaauacggcaaugguguuuggauagggagaacuaaaagcauuaguucaagaaacgguuuugagaugauuugggauccgaacggauggacuggaacagauaauaacuucucaauaaagcaagauaucguaggaauaaaugaguggucaggauauagcgggaguuuuguucagcauccagaacuaacagggcuggauuguauaagaccuugcuucuggguugaacuaaucagagggcgacccaaagagaacacaaucuggacuagcgggagcagcauauccuuuugugguguaaacagugacacuguggguuggucuuggccagacggugcugaguugccauuuaccauugacaaguaa

SEQ ID NO: 55246 - RNA, 1410 nt, Artificial Sequence
  derived and/or modified CDS sequence (wt) from neuraminidase__InfluenzaA__AFX96721
augaauccaaaccaaaagauaauaaccauugguucggucuguaugacaauuggaauggcuaacuuaauauuacaaauuggaaacauaaucucaauauggauuagccacucaauucaacuugggaaucaaaaucagauugaaacaugcaaucaaagcgucauuacuuaugaaaacaacacuuggguaaaucagacauauguuaacaucagcaacaccaacuuugcugcugggcagucagugguuuccgugaaauuagcgggcaauuccucucucugcccuguuaguggaugggcuauauacaguaaagacaacaguauaagaaucgguuccaagggggauguguuugucauaagggaaccauucauaucaugcucccccuuggaaugcagaaccuucuucuugacucaaggggccuugcuaaaugacaaacauuccaauggaaccauuaaagacaggagcccauaucgaacucuaaugagcuguccuauuggugaaguucccucuccauacaacucaagauuugagucagucgcuuggucagcaagugcuugucaugauggcaucaauuggcuaacaauuggaauuucuggcccagacaauggggcaguggcuguguuaaaguacaacggcauaauaacagacacuaucaagaguuggagaaacaauauauugagaacacaagagucugaaugugcauguguaaaugguucuugcuuuacuguaaugaccgauggaccaagugauggacaggccucauacaagaucuucagaauagaaaagggaaagauagucaaaucagucgaaaugaaugccccuaauuaucacuaugaggaaugcuccuguuauccugauucuagugaaaucacaugugugugcagggauaacuggcauggcucgaaucgaccgugggugucuuucaaccagaaucuggaauaucagauaggauacauaugcagugggauuuucggagacaauccacgcccuaaugauaagacaggcaguugugguccaguaucgucuaauggagcaaauggaguaaaaggauuuucauucaaauacggcaaugguguuuggauagggagaacuaaaagcauuaguucaagaaacgguuuugagaugauuugggauccgaacggauggacuggaacagacaauaacuucucaauaaagcaagauaucguaggaauaaaugaguggucaggauauagcgggaguuuuguucagcauccagaacuaacagggcuggauuguauaagaccuugcuucuggguugaacuaaucagagggcgacccaaagagaacacagucuggacuagcgggagcagcauauccuuuugugguguaaacagugacacuguggguuggucuuggccagacggugcugaguugccauuuaccauugacaaguaa

SEQ ID NO: 55247 - RNA, 1410 nt, Artificial Sequence; identical to SEQ ID NO: 55246
  derived and/or modified CDS sequence (wt) from neuraminidase__InfluenzaA__AFX96731

SEQ ID NO: 55248 - RNA, 1410 nt, Artificial Sequence
  derived and/or modified CDS sequence (wt) from neuraminidase__InfluenzaA__AFX96741
augaauccaaaccaaaagauaauaaccauugguucggucuguaugacaauuggaauggcuaacuuaauauuacaaauuggaaacauaaucucaauauggauuagccacucaauucaacuugggaaucaaaaccagauugaaacaugcaaucaaagcgucauuacuuaugaaaacaacacuuggguaaaucagacauaugucaacaucagcaacaccaacuuugcugcuggacagucagugguuuccgugaaauuagcgggcaauuccucucucugcccuguuaguggaugggcuauauacaguaaagacaacaguauaagaaucgguuccaagggggauguguuugucauaagggaaccauucauaucaugcucccccuuggaaugcagaaccuucuucuugacucaaggggccuugcuaaaugacaaacauuccaauggaaccauuaaagacaggagcccauaucgaacccuaaugagcuguccuauuggugaaguucccucuccauacaacucaagauuugagucagucgcuuggucagcaagugcuugucaugauggcaucaauuggcuaacaauuggaauuucuggcccagacaauggggcaguggcuguguuaaaguacaacggcauaauaacagacacuaucaagaguuggagaaacaauauauugagaacacaagagucugaaugugcauguguaaaugguucuugcuuuacuguaaugaccgauggaccaagugauggacaggccucauacaagaucuucagaauagaaaagggaaagauagucaaaucagucgaaaugaaugccccuaauuaucacuaugaggaaugcuccuguuauccugauucuagugaaaucacaugugugugcagggauaacuggcauggcucgaaucgaccgugggugucuuucaaccagaaucuggaauaucagauaggauacauaugcagugggauuuucggagacaauccacgcccuaaugauaagacaggcaguugugguccaguaucgucuaauggagcaaauggaguaaaaggauuuucauucaaauacggcaaugguguuuggauagggagaacuaaaagcauuaguucaagaaacgguuuugagaugauuugggauccgaacggauggacugggacagacaauaacuucucaauaaagcaagauaucguaggaauaaaugaguggucaggauauagcgggaguuuuguucagcauccagaacuaacagggcuggauuguauaagaccuugcuucuggguugaacuaaucagagggcgacccaaagagaacacaaucuggacuagcgggagcagcauauccuuuugugguguaaacagugacacuguggguuggucuuggccagacggugcugaguugccauuuaccauugacaaguaa

SEQ ID NO: 55249 - RNA, 1410 nt, Artificial Sequence
  derived and/or modified CDS sequence (wt) from neuraminidase__InfluenzaA__AFX96751
augaauccaaaccaaaagauaauaaccauugguucggucuguaugacaauuggaauggcuaacuuaauauuacaaauuggaaacauaaucucaauauggauuagccacucaauucaacuugggaaucaaaaucagauugaaacaugcaaucaaagcgucauuacuuaugaaaacaacacuuggguaaaucagacauauguuaacaucagcaacaccaacuuugcugcuggacagucagugguuuccgugaaauuagcgggcaauuccucucucugcccuguuaguggaugggcuauauacaguaaagacaacaguauaagaaucgguuccaagggggauguguuugucauaagggaaccauucauaucaugcucccccuuggaaugcagaaccuucuucuugacucaaggggccuugcuaaaugacaaacauuccaauggaaccauuaaagacaggagcccauaucgaacccuaaugagcuguccuauuggugaaguucccucuccauacaacucaagauuugagucagucgcuuggucagcaagugcuugucaugauggcaucaauuggcuaacaauuggaauuucuggcccagacaauggggcaguggcuguguuaaaguacaacggcauaauaacagacaccauuaagaguuggagaaacaauauauugagaacacaagagucugaaugugcauguguaaaugguucuugcuuuacuguaaugaccgauggaccaagugauggacaggccucauacaagaucuucagaauagaaaagggaaagauagucaaaucagucgaaaugaaugccccuaauuaucacuaugaggaaugcuccuguuauccugauucuagugaaaucacaugugugugcagggauaacuggcauggcucgaaucgaccgugggugucuuucaaccagaaucuggaauaucagauaggauacauaugcagugggauuuucggagacaauccacgcccuaaugauaagacaggcaguugugguccaguaucgucuaauggagcaaauggaguaaaaggauuuucauucaaauacggcaaugguguuuggauagggagaacuaaaagcauuaguucaaggaacgguuuugagaugauuugggauccgaacggauggacugggacagacaauaacuucucaauaaagcaagauaucguaggaauaaaugaguggucaggauauagcgggaguuuuguucagcauccagaacuaacagggcuggauuguauaagaccuugcuucuggguugaacuaaucagagggcgacccaaagagaacacaaucuggacuagcgggagcagcauauccuuuugugguguaaacagugacacuguggguuggucuuggccagacggugcugaguugccauuuaccauugacaaguaa

SEQ ID NO: 55250 - RNA, 1410 nt, Artificial Sequence
  derived and/or modified CDS sequence (wt) from neuraminidase__InfluenzaA__AFX96761
augaauccaaaccaaaagauaauaaccauugguucggucuguaugacaauuggaauggcuaacuuaauauuacaaauuggaaacauaaucucaauauggauuagccacucaauucaacuugggaaucaaaaucagauugaaacaugcaaucaaagcgucauuacuuaugaaaacaacacuuggguaaaucagacauauguuaacaucagcaacaccaacuuugcugcugggcagucagugguuuccgugaaauuagcgggcaauuccucucucugcccuguuaguggaugggcuauauacaguaaagacaacaguauaagaaucgguuccaagggggauguguuugucauaagggaaccauucauaucaugcucccccuuggaaugcagaaccuucuucuugacucaaggggccuugcuaaaugacaaacauuccaauggaaccauuaaagacaggagcccauaucgaacucuaaugagcuguccuauuggugaaguucccucuccauacaacucaagauuugagucagucgcuuggucagcaagugcuugucaugauggcaucaauuggcuaacaauuggaauuucuggcccagacaauggggcaguggcuguguuaaaguacaacggcauaauaacagacacuaucaagaguuggagaaacaauauauugagaacacaagagucugaaugugcauguguaaaugguucuugcuuuacuguaaugaccgauggaccaagugauggacaggccucauacaagaucuucagaauagaaaagggaaagauagucaaaucagucgaaaugaaugccccuaauuaucacuaugaggaaugcuccuguuauccugauucuagugaaaucacaugugugugcagggauaacuggcauggcucgaaucgaccgugggugucuuucaaccagaaucuggaauaucagauaggauacauaugcagugggauuuucggagacaauccacgcccuaaugauaagacaggcaguugugguccaguaucgucuaauggagcaaauggaguaaaaggauuuucauucaaauacggcaaugguguuuggauagggagaacuaaaagcauuaguucaagaaacgguuuugagaugauuugggauccgaacggauggacuggaacagacaauaacuucucaauaaagcaagauaucguaggaauaaaugaguggucaggauauagcgggaguuuuguucagcauccagaacuaacagggcugaauuguauaagaccuugcuucuggguugaacuaaucagagggcgaccuaaagagaacacaaucuggacuagcgggagcagcauauccuuuugugguguaaacagugacacuguggguuggucuuggccagacggugcugaguugccauuuaccauugacaaguaa

SEQ ID NO: 55251 - RNA, 1410 nt, Artificial Sequence
  derived and/or modified CDS sequence (wt) from neuraminidase__InfluenzaA__AFX96771
augaauccaaaccaaaagauaauaaccauugguucggucuguaugacaauuggaauggcuaacuugauauuacaaauuggaaacauaaucucaauauggauuagccacucaauucaacuugggaaucaaaaucagauugaaacaugcaaucaaagcgucauuacuuaugaaaacaacacuuggguaaaucagacauauguuaacaucagcaacaccaacuuugcugcuggacagucagugguuuccgugaaauuagcgggcaauuccucucucugcccuguuaguggaugggcuauauacaguaaagacaacaguauaagaaucgguuccaagggggauguguuugucauaagggaaccauucauaucaugcucccccuuggaaugcagaaccuucuucuugacucaaggggccuugcuaaaugacaaacauuccaauggaaccauuaaagacaggaguccauaucgaacccuaaugagcuguccuauuggugaaguucccucuccauacaacucaagauuugagucagucgcuuggucagcaagugcuugucaugauggcaucaauuggcuaacaauuggaauuucuggcccagacaauggggcaguggcuguguuaaaguacaacggcauaauaacagacacuaucaagaguuggagaaacaauauauugagaacacaagagucugaaugugcauguguaaaugguucuugcuuuacuguaaugaccgauggaccaagugauggacaggccucauacaagaucuucagaauagaaaagggaaagauagucaaaucagucgaaaugaaugccccuaauuaucacuaugaggaaugcuccuguuauccugauucuagugaaaucacaugugugugcagggauaacuggcauggcucgaaucgaccgugggugucuuucaaccagaaucuggaauaucagauaggauacauaugcagugggauuuucggagacaauccacgcccuaaugauaagacaggcaguugugguccaguaucgucuaauggagcaaauggaguaaaaggauuuucauucaaauacggcaaugguguuuggauagggagaacuaaaagcauuaguucaagaaacgguuuugagaugauuugggauccgaacggauggacugggacagacaauaacuucucaauaaagcaagauaucguaggaauaaaugaguggucaggauauagcgggaguuuuguucagcauccagaacuaacagggcuggauuguauaagaccuugcuucuggguugaacuaaucagagggcgacccaaagagaacacaaucuggacuagcgggagcagcauauccuuuugugguguaaacagugacacuguggguuggucuuggccagacggugcugaguugccauuuaccauugacaaguaa

SEQ ID NO: 55252 - RNA, 1410 nt, Artificial Sequence
  derived and/or modified CDS sequence (wt) from neuraminidase__InfluenzaA__AFX96791
augaauccaaaccaaaagauaauaaccauugguucggucuguaugacaauuggaauggcuaacuuaauauuacaaguuggaaacauaaucucaauauggauuagccacucaauucaacuugggaaucaaaaucagauugaaacaugcaaucaaagcgucauuacuuaugaaaacaacacuuggguaaaucagacauauguuaacaucagcaacaccaacuuugcugcuggacagucagugguuuccgugaaauuagcgggcaauuccucucucugcccuguuaguggaugggcuauauacaguaaagacaacaguauaagaaucgguuccaagggggauguguuugucauaagggaaccauucauaucaugcucccccuuggaaugcagaaccuucuucuugacucaaggggccuugcuaaaugacaaacauuccaauggaaccauuaaagacaggagcccauaucgaacccuaaugagcuguccuauuggugaaguucccucuccauacaacucaagauuugagucagucgcuuggucagcaagugcuugucaugauggcaucaauuggcuaacaauuggaauuucuggcccagacaauggggcaguggcuguguuaaaguacaacggcauaauaacagacacuaucaagaguuggagaaacaauauauugagaacacaagagucugaaugugcauguauaaaugguucuugcuuuacuguaaugaccgauggaccaagugauggacaggccucauacaagaucuucagaauagaaaagggaaagauagucaaaucagucgaaaugaaugccccuaauuaucacuaugaggaaugcuccuguuauccugauucuagugaaaucacaugugugugcagggauaacuggcauggcucgaaucgaccgugggugucuuucaaccagaaucuggaauaucagauaggauacauaugcagugggauuuucggagacaauccacgcccuaaugauaagacaggcaguugugguccaguaucgucuaauggagcaaauggaguaaaaggauuuucauucaaauacggcaaugguguuuggauagggagaacuaaaagcauuaguucaagaaacgguuuugagaugauuugggauccgaacggauggacugggacagacaauaacuucucaauaaagcaagauaucguaggaauaaaugaguggucaggauauagcgggaguuuuguucagcauccagaacuaacagggcuggauuguauaagaccuugcuucuggguugaacuaaucagagggcgacccaaagagaacacaaucuggacuagcgggagcagcauauccuuuugugguguaaacagugacacuguggguuggucuuggccagacggugcugaguugccauuuaccauugacaaguaa

SEQ ID NO: 55253 - RNA, 1410 nt, Artificial Sequence; identical to SEQ ID NO: 55252
  derived and/or modified CDS sequence (wt) from neuraminidase__InfluenzaA__AFX96801

SEQ ID NO: 55254 - RNA, 1410 nt, Artificial Sequence
  derived and/or modified CDS sequence (wt) from neuraminidase__InfluenzaA__AFX96811
augaauccaaaccaaaagauaauaaccauugguucggucuguaugacaauuggaauggcuaacuuaauauuacaaauuggaaacauaaucucaauauggauuagccacucaauucaacuugggaaucaaaaucagauugaaacaugcaaucaaagcgucauuacuuaugaaaacaacacuuggguaaaucagacauauguuaacaucagcaacaccaacuuugcugcuggacagucagugguuuccgugagauuagcgggcaauuccucucucugcccuguuaguggaugggcuauauacaguaaagacaacaguauaagaaucgguuccaagggggauguguuugucauaagggaaccauucauaucaugcucucccuuggaaugcagaaccuucuucuugacucaaggggccuugcuaaaugacaaacauuccaauggaaccauuaaagacaggagcccauaucgaacccuaaugagcuguccuauuggugaaguucccucuccauacaacucaagauuugagucagucgcuuggucagcaagugcuugucaugauggcaucaauuggcuaacaauuggaauuucuggcccagacaauggggcaguggcuguguuaaaguauaacggcauaauaacagacacuaucaagaguuggagaaacaauauauugagaacacaagagucugaaugugcauguguaaaugguucuugcuuuacuguaaugaccgauggaccaagugauggacaggccucauacaagaucuucagaauagaaaagggaaagauagucaaaucagucgaaaugaaugccccuaauuaucacuaugaggaaugcuccuguuauccugauucuagugaaaucacaugugugugcagggauaacuggcauggcucgaaucgaccgugggugucuuucaaccagaaucuggaauaucagauaggauacauaugcagugggauuuucggagacaauccacgcccuaaugauaagacaggcaguugugguccaguaucgucuaauggagcaaauggaguaaaaggauuuucauucaaauacggcaaugguguuuggauagggagaacuaaaagcauuaguucaagaaacgguuuugagaugauuugggauccgaacggauggacugggacagacaauaacuucucaauaaagcaagauaucguaggaauaaaugaguggucaggauauagcgggaguuuuguucagcauccagaacuaacagggcuggauuguauaagaccuugcuucuggguugaacuaaucagagggcgacccaaagagaacacaaucuggacuagcgggagcagcauauccuuuugugguguaaacagugacacuguggguuggucuuggccagacggugcugaguugccauuuaccauugacaaguaa

SEQ ID NO: 55255 - RNA, 1410 nt, Artificial Sequence; identical to SEQ ID NO: 48750
  derived and/or modified CDS sequence (wt) from neuraminidase__InfluenzaA__AFX96821

SEQ ID NO: 55256 - RNA, 1410 nt, Artificial Sequence; identical to SEQ ID NO: 55252
  derived and/or modified CDS sequence (wt) from neuraminidase__InfluenzaA__AFX96831

SEQ ID NO: 55257 - RNA, 1410 nt, Artificial Sequence
  derived and/or modified CDS sequence (wt) from neuraminidase__InfluenzaA__AFX96841
augaauccaaaccaaaagauaauaaccauugguucggucuguaugacaauuggaauggcuaacuuaauauuacaaauuggaaacauaaucucaauauggauuagccacucaauucaacuugggaaucaaaaucagauugaaacaugcaaucaaagcgucauuacuuaugaaaacaacacuuggguaaaucagacauauguuaacaucagcaacaccaacuuugcugcuggacagucagugguuuccgugagauuagcgggcaauuccucucucugcccuguuaguggaugggcuauauacaguaaagacaacaguauaagaaucgguuccaagggggauguguuugucauaagggaaccauucauaucaugcucucccuuggaaugcagaaccuucuucuugacucaaggggccuugcuaaaugacaaacauuccaauggaaccauuaaagacaggagcccauaucgaacccuaaugagcuguccuauuggugaaguucccucuccauacaacucaagauuugagucagucgcuuggucagcaagugcuugucaugauggcaucaauuggcuaacaauuggaauuucuggcccagacaauggggcaguggcuguguuaaaguacaacggcauaauaaccgacacuaucaagaguuggagaaacaauauauugagaacacaagaaucugaaugugcauguguaaaugguucuugcuuuacuguaaugaccgauggaccaagugauggacaggccucauacaagaucuucagaauagaaaagggaaagauagucaaaucagucgaaaugaaugccccuaauuauuacuaugaggaaugcuccuguuacccugauucuagugaaaucacaugugugugcagggauaacuggcauggcucgaaucgaccgugggugucuuucaaccagaaucuggaauaucagauaggauacauaugcagugggauuuucggagacaauccacgcccuaaugauaagacaggcaguugugguccaguaucgucuaauggagcaaauggaguaaaaggauucucauucaaauacggcaaugguguuuggauagggagaacuaaaagcauuaguucaagaaacgguuuugagaugauuugggauccgaacggauggacugggacagacaauaacuucucaauaaagcaagauaucguaggaauaaaugaguggucaggauauagcgggaguuuuguucagcauccagaacuaacagggcuggauuguauaagaccuugcuucuggguugaacuaaucagagggcgacccaaagagaacacaaucuggacuagcgggagcagcauauccuuuugugguguaaacagugacacuguggguuggucuuggccagacggugcugaguugccauuuaccauugacaaguaa

SEQ ID NO: 55258 - RNA, 1410 nt, Artificial Sequence; identical to SEQ ID NO: 48806
  derived and/or modified CDS sequence (wt) from neuraminidase__InfluenzaA__AFX96859

SEQ ID NO: 55259 - RNA, 1410 nt, Artificial Sequence; identical to SEQ ID NO: 48750
  derived and/or modified CDS sequence (wt) from neuraminidase__InfluenzaA__AFX96907

SEQ ID NO: 55260 - RNA, 1410 nt, Artificial Sequence
  derived and/or modified CDS sequence (wt) from neuraminidase__InfluenzaA__AFX96917
augaauccaaaccaaaagauaauaaccauugguucggucuguaugacaauuggaauggcuaacuuaauauuacaaauuggaaacauaaucucaauauggauuagccacuccauucaacuugggaaucaaaaucagauugaaacaugcaaucaaagcgucauuacuuaugaaaacaacacuuggguaaaucagacauauguuaacaucagcaacaccaacuuugcugcugggcagucagugguuuccgugaaauuagcgggcaauuccucucucugcccuguuaguggaugggcuauauacaguaaagacaacaguauaagaaucgguuccaagggggauguguuugucauaagggaaccauucauaucaugcucccccuuggaaugcagaaccuucuucuugacucaaggggccuugcuaaaugacaaacauuccaauggaaccauuaaagacaggagcccauaucgaacucuaaugagcuguccuauuggugaaguucccucuccauacaacucaagauuugagucagucgcuuggucagcaagugcuugucaugauggcaucaauuggcuaacaauuggaauuucuggcccagacaauggggcaguggcuguguuaaaguacaacggcauaauaacagacacuaucaagaguuggagaaacaauauauugagaacacaagagucugaaugugcauguguaaaugguucuugcuuuacuguaaugaccgauggaccaagugauggacaggccucauacaagaucuucagaauagaaaagggaaagauagucaaaucagucgaaaugaaugccccuaauuaucacuaugaggaaugcuccuguuauccugauucuagugaaaucacaugugugugcagggauaacuggcauggcucgaaucgaccgugggugucuuucaaccagaaucuggaauaucagauaggauacauaugcagugggauuuucggagacaauccacgcccuaaugauaagacaggcaguugugguccaguaucgucuaauggagcaaauggaguaaaaggauuuucauucaaauacggcaaugguguuuggauagggagaacuaaaagcauuaguucaagaaacgguuuugagaugauuugggauccgaacggauggacugggacagacaauaacuucucaauaaagcaagauaucguaggaauaaaugaguggucaggauauagcgggaguuuuguucagcauccagaacuaacagggcuggauuguauaagaccuugcuucuggguugaacuaaucagagggcgacccaaagagaacacaaucuggacuagcgggagcagcauauccuuuugugguguaaacagugacacuguggguuggucuuggccagacggugcugaguugccauuuaccauugacaaguaa

SEQ ID NO: 55261 - RNA, 1410 nt, Artificial Sequence; identical to SEQ ID NO: 48750
  derived and/or modified CDS sequence (wt) from neuraminidase__InfluenzaA__AFX96927

SEQ ID NO: 55262 - RNA, 1410 nt, Artificial Sequence
  derived and/or modified CDS sequence (wt) from neuraminidase__InfluenzaA__AFX96937
augaauccaaaccaaaagauaauaaccauugguucggucuguaugacaauuggaauggcuaacuuaauauuacaaauuggaaacauaaucucaauauggauuagccacucaauucaacuugggaaucaaaaucagauugaaacaugcaaucaaagcgucauuacuuaugaaaacaacacuuggguaaaucagacauauguuaacaucagcagcaccaacuuugcugcuggacagucagugguuuccgugaaauuagcgggcaauuccucucucugcccuguuaguggaugggcuauauacaguaaagacaacaguauaagaaucgguuccaagggggauguguuugucauaagggaaccauucauaucaugcucccccuuggaaugcagaaccuucuucuugacucaaggggccuugcuaaaugacaaacauuccaauggaaccauuaaagacaggagcccauaucgaacccuaaugagcuguccuauuggugaaguucccucuccauacaacucaagauuugagucagucgcuuggucagcaagugcuugucaugauggcaucaauuggcuaacaauuggaauuucuggcccagacaauggggcaguggcuguguuaaaguacaacggcauaauaacagacacuaucaagaguuggagaaacaauauauugagaacacaagagucugaaugugcauguguaaaugguucuugcuuuacuguaaugaccgauggaccaagugauggacaggccucauacaagaucuucagaauagaaaagggaaagauagucaaaucagucgaaaugaaugccccuaauuaucacuaugaggaaugcuccuguuauccugauucuagugaaaucacaugugugugcagggauaacuggcauggcucgaaucgaccgugggugucuuucaaccagaaucuggaauaucagauaggauacauaugcagugggauuuucggagacaauccacgcccuaaugauaagacaggcaguugugguccaguaucgucuaauggagcaaauggaguaaaaggauuuucauucaaauacggcaaugguguuuggauagggagaacuaaaagcauuaguucaagaaacgguuuugagaugauuugggauccgaacggauggacugggacagacaauaacuucucaauaaagcaagauaucguuggaauaaaugaguggucaggauauagcgggaguuuuguucagcauccagaacuaacagggcuggauuguauaagaccuugcuucuggguugaacuaaucagagggcggcccaaagagaacacaaucuggacuagcgggagcagcauauccuuuugugguguaaacagugacacuguggguuggucuuggccagacggugcugaguugccauuuaccauugacaaguaa

SEQ ID NO: 55263 - RNA, 1410 nt, Artificial Sequence; identical to SEQ ID NO: 48749
  derived and/or modified CDS sequence (wt) from neuraminidase__InfluenzaA__AFY23991

SEQ ID NO: 55264 - RNA, 1410 nt, Artificial Sequence; identical to SEQ ID NO: 48750
  derived and/or modified CDS sequence (wt) from neuraminidase__InfluenzaA__AFY24001

SEQ ID NO: 55265 - RNA, 1410 nt, Artificial Sequence; identical to SEQ ID NO: 50013
  derived and/or modified CDS sequence (wt) from neuraminidase__InfluenzaA__AFY24022

SEQ ID NO: 55266 - RNA, 1410 nt, Artificial Sequence
  derived and/or modified CDS sequence (wt) from neuraminidase__InfluenzaA__AFY24043
augaauccaaaccaaaagauaauaaccauugguucggucuguaugacaauuggaauggcuaacuuaauauuacaaauuggaaacauaaucucaauauggauuagccacucaauucaacuugggaaucaaaaucagauugaaacaugcaaucaaagcgucauuacuuaugaaaacaacacuuggguaaaucagacauauguuaacaucagcaacaccaacuuugcugcuggacagucagugguuuccgugaaauuagcgggcaauuccucucucugcccuguuaguggaugggcuauauacaguaaagacaacaguauaagaaucgguuccaagggggauguguuugucauaagggaaccauucauaucaugcucccccuuggaaugcagaaccuucuucuugacucaaggggccuugcuaaaugacaaacauuccaauggaaccauuaaagacaggagcccauaucgaacccuaaugagcuguccuauuggugaaguucccucuccauacaacucaagauuugagucagucgcuuggucagcaagugcuugucaugauggcaucaauuggcuaacaauuggaauuucuggcccagacaauggggcaguggcuguguuaaaguacaacggcauaauaacagacacuaucaagagcuggagaaacaauauauugagaacacaagagucugaaugugcauguguaaaugguucuugcuuuacuguaaugaccgauggaccaagugauggacaggccucauacaagaucuucagaauagaaaagggaaagauagucaaaucaguugaaaugaaugccccuaauuaucacuaugaggaaugcuccuguuauccugauucuagugaaaucacaugugugugcagggauaacuggcauggcucgaaucgaccgugggugucuuucaaccagaaucuggaauaucagauaggauacauaugcagugggauuuucggagacaauccacgcccuaaugauaagacaggcaguugugguccaguaucgucuaauggagcaaauggaguaaaaggauuuucguucaaauacggcaaugguguuuggauagggagaacuaaaagcauuaguucaagaaacgguuuugagaugauuugggauccgaacggauggacugggacagacaauaacuucucaauaaagcaagauaucguaggaauaaaugaguggucaggauauagcgggaguuuuguucagcauccagaacuaacagggcuggauuguauaagaccuugcuucuggguugaacuaaucagagggcgacccaaagagaacacaaucuggacuagcgggagcagcauauccuuuugugguguaaacagugacacuguggguuggucuuggccagacggugcugaguugccauuuaccauugacaaguaa

SEQ ID NO: 55267 - RNA, 1410 nt, Artificial Sequence
  derived and/or modified CDS sequence (wt) from neuraminidase__InfluenzaA__AFY24153
augaauccaaaucaaaagauaauaacaauuggcucuguuucucucaccauuuccacaauaugcuucuucaugcaaauugccaucuugauaacuacuguaacauugcauuucaagcaauaugaauucaacucccccccaaacaaccaagugaugcugugugaaccaacaauaauagaaagaaacauaacagagauaguguaucugaccaacaccaccauagagaaggaaauaugccccaaacuagcagaauacagaaauuggucaaagccgcaauguaacauuacaggauuugcaccuuuuucuaaggacaauucgauuaggcuuuccgcugguggggacaucugggugacaagagaaccuuaugugucaugcgauccugacaaguguuaucaauuugcccuuggacagggaacaacacuaaacaacgugcauucaaaugacacaguacaugauaggaccccuuaucggacccuauugaugaaugaguuagguguuccauuucaucuggggaccaagcaagugugcauagcaugguccagcucaaguugucacgauggaaaagcauggcugcauguuuguguaacgggggaugauaaaaaugcaacugcuagcuucauuuacaaugggaggcuuguagauaguauuguuucaugguccaaagaaauccucaggacccaggagucagaaugcguuuguaucaauggaacuuguacaguaguaaugacugaugggagugcuucaggaaaagcugauacuaaaauacuauucauugaggaggggaaaaucguucauacuagcacauugucaggaagugcucagcaugucgaggagugcuccugcuauccucgauauccuggugucagaugugucugcagagacaacuggaaaggcuccaauaggcccauaguagauauaaacauaacggauuauagcauuguuuccaguuaugugugcucaggacuuguuggagacacacccagaaaaaacgacagcuccagcaguagccauugcuuggauccuaacaaugaagaagguggccauggagugaaaggcugggccuuugaugauggaaaugacguauggaugggaagaacgaucagcgagaaguuacgcucaggauaugaaaccuucaaagucauugaaggcugguccaacccuaauuccaaauugcagauaaauaggcaagucauaguugacagagguaauagguccgguuauucugguauuuucucuguugaaggcaaaagcugcaucaaucggugcuuuuauguggaguugauaaggggaagaaaagaggaaacugaagucuuguggaccucaaacaguauuguuguguuuuguggcaccucagguacauauggaacaggcucauggccugauggggcggacaucaaucucaugccuauauaa

SEQ ID NO: 55268 - RNA, 1410 nt, Artificial Sequence
  derived and/or modified CDS sequence (wt) from neuraminidase__InfluenzaA__AFY24208
augaauccaaaucaaaagauaauaacgauuggcucuguuucccucaccauuuccacaauaugcuucuucaugcaaauugccauccugauaacuacuguaacauugcauuucaagcaauaugaauucaacucccccccaaacaaccaagugaugcugugugaaccaacaauaauagaaagaaacauaacagagauaguguaucugaccaacaccaccauagagaaggaaauaugccccaaacuagcagaauacagaaauuggucaaagccgcaauguaacauuacaggauuugcaccuuuuucuaaggacaauucgauucggcuuuccgcugguggggacaucugggugacaagagaaccuuaugugucaugcgauccugacaaguguuaucaauuugcccuuggacagggaacaacacuaaacaacgugcauucaaaugacacaguacauaauaggaccccuuaucggacccuauugaugaaugaguuggguguuccauuucaucuggggaccaagcaagugugcauagcauggucaagcucaaguugucacgauggaaaagcauggcugcauguuuguguaacgggggaugaugaaaaugcaacugcuagcuucauuuacaaugggaggcuuguagauaguauuguuucaugguccaaaaaaauccucaggacccaggagucagaaugcguuuguaucaauggaacuuguacaguaguaaugacugaugggagugcuucaggaaaagcugauacuaaaauacuauucauugaggaggggaaaauuguucauacuagcacauuaucaggaagugcucagcaugucgaggagugcuccuguuauccucgauauccuggugucagaugugucugcagagacaacuggaaaggcuccaauaggcccaucguagauauaaacauaaaggauuauagcauuguuuccaguuaugugugcucaggacuuguuggagacacacccagaaaaaacgacagcuccaguaguagccauugcuuggauccaaacaaugaggaagguggucauggagugaaaggcugggccuuugaugauggaaaugacguguggaugggaagaacgaucagcgagagguuacgcucaggauaugaaaccuucaaagucauugaaggcugguccaacccuaacuccaaauugcagauaaauaggcaagucauaguugacagagguaacagguccgguuauucugguauuuucucuguugaaggcaaaagcugcaucaaucggugcuuuuauguggaguugauaaggggaagaaaacaggaaacugaagucuuguggaccucaaacaguauuguuguguuuuguggcacaucagguacauauggaacaggcucauggccugauggggcggacaucaaucucaugccuauauaa

SEQ ID NO: 55269 - RNA, 1410 nt, Artificial Sequence
  derived and/or modified CDS sequence (wt) from neuraminidase__InfluenzaA__AFY24219
augaauccaaaucaaaagauaauaacgauuggcucuguuucccucaccauuuccacaauaugcuucuucaugcaaauugccauccugauaacuacuguaacauugcauuucaagcaauaugaauucaacucccccccaaacaaccaagugaugcugugugaaccaacaauaauagaaagaaacauaacagagauaguguaucugaccaacaccaccauagagaaggaaauaugccccaaacuagcagaauacagaaauuggucaaagccgcaauguaacauuacaggauuugcaccuuuuucuaaggacaauucgauucggcuuuccgcugguggggacaucugggugacaagagaaccuuaugugucaugcgauccugacaaguguuaucaauuugcccuuggacagggaacaacacuaaacaacgugcauucaaaugacacaguacaugauaggaccccuuaccggacccuauugaugaaugaguuggguguuccauuucaucuggggaccaagcaagugugcauagcauggucaagcucaaguugucacgauggaaaagcauggcugcauguuuguguaacgggggaugaugaaaaugcaacugcuagcuucauuuacaaugggaggcuuguagauaguauuguuucaugguccaaaaaaauccucaggacccaggagucagaaugcguuuguaucaauggaacuuguacaguaguaaugacugaugggagugcuucaggaaaagcugauacuaaaauacuauucauugaggaggggaaaauuguucauacuagcacauuaucaggaagugcucagcaugucgaggagugcuccuguuauccucgauauccuggugucagaugugucugcagagacaacuggaaaggcuccaauaggcccaucguagauauaaacauaaaggauuauagcauuguuuccaguuaugugugcucaggacuuguuggagacacacccagaaaaaacgacagcuccagcaguagccauugcuuggauccaaacaaugaggaagguggucauggagugaaaggcugggccuuugaugauggaaaugacguguggaugggaagaacgaucagcgagaaguuacgcucaggauaugaaaccuucaaagucauugaaggcugguccaacccuaacuccaaauugcagauaaauaggcaagucauaguugacagagguaacagguccgguuauucugguauuuucucuguugaaggcaaaagcugcaucaaucggugcuuuuauguggaguugauaaggggaagaaaacaggaaacugaagucuuguggaccucaaacaguauuguuguguuuuguggcaccucagguacauauggaacaggcucauggccugauggggcggacaucaaucucaugccuauauaa

SEQ ID NO: 55270 - RNA, 1410 nt, Artificial Sequence
  derived and/or modified CDS sequence (wt) from neuraminidase__InfluenzaA__AGB12978
augaauccaaaccaaaggauaauaaccauugguucggucuguaugacaauuggaauggcuaacuuaauauuacaaauuggaaacauaaucucaauauggauuagccacucaauucaacuugggaaucaaaaucagauugaaacaugcaaucaaagcgucauuacuuaugaaaacaacacuuggguaaaucagacauauguuaacaucagcaacaccaacuuugcugcuagacagucagugguuuccgugaaauuagcgggcaauuccucucucugcccuguuaguggaugggcuauauacaguaaagacaacaguauaagaaucgguuccaagggggauguguuugucauaagggaaccauucauaucaugcucccccuuggaaugcagaaccuucuucuugacucaaggggccuugcuaaaugacaaacauuccaauggaaccauuaaagacaggagcccauaucgaacccuaaugagcugucccauuggugaaguucccucuccauacaacucaagauuugagucagucgcuuggucagcaagugcuugucaugauggcaucaauuggcuaacaauuggaauuucuggcccagacaauggggcaguggcuguguuaaaguacaacggcauaauaacagacacuaucaagaguuggagaaacaauauauugagaacacaagagucugaaugugcauguguaaaugguucuugcuuuaccauaaugaccgauggaccaagugauggacaggccucauacaagaucuucagaauagaaaagggaaagauagucaaaucagucgaaaugaaugccccuaauuaucacuaugaggaaugcuccuguuauccugauucuagugaaaucacaugugugugcagggauaacuggcauggcucgaaucgaccgugggugucuuucaaccagaaucuggaauaucagauaggauacauaugcagugggauuuucggagacaauccacgcccuaaugauaagacaggcaguugugguccaguaucgucuaauggagcaaauggaguaaaaggauuuucauucaaauacggcaaugguguuuggauagggagaacuaaaagcauuaguucaagaaaagguuuugagaugauuugggauccaaacggauggacugggacagacaauaacuucucaauaaagcaagauaucguaggaauaaaugaguggucaggauauagcgggaguuuuguucagcauccagaacuaacagggcuggacuguauaagaccuugcuucuggguugaacuaaucagagggcgacccaaagagaacacaaucuggacuagcgggagcagcauauccuuuugugguguaaacagugacacuguggguuggucuuggccagacggugcugaguugccauuuaccauugacaaguaa

SEQ ID NO: 55271 - RNA, 1410 nt, Artificial Sequence
  derived and/or modified CDS sequence (wt) from neuraminidase__InfluenzaA__AGB12989
augaauccaaaccaaaagauaauaaccauugguucggucuguaugacaauuggaauggcuaacuuaauauuacaaauuggaaacauaaucucaauauggauuagccacucaauucaacuugggaaucaaagucagauugaaacaugcaaucaaagcgucauuacuuaugaaaacaacacuuggguaaaucaaacauauguuaacaucagcaacaccaacuuugcugcuggacagucagugguuuccgugaaauuagcgggcaauuccucucucugcccuguuaguggaugggcuauauacaguaaagacaacaguauaagaaucgguuccaagggggauguguuugucauaagggaaccauucauaucaugcucccccuuggaaugcagaaccuucuucuugacucaaggggccuugcuaaaugacaaacauuccaauggaaccauuaaagacaggagcccauaucgaacccuaaugagcuguccuauuggugaaguucccucuccauacaacucaagauuugagucagucgcuuggucagcaagugcuugucaugauggcaucaauuggcuaacaauuggaauuucuggcccagacaauggggcaguggcuguguuaaaguacaacggcauaauaacagacacuaucaagaguuggagaaacaauauauugagaacacaagagucugaaugugcauguguaaaugguucuugcuuuaccauaaugaccgauggaccaagugauggacaggccucauacaagaucuucagaauagaaaagggaaagauagucaaaucagucgaaaugaaugccccuaauuaucacuaugaggaaugcuccuguuauccugauucuagugaaaucacaugugugugcagggauaacuggcauggcucgaaucgaccgugggugucuuucaaccagaaucuggaauaucagauaggauacauaugcagugggauuuucggagacaauccacgcccuaaugauaagacaggcaguugugguccaguaucgucuaauggagcaaauggaguaaaaggauuuucauucaaauacggcaaugguguuuggauagggagaacuaaaagcauuaguucaagaaaagguuuugagaugauuugggauccaaacggauggacugggacagacaauaacuucucaauaaagcaagauaucguaggaauaaaugaguggucaggauauagcgggaguuuuguucagcauccagaacuaacagggcuggauuguauaagaccuugcuucuggguugaacuaaucagagggcgacccaaagagaacacaaucuggacuagcgggagcagcauauccuuuugugguguaaacagugacacuguggguuggucuuggccagacggugcugaguugccauuuaccauugacaaguaa

SEQ ID NO: 55272 - RNA, 1410 nt, Artificial Sequence; identical to SEQ ID NO: 52837
  derived and/or modified CDS sequence (wt) from neuraminidase__InfluenzaA__AGB13009

SEQ ID NO: 55273 - RNA, 1410 nt, Artificial Sequence; identical to SEQ ID NO: 52837
  derived and/or modified CDS sequence (wt) from neuraminidase__InfluenzaA__AGB13019

SEQ ID NO: 55274 - RNA, 1410 nt, Artificial Sequence; identical to SEQ ID NO: 53021
  derived and/or modified CDS sequence (wt) from neuraminidase__InfluenzaA__AGB13029

SEQ ID NO: 55275 - RNA, 1410 nt, Artificial Sequence
  derived and/or modified CDS sequence (wt) from neuraminidase__InfluenzaA__AGB13039
augaauccaaaccaaaagauaauaaccauugguucggucuguaugacaauuggaauggcuaacuuaauauuacaaauuggaaacauaaucucaauauggauuagccacucaauucaacuugggaaucaaaaucagauugaaacaugcaaucaaagcgucauuacuuaugaaaacaacacuuggguaaaucagacauauguuaacaucagcaacaccaacuuugcugcuggacagucagugguuuccgugaaauuagcaggcaauucuucucucugcccuguuaguggaugggcuauauacaguaaagacaacaguauaagaaucgguuccaagggggauguguuugucauaagggaaccauucauaucaugcuccccuuuggaaugcagaaccuucuucuugacucaaggggccuugcuaaaugacaaacauuccaauggaaccauuaaagacaggagcccauaucgaacccuaaugagcuguccuauuggugaaguucccucuccauacaacucaagguuugagucagucgcuuggucagcaagugcuugucaugauggcaucaauuggcuaacaauuggaauuucuggcccagacaauggggcaguggcuguguuaaaguacaacggcauaauaacagacacuaucaagaguuggagaaacaauauauugagaacacaagaguccgaaugugcauguguaaauggcucuugcuuuacugugaugaccgauggaccaagugauggacaggccucauacaagaucuucagaauagaaaagggaaagauagucaaaucagucgaaaugaaugccccuaauuaucacuaugaggaaugcuccuguuauccugauucuagugaaaucacaugugugugcagggauaacuggcauggcgcgaaucgaccgugggugucuuucaaccagaaucuggaauaucagauaggauacauaugcagugggauuuucggagacaauccacgcccuaaugauaagacaggcaguugugguccaguaucgucuaauggagcaaauggaguaaaaggauuuucauucaaauacggcaaugguguuuggauagggagaacuaaaagcauuaguucaagaaacgguuuugagaugauuugggauccgaacggauggacugggacagacaauaacuucucaauaaagcaagauaucguaggaauaaaugaguggucaggauauagcgggaguuuuguucagcauccagaacuaacagggcuggauuguauaagaccuugcuucuggguugaacuaaucagagggcgacccaaagagaacacaaucuggacuagcgggagcagcauauccuuuugugguguaaacagugacacuguggguuggucuuggccagacggugcugaguugccauuuaccauugacaaguaa

SEQ ID NO: 55276 - RNA, 1410 nt, Artificial Sequence
  derived and/or modified CDS sequence (wt) from neuraminidase__InfluenzaA__AGB13051
augaauccaaaccaaaagauaauaaccauugguucggucuguaugacaauuggaauggcuaacuuaauauuacaaauuggaaacauaaucucaauauggauuagccacucaauucaacuugggaaucaaaaucagauugaaacaugcaaucaaagcgucauuacuuaugaaaacaacacuuggguaaaucagacauauguuaacaucagcaacaccaacuuugcugcuggacagucagugguuuccgugaaauuagcgggcaauuccucucucugcccuguuaguggaugggcuauauacaguaaagacaacaguauaagaaucgguuccaagggggauguguuugucauaagggaaccauucauaucaugcucccccuuggaaugcagaacuuucuucuugacucaaggggccuugcuaaaugacaaacauuccaauggaaccauuaaagacaggagcccauaucgaacccuaaugagcugucccauuggugaaguucccucuccauacaacucaagauuugagucagucgcuuggucagcaagugcuugucaugauggcaucaauuggcuaacaauuggaauuucuggcccagacaauggggcaguggcuguguuaaaguacaacggcauaauaacagacacuaucaagaguuggagaaacaauauauugagaacacaagagucugaaugugcauguguaaaugguucuugcuuuaccauaaugaccgauggaccaagugauggacaggccucauacaagaucuucagaauagaaaagggaaagauagucaaaucagucgaaaugaaugccccuaauuaucacuaugaggaaugcuccuguuauccugauucuagugaaaucacaugugugugcagggauaacuggcauggcucgaaucgaccgugggugucuuucaaccagaaucuggaauaucagauaggauacauaugcagugggauuuucggagacaauccacgcccuaaugauaagacaggcaguugugguccaguaucgucuaauggagcaaauggaguaaaaggauuuucauucaaauacggcaaugguguuuggauagggagaacuaaaagcauuaguucaagaaaagguuuugagaugauuugggauccaaacggauggacugggacagacaauaacuucucaauaaagcaagauaucguaggaauaaaugaguggucaggauauagcgggaguuuuguucagcauccagaacuaacagggcuggacuguauaagaccuugcuucuggguugaacuaaucagagggcgacccaaagagaacacaaucuggacuagcgggagcagcauauccuuuugugguguaaacagugacacuguggguuggucuuggccagacggugcugaguugccauuuaccauugacaaguaa

SEQ ID NO: 55277 - RNA, 1410 nt, Artificial Sequence
  derived and/or modified CDS sequence (wt) from neuraminidase__InfluenzaA__AGB13069
augaauccaaaccaaaagauaauaaccauugguucgaucuguaugacaauuggaauggcuaacuuaauauuacaaauuggaaacauaaucucaauauggauuagccacucaauucaacuugggaaucaaaaucaaauugaaacaugcaaucaaagcgucauuacuuaugaaaacaacacuuggguaaaucagacauauguuaacaucagcaacaccaacuuugcugcuggacagucagugguuuccgugaaauuagcaggcaauuccucucucugcccuguuaguggaugggcuauauacaguaaagacaacaguauaagaaucgguuccaagggggauguguuugucauaagggaaccauucauaucaugcucccccuuggaaugcagaaccuucuucuugacucaaggggccuugcuaaaugacaaacauuccaauggaaccauuaaagacaggagcccauaucgaacccuaaugagcuguccuauuggugaaguucccucuccauacaacucaagauuugagucagucgcuuggucagcaagugcuugucaugauggcaucaauuggcuaacaauuggaauuucuggcccagacaauggggcaguggcuguguuaaaguacaacggcauaauaacagacacuaucaagaguuggagaaacaauauauugagaacacaagagucugaaugugcauguguaaaugguucuugcuuuacuguaaugaccgauggaccaagugauggacaggccucauacaagaucuucagaauagaaaagggaaagauagucaaaucagucgaaaugaaugccccuaauuaucacuaugaggaaugcuccuguuauccugauucuagugaaaucacaugugugugcagggauaacuggcauggcucgaaucgaccguggauaucuuucaaccagaaucuggaauaucagauaggauacauaugcagugggauuuucggagacaauccacgcccuaaugauaagacaggcaguugugguccaguaucgucuaauggagcaaauggaguaaaaggauuuucauucaaauacggcaaugguguuuggauagggagaacuaaaagcauuaguucaagaaacgguuuugagaugauuugggauccgaacggauggacugggacagacaauaacuucucaauaaagcaagauaucguaggaauaaaugaguggucaggauauagcgggaguuuuguucagcauccagaacuaacagggcuggauuguauaagaccuugcuucuggguugaacuaaucagagggcgacccaaagagaacacaaucuggacuagcgggagcagcauauccuuuugugguguaaacagugacacuguggguuggucuuggccggacggugcugaguugccauuuaccauugacaaguaa

SEQ ID NO: 55278 - RNA, 1410 nt, Artificial Sequence
  derived and/or modified CDS sequence (wt) from neuraminidase__InfluenzaA__AGB13074
augaauccaaaccaaaagauaauaaccauugguucggucuguaugacaauuggaauggccaacuuaauauuacaaauuggaaacauaaucucaauauggauuagccacucaauucaacuugggaaucaaaaucagauugaaacaugcaaucaaagcgucauuacuuaugaaaacaacacuuggguaaaucagacauauguuaacaucagcaacaccaacuuugcugcuggacagucaguggcuuccgugaaauuagcgggcaauucuucucucugcccuguuaguggaugggcuauauacaguaaagacaacaguguaagaaucgguuccaagggggauguguuugucauaagggaaccauucauaucaugcucccccuuggaaugcagaaccuucuucuugacucaaggggccuugcuaaaugacaaacauuccaauggaaccauuaaagacaggagcccauaucgaacccuaaugagcuguccuauuggugaaguucccucuccauacaacucaagauuugagucagucgcuuggucagcaagugcuugucaugauggcaucaauuggcuaacaauuggaauuucuggcccagacaauggggcaguggcuguguuaaaguacaacggcauaauaacagacacuaucaagaguuggagaaacaauauauugagaacacaagagucugaaugugcauguguaaaugguucuugcuuuacuguaaugaccgauggaccaagugauggacaggccucauacaagaucuucagaauagaaaagggaaagauagucaaaucagucgaaaugaaugccccuaauuaucacuaugaggaaugcuccuguuauccugauucuagugaaaucacaugugugugcagggauaacuggcauggcucgaaucgaccguggguuucuuucaaccagaaucuggaauaucagauaggauacauaugcagugggauuuucggagacaauccacgcccuaaugauaagacaggcaguugugguccaguaucgucuaauggagcaaauggaguaaaaggauuuucauucaaauacggcaaugguguuuggauagggagaacuaaaagcauuaguucaagaaacgguuuugagaugauuugggauccgaacggauggacugggacagacaauaacuucucaauaaagcaagauaucguaggaauaaaugaguggucaggauauagcgggaguuuuguucagcauccagaacuaacagggcuggauuguauaagaccuugcuucuggguugaacuaaucagagggcgacccaaagagaacacaaucuggacuagcgggagcagcauauccuuuugugguguaaacagugacacuguggguuggucuuggccagacggugcugaguugccauuuaccauugacaaguaa

SEQ ID NO: 55279 - RNA, 1410 nt, Artificial Sequence
  derived and/or modified CDS sequence (wt) from neuraminidase__InfluenzaA__AGB13115
augaauccaaaccaaaagauaauaaccauugguucggucuguaugacaauuggaauggcuaacuuaauauuacaaauuggaaacauaaucucaauauggauuagccacucaauucaacuugggaaucaaaaucagauugaaacaugcaaucaaagcgucauuacuuaugaaaacaacacuuggguaaaucagacauauguuaacaucagcaacaccaacuuugcugcuggacagucaguggucuccgugaaauuagcgggcaauuccucucucugcccuguuaguggaugggcuauauacaguaaagacaacaguauaagaaucgguuccaagggggauguguuuguccuaagggaaccauucauaucaugcucccccuuggaaugcagaaccuucuucuugacucaaggggccuugcuaaaugacaaacauuccaauggaaccauuaaagacaggagcccauaucgaacccuaaugagcuguccuauuggugaaguucccucuccauacaacucaagauuugagucaguagcuuggucagcaagugcuugucaugauggcaucaauuggcuaacaauuggaauuucuggcccagacaauggggcaguggcuguguuaaaguacaacggcauaauaacagacacuaucaagaguuggagaaacaauauauugagaacacaagagucugaaugugcauguguaaaugguucuugcuuuaccauaaugaccgauggaccaagugauggacaggccucauacaagaucuucagaauagaaaagggaaagauagucaaaucagucgaaaugaaugccccuaauuaucacuaugaggaaugcuccuguuauccugauucuagugaaaucacaugugugugcagggauaacuggcguggcucgaaucgaccgugggugucuuucaaccagaaucuggaauaucagauaggauacauaugcagugggauuuucggagacaauccacgcccuaaugauaagacaggcaguugugguccaguaucgucuaauggagcaaauggaguaaaaggauuuucauucaaauacggcaaugguguuuggauagggagaacuaaaagcauuaguucaagaaaagguuuugagaugauuugggauccaaacggauggacugggacagacaauaacuucucaauaaagcaagauaucguaggaauaaaugaguggucaggauauagcgggaguuuuguucagcauccagaauuaacagggcuggacuguauaagaccuugcuucuggguugaacuaaucagagggcgacccaaagagaacacaaucuggacuagcgggagcagcauauccuuuugugguguaaacagugacacuguggguuggucuuggccagacggugcugaguugccauuuaccauugacaaguaa

SEQ ID NO: 55280 - RNA, 1410 nt, Artificial Sequence; identical to SEQ ID NO: 52837
  derived and/or modified CDS sequence (wt) from neuraminidase__InfluenzaA__AGB13133

SEQ ID NO: 55281 - RNA, 1410 nt, Artificial Sequence
  derived and/or modified CDS sequence (wt) from neuraminidase__InfluenzaA__AGB13152
augaauccaaaccaaaagauaauaaccauugguucggucuguaugacaauuggaauggcuaacuuaauauuacaaauuggaaacauaaucucaauauggauuagccacucaauucaacuugggaaucaaagucagauugaaacaugcaaucaaagcgucauuacuuaugaaaacaacacuuggguaaaucagacauauguuaacaucagcaacaccaacuuugcugcuggacagucagugguuuccgugaaauuggcgggcaauuccucucucugcccuguuaguggaugggcuauauacaguaaagacaacaguauaagaaucgguuccaagggggauguguuugucauaagggaaccauucauaucaugcucccccuuggaaugcagaaccuucuucuugacucaaggggccuugcuaaaugacaaacauuccaauggaaccauuaaagacaggagcccauaucgaacccuaaugagcuguccuauuggugaaguucccucuccauacaacucaagauuugagucagucgcuuggucagcaagugcuugucaugauggcaucaauuggcuaacaauuggaauuucuggcccagacaauggggcaguggcuguguuaaaguacaacggcauaauaacagacacuaucaagaguuggagaaacaauauauugagaacacaagagucugaaugugcauguguaaaugguucuugcuuuaccauaaugaccgauggaccaagugauggacaggccucauacaagaucuucagaauagaaaagggaaagauagucaaaucagucgaaaugaaugccccuaauuaucacuaugaggaaugcuccuguuauccugauucuagugaaaucacaugugugugcagggauaacuggcauggcucgaaucgaccgugggugucuuucaaccagaaucuggaauaucagauaggauacauaugcagugggauuuucggagacaauccacgcccuaaugauaagacaggcaguugugguccaguaucgucuaauggagcaaauggaguaaaaggauuuucauucaaauacggcaaugguguuuggauagggagaacuaaaagcauuaguucaagaaaagguuuugagaugauuugggauccaaauggauggacugggacagacaauaacuucucaauaaagcaagauaucguaggaauaaaugaguggucaggauauagcgggaguuuuguucagcauccagaacuaacagggcuggauuguauaagaccuugcuucuggguugaacuaaucagagggcgacccaaagagaacacaaucuggacuagcgggagcagcauauccuuuugugguguaaacagugacacuguggguuggucuuggccagacggugcugaguugccauuuaccauugacaaguaa

SEQ ID NO: 55282 - RNA, 1410 nt, Artificial Sequence; identical to SEQ ID NO: 52606
  derived and/or modified CDS sequence (wt) from neuraminidase__InfluenzaA__AGB13162

SEQ ID NO: 55283 - RNA, 1410 nt, Artificial Sequence
  derived and/or modified CDS sequence (wt) from neuraminidase__InfluenzaA__AGB13173
augaauccaaaccaaaagauaauaaccauugguucggucuguaugacaauuggaauggcuaacuuaauauuacaaauuggaaacauaaucucaauauggauuagccacucaauucaacuugggaaucaaagucagauugaaacaugcaaucaaagcgucauuacuuaugaaaauaacacuuggguaaaucagacauauguuaacaucagcaacaccaacuuugcugcuggacagucagugguuuccgugaaauuagcgggcaauuccucucucugcccuguuagugggugggcuauauacaguaaagacaacaguauaagaaucgguuccaagggggauguguuugucauaagggaaccauucauaucaugcucccccuuggaaugcagaaccuucuucuugacucaaggggccuugcuaaaugacaaacauuccaauggaaccauuaaagacaggagcccauaucgaacccuaaugagcuguccuauuggugaaguucccucuccauacaacucaagauuugagucagucgcuuggucagcaagugcuugucaugauggcaucaauuggcuaacaauuggaauuucuggcccagacaauggggcaguggcuguguuaaaguacaacggcauaauaacagacacuaucaagaguuggagaaacaauauauugagaacacaagagucugaaugugcauguguaaaugguucuugcuuuaccauaaugaccgauggaccaagugauggacaggccucauacaagaucuucagaauagaaaagggaaagauagucaaaucagucgaaaugaaugccccuaauuaucacuaugaggaaugcuccuguuauccugauucuagugaaaucacaugugugugcagggauaacuggcauggcucgaaucgaccgugggugucuuucaaccagaaucuggaauaucagauaggauacauaugcagugggauuuucggagacaauccacgcccuaaugauaagacaggcaguugugguccaguaucgucuaauggagcaaauggaguaaaaggauuuucauucaaauacggcaaugguguuuggauagggagaacuaaaagcauuaguucgagaaaagguuuugagaugauuugggauccaaacggauggacugggacagacaauaacuucucaauaaagcaagauaucguaggaacaaaugaguggucaggauauagcgggaguuuuguucagcauccagaacuaacagggcuggauuguauaagaccuugcuucuggguugaacuaaucagagggcgacccaaagagaacacaaucuggacuagcgggagcagcauauccuuuugugguguaaacagugacacuguggguuggucuuggccagacggugcugaguugccauuuaccauugacaauuaa

SEQ ID NO: 55284 - RNA, 1410 nt, Artificial Sequence
  derived and/or modified CDS sequence (wt) from neuraminidase__InfluenzaA__AGB13183
augaauccaaaccaaaagauaauaaccauugguucggucuguaugacaauuggaauggcuaacuuaauauuacaaauuggaaacauaaucucaauauggauuagccacucaauucaacuugggaaucaaaaucagauugaaacaugcaaucaaagcgucauuacuuaugaaaacaacacuuggguaaaucagacauauguuaacaucagcaacaccaacuuugcugcuggacagucagugguuuccgugaaauuagcgggcaauuccucucucugcccuguuaguggaugggcuauauacaguaaagacaacaguauaagaaucgguuccaagggggauguguuugucauaagggaaccauucauaucaugcucccccuuggaaugcagaaccuucuucuugacucaaggggccuugcuaaaugacaaacauuccaauggaaccauuaaagacaggagcccauaucgaacccuaaugagcugucccauuggugaaguucccucuccauacaacucaagauuugagucagucgcuuggucagcaagugcuugucaugauggcaucaauuggcuaacaauuggaauuucuggccaagacaauggggcaguggcuguguuaaaguacaacggcauaauaacagacacuaucaagaguuggagaaacaauauauugagaacacaagagucugaaugugcauguguaaaugguucuugcuuuaccauaaugaccgauggaccaagugauggacaggccucauacaagaucuucagaauagaaaagggaaagauagucaaaucagucgaaaugaaugccccuaauuaucacuaugaggaaugcuccuguuauccugauucuagugaaaucacaugugugugcagggauaacuggcauggcucgaaucgaccgugggugucuuucaaccagaaucuggaauaucagauaggauacauaugcagugggauuuucggagacaauccacgcccuaaugauaagacaggcaguugugguccaguaucgucuaauggagcaaauggaguaaaaggauuuucauucaaauacggcaaugguguuuggauagggagaacuaaaagcauuaguucaagaaaaggcuuugagaugauuugggauccaaacggauggacugggacagacaauaacuucucaauaaagcaagauaucguaggaauaaaugaguggucaggauauagcgggaguuuuguucagcauccagaacuaacagggcuggacuguauaagaccuugcuucuggguugaacuaaucagagggcgacccaaagagaacacaaucuggacuagcgggagcagcauauccuuuugugguguaaacagugacacuguggguuggucuuggccagacggugcugaguugccauuuaccauugacaaguaa

SEQ ID NO: 55285 - RNA, 1410 nt, Artificial Sequence; identical to SEQ ID NO: 53021
  derived and/or modified CDS sequence (wt) from neuraminidase__InfluenzaA__AGB13193

SEQ ID NO: 55286 - RNA, 1410 nt, Artificial Sequence
  derived and/or modified CDS sequence (wt) from neuraminidase__InfluenzaA__AGB13203
augaauccaaaccaaaagauaauaaccauugguucggucuguaugacaauuggaauggcuaacuuaauauuacaaauuggaaacauaaucucaauauggauuagccacucaauucaacuugggaaucaaaaucagauugaaacaugcaaucaaagcgucauuacuuaugaaaacaacacuuggguaaaucagacauauguuaacaucagcaacaccaacuuugcugcuggacagucagugguuuccgugaaauuagcgggcaauuccucucucugcccuguuaguggaugggcuauauacaguaaagacaacaguauaagaaucgguuccaagggggauguguuugucauaagggaaccauucauaucaugcucccccuuggaaugcagaaccuucuucuugacucaaggggccuugcuaaaugacaaacauuccaauggaaccauuaaagacaggagcccauaucgaacccuaaugagcuguccuauuggugaaguucccucuccauacaacucaagauuugagucagucgcuuggucagcaagugcuugucaugauggcaucaauuggcuaacaauuggaauuucuggcccagacaauggggcaguggcuguguuaaaguacaacggcauaauaacagacacuaucaagaguuggagaaacaauauauugagaacacaagagucugaaugugcauguguaaaugguucuugcuuuaccauaaugaccgauggaccaagugauggacaggccucauacaagaucuucagaauagaaaagggaaagauagucaaaucagucgaaaugaaugccccuaauuauuacuaugaggaaugcuccuguuauccugauucuagugaaaucacaugugugugcagggauaacuggcauggcucgaaucgaccgugggugucuuucaaucagaaucuggaauaucagauaggauacauaugcagugggauuuucggagacaauccacgcccuaaugauaagacaggcaguugugguccaguaucgucuaauggagcaaauggaguaaaaggauuuucauucaaauacggcaaugguguuuggauagggagaacuaaaagcauuaguucaagaaaagguuuugagaugauuugggauccaaacggauggacugggacagacaauaacuucucaauaaagcaagauaucguaggaauaaaugaguggucaggauauagcgggaguuuuguucagcauccagaacuaacagggcuggacuguauaagaccuugcuucuggguugaacuaaucagagggcgacccaaagagaacacaaucuggacuagcgggagcagcauauccuuuugugguguaaacagugacacuguggguuggucuuggccagacggugcugaguugccauuuaccauugacaaguaa

SEQ ID NO: 55287 - RNA, 1410 nt, Artificial Sequence
  derived and/or modified CDS sequence (wt) from neuraminidase__InfluenzaA__AGB13213
augaauccaaaccaaaagauaauaaccauugguucggucuguaugacaauuggaauggcuaacuuaauauuacaaauuggaaacauaaucucaauauggauuagccacucaauucaacuugggaaucaaaaucagauugaaacaugcaaucaaagcgucauuacuuaugaaaacaacacuuggguaaaucagacauauguuaacaucagcaacaccaacuuugcugcuggacagucagugguuuccgugaaauuagcgggcaauuccucucucugcccuguuaguggaugggcuauauacaguaaagacaacaguauaagaaucgguuccaagggggauguguuugucauaagggaaccauucauaucaugcucccccuuggaaugcagaaccuucuucuugacucaaggggcuuugcuaaaugacaaacauuccaauggaaccauuaaagacaggagcccauaucgaacccuaaugagcuguccuauuggugaaguucccucuccauacaacucaagauuugagucagucgcuuggucagcaagugcuugucaugauggcaucaauuggcuaacaauuggaauuucuggcccagacaauggggcaguggcuguguuaaaguacaacggcauaauaacagacacuaucaagaguuggagaaacaauauauugagaacacaagagucugaaugugcauguguaaaugguucuugcuuuaccauaaugaccgauggaccaagugauggacaggccucauacaagaucuucagaauagaaaagggaaagauagucaaaucagucgaaaugaaugccccuaauuaucacuaugaggaaugcuccuguuauccugauucuagugaaaucacaugugugugcagggauaacuggcauggcucgaaucgaccgugggugucuuucaaccagaaucuggaauaucagauaggauacauaugcagugggauuuucggagacaauccacgcccuaaugauaagacaggcaguugugguccaguaucgucuaauggagcaaauggaguaaaaggauuuucauucaaauacggcaaugguguuuggauagggagaacuaaaagcauuaguucaagaaaagguuuugagaugauuugggauccaaacggauggacugggacagacaauaacuucucaauaaagcaagauaucguaggaauaaaugaguggucaggauauagcgggaguuuuguucagcauccagaacuaacagggcuggauuguauaagaccuugcuucuggguugaacuaaucagagggcgacccaaagagaacacaaucuggacuagcgggagcagcauauccuuuugugguguaaacagugacacuguggguuggucuuggccagacggugcugaguugccauuuaccauugacaaguaa

SEQ ID NO: 55288 - RNA, 1410 nt, Artificial Sequence
  derived and/or modified CDS sequence (wt) from neuraminidase__InfluenzaA__AGB13223
augaauccaaaccaaaagauaauaaccauugguucggucuguaugacaauuggaauggcuaacuuaauauuacaaauuggaaacauaaucucaauauggauuagccacucaauucaacuugggaaucaaaaucagauugaaacaugcaaucaaagcgucauuacuuaugaaaacaacacuuggguaaaucagacauauguuaacaucagcaacaccaacuuugcugcuggacagucagugguuuccgugaaauuagcgggcaauuccucucucugcccuguuaguggaugggcuauauacaguaaagacaacaguauaagaaucgguuccaagggggauguguuugucauaagggaaccauucauaucaugcucccccuuggaaugcagaaccuucuucuugacucaaggggccuugcuaaaugacaaacauuccaauggaaccauuaaagacaggagcccauaucgaacccuaaugagcuguccuauuggugaaguucccucuccauacaacucaagauuugagucagucgcuuggucagcaagugcuugucaugauggcaucaauuggcugacaauuggaauuucuggcccagacaauggggcaguggcuguguuaaaguacaacggcauaauaacagacacuaucaagaguuggagaaacaauauauugagaacacaagagucugaaugugcauguguaaaugguucuugcuuuaccauaaugaccgauggaccaagugauggacaggccucauacaagaucuucagaauagaaaagggaaagauagucaaaucagucgaaaugaaugccccuaauuaucacuaugaggaaugcuccuguuauccugauucuagugaaaucacaugugugugcagggauaacuggcauggcucgaaucgaccgugggugucuuucaaccagaaucuggaauaucagauaggauacauaugcagugggauuuucggagacaauccacgcccuaaugauaagacaggcaguugugguccaguaucgucuaauggagcaaauggaguaaaaggauuuucauucaaauacggcaaugguguuuggauagggagaacuaaaagcauuaguucaagaaaagguuuugagaugauuugggauccaaacggauggacugggacagacaauaacuucucaauaaagcaagauaucguaggaauaaaugaguggucaggauauagcgggaguuuuguucagcauccagaacuaacagggcuggacuguauaagaccuugcuucuggguugaacuaaucagagggcgacccaaagaaaacacaaucuggacuagcgggagcagcauauccuuuugugguguaaacagugacacuguggguuggucuuggccagacggugcugaguugccauuuaccauugacaaguaa

SEQ ID NO: 55289 - RNA, 1410 nt, Artificial Sequence; identical to SEQ ID NO: 53021
  derived and/or modified CDS sequence (wt) from neuraminidase__InfluenzaA__AGB13233

SEQ ID NO: 55290 - RNA, 1410 nt, Artificial Sequence
  derived and/or modified CDS sequence (wt) from neuraminidase__InfluenzaA__AGB13243
augaauccaaaccaaaagauaauaaccauugguucggucuguaugacaauuggaauggcuaacuuaauauuacaaauuggaaacauaaucucaauauggauuagccacucaauucaacuugggaaucaaaaucagauugaaacaugcaaucaaagcgucauuacuuaugaaaacaacacuuggguaaaucagacauauguuaacaucagcaacaccaacuuugcugcuggacagucagugguuuccgugaaauuagcgggcaauuccucucucugcccuguuaguggaugggcuauauacaguaaagacaacaguauaagaaucgguuccaagggggauguguuugucauaagggaaccauucauaucaugcucccccuuggaaugcagaaccuucuucuugacucaaggggccuugcuaaaugacaaacauuccaauggaaccauuaaagacaggagcccauaucgaacccuaaugagcugucccauuggugaaguucccucuccauacaacucaagauuugagucagucgcuuggucagcaagugcuugucaugauggcaucaauuggcuaacaauuggaauuucuggcccagacaauggggcaguggcuguguuaaaguacaacggcauaauaacagacacuaucaagaguuggagaaacaauauauugagaacacaagagucugaaugugcauguguaaaugguucuugcuuuaccauaaugaccgauggaccaagugauggacaggccucauacaagaucuucagaauagaaaggggaaagauagucaaaucagucgaaaugaaugccccuaauuauuacuaugaggaaugcuccuguuauccugauucuagugaaaucacaugugugugcagggauaacuggcauggcucgaaucgaccgugggugucuuucaaccagaaucuggaauaucagauaggauacauaugcagugggguuuucggagacaauccacgcccuaaugauaagacaggcaguugugguccaguaucgucuaauggagcaaauggaguaaaaggauuuucauucaaauacggcaaugguguuuggauagggagaacuaaaagcauuaguucaagaaaagguuuugagaugauuugggauccaaacggauggacugggacagacaauaacuucucaauaaagcaagauaucguaggaauaaaugaguggucaggauauagcgggaguuuuguucagcauccagaacuaacagggcuggacuguauaagaccuugcuucuggguugaacuaaucagagggcgacccaaagagaacacaaucuggacuagcgggagcagcauauccuuuugugguguaaacagugacacuguggguuggucuuggccagacggugcugaguugccauuuaccauugacaaguaa

SEQ ID NO: 55291 - RNA, 1410 nt, Artificial Sequence
  derived and/or modified CDS sequence (wt) from neuraminidase__InfluenzaA__AGB13253
augaauccaaaccaaaagauaauaaccauugguucggucuguaugacaauuggaauggcuaacuuaauauuacaaauuggaaacauaaucucaauauggauuagccacucaauucaacuugggaaucaaaaucagauugaaacaugcaaucaaagcgucauuacuuaugaaaacaacacuuggguaaaucagacauauguuaacaucagcaacaccaacuuugcugcuggacagucagugguuuccgugaaauuagcgggcaauuccucucucugcccuguuaguggaugggcuauauacaguaaagacaacaguauaagaaucgguuccaagggggauguguuugucauaagggaaccauucauaucaugcucccccuuggaaugcagaaccuucuucuugacucaaggggccuugcuaaaugacaaacauuccaauggaaccauuaaagacaggagcccauaucgaacccuaaugagcugucccauuggugaaguucccucuccauacaacucaagauuugagucagucgcuuggucagcaagugcuugucaugauggcaucaauuggcuaacaauuggaauuucuggcccagacaauggggcaguggcuguguuaaaguacaacggcauaauaacagacacuaucaagaguuggagaaacaauauauugagaacacaagagucugaaugugcauguguaaaugguucuugcuuuaccauaaugaccgauggaccaagugauggacaggccucauacaagaucuucagaauagaaaagggaaagauagucaaaucagucgaaaugaaugccccuaauuauuacuaugaggaaugcuccuguuauccugauucuagugaaaucacaugugugugcagggauaacuggcauggcucgaaucgaccgugggugucuuucaaccagaaucuggaauaucagauaggauacauaugcagugggauuuucggagacaauccacgcccuaaugauaagacaggcaguugugguccaguaucgucuaauggagcaaauggaguaaaaggauuuucauucaaauacggcaaugguguuuggauagggagaacuaaaagcauuaguucaagaaaagguuuugagaugauuugggauccaaacggauggacugggacagacaacaacuucucaauaaagcaagauaucguaggaauaaaugaguggucaggauauagcgggaguuuuguucagcauccagaacuaacagggcuggacuguauaagaccuugcuucuggguugaacuaaucagagggcgacccaaagagaacacaaucuggacuagcgggagcagcauauccuuuugugguguaaacagugacacuguggguuggucuuggccagacggugcugaguugccauuuaccauugacaaguaa

SEQ ID NO: 55292 - RNA, 1410 nt, Artificial Sequence
  derived and/or modified CDS sequence (wt) from neuraminidase__InfluenzaA__AGB13263
augaauccaaaccaaaagauaauaaccauugguucggucuguaugacaauuggaauggcuaacuuaauauuacaaauuggaaacauaaucucaauauggauuagccacucaauucaacuugggaaucaaaaucagacugaaacaugcaaucaaagcgucauuacuuaugaaaacaacacuuggguaaaucagacauauguuaacaucagcaacaccaacuuugcugcaggacagucagugguuuccgugaaauuagcgggcaauuccucucucugcccuguuaguggaugggcuauauacaguaaagacaacaguauaagaaucgguuccaagggggauguguuugucauaagggaaccauucauaucaugcucccccuuggaaugcagaaccuucuucuugacucaaggggccuugcuaaaugacaaacauuccaauggaaccauuaaagacaggagcccauaucgaacccuaaugagcuguccuauuggugaaguucccucuccauacaacucaagauuugagucagucgcuuggucagcaagugcuugucaugaugguaucaauuggcuaacaauuggaauuucuggcccagacaauggggcaguggcuguguuaaaguacaacggcauaauaacagacacuaucaagaguuggagaaacaauauauugagaacacaagagucugaaugugcauguguaaaugguucuugcuuuacuguaaugaccgauggaccaagugauggacaggccucauacaagaucuucagaauagaaaagggaaagauagucaaaucagucgaaaugaaagccccuaauuaucacuaugaggaaugcuccuguuauccugauucuagugaaaucacaugugugugcagggauaacuggcauggcucgaaucgaccgugggugucuuucaaccagaaucuggaauaucggauaggauacauaugcagugggauuuucggagacaauccacgcccuaaugauaagacaggcaguugugguccaguaucgucuaauggagcaaauggaguaaaaggauuuucauucaaauacggcaaugguguuuggauagggagaacuaaaagcauuaguucaagaaacgguuuugagaugauuugggauccgaacggauggacugggacagacaauaacuucucaauaaagcaagauaucauaggaauaaaugaguggucaggauauagcgggaguuuuguucagcauccagaacuaacagggcuggauuguauaagaccuugcuucuggguugaacuaaucagagggcggcccaaagagaacacaaucuggacuagcgggagcagcauauccuuuugugguguaaacagugacacuguggguuggucuuggccagacggugcugaguugccauuuaccguugacaaguaa

SEQ ID NO: 55293 - RNA, 1410 nt, Artificial Sequence; identical to SEQ ID NO: 52817
  derived and/or modified CDS sequence (wt) from neuraminidase__InfluenzaA__AGB13273

SEQ ID NO: 55294 - RNA, 1410 nt, Artificial Sequence
  derived and/or modified CDS sequence (wt) from neuraminidase__InfluenzaA__AGB13283
augaauccaaaccaaaagauaauaaccauugguucggucuguaugacaauuggaauggcuaacuuaauauuacaaauuggaaacauaaucucaauauggauuagccacucaauucaacuugggaaucaaaaucagauugaaacaugcaaucaaagcgucauuacuuaugaaaacaacacuuggguaaaucagacauauguuaacaucagcaacaccaacuuugcugcuggacagucagugguuuccgugaaauuagcgggcaauuccucucucugcccuguuaguggaugggcuauauacaguaaagacaacaguauaagaaucgguuccaagggggauguguuugucauaagggaaccauucauaucaugcucccccuuggaaugcagaaccuucuucuugacucaaggggcuuugcuaaaugacaaacauuccaauggaaccauuaaagacaggagcccauaucgaacccuaaugagcuguccuauuggugaaguucccucuccauacaacucaagauuugagucagucgcuuggucagcaagugcuugucaugauggcaucaauuggcuaacaauuggaauuucuggcccagacaauggggcaguggcuguguuaaaguacaacggcauaauaacagacacuaucaagaguuggagaaacaauauauugagaacacaagagucugaaugugcauguguaaaugguucuugcuuuaccauaaugaccgauggaccaagugauggacaggccucauacaagaucuucagaauagaaaagggaaagauagucaaaucagucgaaaugaaugccccuaauuaucacuaugaggaaugcuccuguuauccugauucuagugaaaucacaugugugugcagggauaacuggcauggcucgaaucgaccgugggugucuuucaaccagaaucuggaauaucagauaggauacauaugcagcgggauuuucggagacaauccacgcccuaaugauaagacaggcaguugugguccaguaucgucuaauggagcaaauggaguaaaaggauuuucauucaaauacggcaaugguguuuggauagggagaacuaaaagcauuaguucaagaagagguuuugagaugauuugggauccaaacggauggacugggacagacaauaacuucucaauaaagcaagauaucguaggaauaaaugaguggucaggauauagcgggaguuuuguucagcauccagaacuaacagggcuggauuguauaagaccuugcuucuggguugaacuaaucagagggcgacccaaagagaacacaaucuggacuagcgggagcagcauauccuuuugugguguaaacagugacacuguggguuggucuuggccagacggugcugaguugccauuuaccauugacaaguaa

SEQ ID NO: 55295 - RNA, 1410 nt, Artificial Sequence
  derived and/or modified CDS sequence (wt) from neuraminidase__InfluenzaA__AGB13293
augaauccaaaccaaaagauaauaaccauugguucggucuguaugacaauuggaauggcuaacuuaauauuacaaauuggaaacauaaucucaauauggauuagccacucaauucaacuugggaaucaaaaucagauugaaacaugcaaucaaagcgucauuacuuaugaaaauaacacuuggguaaaucagacauauguuaacaucagcaacaccaacuuugcugcuggacagucagugguuuccgugaaauuagcgggcaauuccucucucugcccuguuaguggaugggcuauauacaguaaagacaacaguauaagaaucgguuccaagggggauguguuugucauaagggaaccauucauaucaugcucccccuuggaaugcagaaccuucuucuugacucaaggggccuugcuaaaugacaaacauuccaauggaaccauuaaagacaggagcccauaucgaacccuaaugagcugucccauuggugaaguucccucuccauacaacucaagauuugagucagucgcuuggucagcaagugcuugucaugauggcaucaauuggcuaacaauuggaauuucuggcccagacaauggggcaguggcuguguuaaaguacaacggcauaauaacagacacuaucaagaguuggagaaacaauauauugagaacacaagagucugaaugugcauguguaaaugguucuugcuuuaccauaaugaccgauggaccaagugauggacaggccucauacaagaucuucagaauagaaaagggaaagauagucaaaucagucgaaaugaaugccccuaauuaucacuaugaggaaugcuccuguuauccugauucuagugaaaucacaugugugugcagggauaacuggcauggcucgaaucgaccgugggugucuuucaaccagaaucuggaauaucagauaggauacauaugcagugggauuuucggagacaauccacgcccuaaugauaagacaggcaguugugguccaguaucgucuaauggagcaaauggaguaaaaggauuuucauucaaauacggcaaugguguuuggauagggagaacuaaaagcauuaguucaagaaaagguuuugagaugauuugggauccaaacggauggacugggacagacaauaacuucucaauaaagcaagauaucguaggaauaaaugaguggucaggauauagcgggaguuuuguucaacauccagaacuaacagggcuggacuguauaagaccuugcuucuggguugaacuaaucagagggcgacccaaagagaacacaaucuggacuagcgggagcagcauauccuuuugugguguaaacagugacacuguggguuggucuuggccagacggugcugaguugccauuuaccauugacaaguaa

SEQ ID NO: 55296 - RNA, 1410 nt, Artificial Sequence
  derived and/or modified CDS sequence (wt) from neuraminidase__InfluenzaA__AGB13303
augaauccaaaccaaaagauaauaaccauugguucggucuguaugacaauuggaauggcuaacuuaauauuacaaauuggaaacauaaucucaauauggauuagccacucaauucaacuugggaaucaaaaucagauugaaacaugcaaucaaagcgucauuacuuaugaaaacaacacuuggguaaaccagacauauguuaacaucagcaacaccaacuuugcugcuggacagucagugguuuccgugaaauuagcgggcaauuccucucucugcccuguuaguggaugggcuauauacaguaaagacaacaguauaagaaucgguuccaagggggauguguuugucauaagggaaccauucauaucaugcucccccuuggaaugcagaaccuucuucuugacucaaggggccuugcuaaaugacaaacauuccaauggaaccauuaaagacaggagcccauaucgaacccuaaugagcuguccuauuggugaaguucccucuccauacaacucaagauuugagucagucgcuuggucagcaagugcuugucaugauggcaucaauuggcuaacaauuggaauuucuggcccagacaauggggcaguggccguguuaaaguacaacggcauaauaacagacacuaucaagaguuggagaaacaauauauugagaacacaagagucugaaugugcauguguaaaugguucuugcuuuaccauaaugaccgauggaccaagugauggacaggccucauacaagaucuucagaauagaaaagggaaagauagucaaaucagucgaaaugaaugccccuaauuaucacuaugaggaaugcuccuguuauccugauucuagugaaaucacaugugugugcagggauaacuggcauggcucgaaucgaccgugggugucuuucaaccagaaucuggaauaucagauaggauacauaugcagugggauuuucggagacaauccacgcccuaaugauaagacaggcaguugugguccaguaucgucuaauggagcaaauggaguaaaaggauuuucauucaaauacggcaaugguguuuggauagggagaacuaaaagcauuaguucaagaaaagguuuugagaugauuugggauccaaacggauggacugggacagacaauaacuucucaauaaagcaagauaucguaggaauaaaugaguggucaggauauagcgggaguuuuguucagcauccagaacuaacagggcuggacuguauaagaccuugcuucuggguugaacuaaucagagggcgacccaaagagaacacaaucuggacuagcgggagcagcauauccuuuugugguguaaacagugacacuguggguuggucuuggccagacggugcugaguugccauuuaccauugacaaguaa

SEQ ID NO: 55297 - RNA, 1410 nt, Artificial Sequence
  derived and/or modified CDS sequence (wt) from neuraminidase__InfluenzaA__AGB13313
augaauccaaaccaaaagauaauaaccauugguucggucuguaugacaauuggaauggcuaacuuaauauuacaaauuggaaacauaaucucaauauggauuagccacucaauucaacuugggaaucaaaaucagauugaaacaugcaaucaaagcgucauuacuuaugaaaacaacacuuggguaaaucagacauauguuaacaucagcaacaccaacuuugcugcuggacagucagugguuuccgcgaaauuagcgggcaauuccucucucugcccuguuaguggaugggcuauauacaguaaagacaacaguauaagaaucgguuccaagggggauguguuugucauaagggaaccauucauaucaugcucccccuuggaaugcagaaccuucuucuugacucaaggggccuugcuaaaugacaaacauuccaauggaaccauuaaagacaggagcccauaucgaacccuaaugagcuguccuauuggugaaguucccucuccauacaacucaagauuugagucagucgcuuggucagcaagugcuugucaugauggcaucaauuggcuaacaauuggaauuucuggcccagacaauggggcaguggcuguguuaaaguacaacggcauaauaacagacacuaucaagaguuggagaaacaauauauugagaacacaagagucugaaugugcauguguaaaugguucuugcuuuacuguaaugaccgauggaccaagugauggacaggccucauacaagaucuucagaauagaaaagggaaagauagucaaaucagucgaaaugaaugccccuaauuaucacuaugaggaaugcuccuguuauccugauucuagugaaaucacaugugugugcagggauaacuggcauggcucgaaucgaccguggguaucuuucaaccagaaucuggaauaucagauaggauacauaugcagugggauuuucggagacaauccacgcccuaaugauaagaaaggcaguugugguccaguaucgucuaauggagcaaauggaguaaaaggauuuucauucaaauacggcaaugguguuuggauagggagaacuaaaagcauuaguucaagaaacgguuuugagaugauuugggauccgaacggauggacugggacagacaauaacuucucaauaaagcaagauaucguagggauaaaugaguggucaggauauagcgggaguuuuguucagcauccagaacuaacagggcuggauuguauaagaccuugcuucuggguugaacuaaucagagggcgacccaaagagaacacaaucuggacuagcgggagcagcauauccuuuugugguguaaacagugacacuguggguuggucuuggccggacggugcugaguugccauuuaccauugacaaguaa

SEQ ID NO: 55298 - RNA, 1410 nt, Artificial Sequence; identical to SEQ ID NO: 52837
  derived and/or modified CDS sequence (wt) from neuraminidase__InfluenzaA__AGB13323

SEQ ID NO: 55299 - RNA, 1410 nt, Artificial Sequence
  derived and/or modified CDS sequence (wt) from neuraminidase__InfluenzaA__AGB13333
augaauccaaaccaaaagauaauaaccauugguucggucuguaugacaauuggaauggcuaacuuaauauuacaaauuggaaacauaaucucaauauggauuagccacucaauucaacuugggaaucaaagucagauugaaacaugcaaucaaagcgucauuacuuaugaaaacaacacuuggguaaaucagacauauguuaacaucagcaacaccaacuuugcugcuggacagucagcgguuuccgugaaauuagcgggcaauuccucucucugcccuguuaguggaugggcuauauacaguaaagacaacaguauaagaaucgguuccaagggggauguguuugucauaagggaaccauucauaucaugcucccccuuggaaugcagaaccuucuucuugacucaaggggccuugcuaaaugacaaacauuccaauggaaccauuaaagacaggagcccauaucgaacccuaaugagcuguccuauuggugaaguucccucuccauacaacucaagauuugagucagucgcuuggucagcaagugcuugucaugauggcaucaauuggcuaacaauuggaauuucuggcccagacaauggggcaguggcuguguuaaaguacaacggcauaauaacagacacuaucaagaguuggagaaacaauauauugaggacacaagagucugaaugugcauguguaaaugguucuugcuuuaccauaaugaccgauggaccaagugauggacaggccucauacaagaucuucagaauagaaaagggaaagauagucaaaucagucgaaaugaaugccccuaauuaucacuaugaggaaugcuccuguuauccugauucuagugaaaucacaugugugugcagggauaacuggcauggcucgaaucgaccgugggugucuuucaaccagaaucuggaauaucaaauaggauacauaugcagugggauuuucggagacaauccacgcccuaaugauaagacaggcaguugugguccaguaucgucuaauggagcaaauggaguaaaaggauuuucauucaaauacggcaaugguguuuggauagggagaacuaaaagcauuaguucaagaaaagguuuugagaugauuugggauccaaacggauggacugggacagacaauaacuucucaauaaagcaagauaucguaggaauaaaugaguggucaggauauagcgggaguuuuguucagcauccagaacuaacagggcuggauuguauaagaccuugcuucuggguugaacuaaucagagggcgacccaaagagaacacaaucuggacuagcgggagcagcauauccuuuugugguguaaacagugacacuguggguuggucuuggccagacggugcugaguugccauuuaccauugacaaguaa

SEQ ID NO: 55300 - RNA, 1410 nt, Artificial Sequence
  derived and/or modified CDS sequence (wt) from neuraminidase__InfluenzaA__AGB13343
augaauccaaaccaaaagauaauaaccauugguucggucuguaugacaauuggaauggcuaacuuaauauuacaaauuggaaacauaaucucaauauggauuagccacucaauucaacuugggaaucaaaaucagauugaaacaugcaaucaaagcgucauuacuuaugaaaacaacacuuggguaaaucagacauauguuaacaucagcaacaccaacuuugcugcuggacagucagugguuuccgugaaauuagcgggcaauuccucucucugcccuguuaguggaugggcuauauacaguaaagacaacaguauaagaaucgguuccaagggggauguguuugucauaagggaaccauucauaucaugcucccccuuggaaugcagaaccuucuucuugacucaaggggccuugcuaaaugacaaacauuccaauggaaccauuaaagacaggagcccauaucgaacccuaaugagcugucccauuggugaaguucccucuccauacaacucaagauuugagucagucgcuuggucagcaagugcuugucaugauggcaucaauuggcuaacaauuggaauuucuggcccagacaauggggcaguggcuguguuaaaguacaacggcauaauaacagacacuaucaagaguuggagaaacaauauauugagaacacaagagucugaaugugcauguguaaaugguucuugcuuuaccauaaugaccgauggaccaagugauggacaggccucauacaagaucuucagaauagaaaagggaaagauagucaaaucagucgaaaugaaugccccuaauuaucacuaugaggaaugcuccuguuauccugauucuagugaaaucacaugugugugcagggauaacuggcauggcucgaaucgaccgugggugucuuucaaccagaaucuggaauaucagauaggauacauaugcagugggauuuucggagacaauccacgcccuaaugauaagacaggcaguugugguccaguaucgucuaauggagcaaauggaguaaaaggauuuucauucaaauacggcaaugguguuuggauagggagaacuaaaagcauuaguucaagaaaagguuuugagaugauuugggauccaaacggauggacugggacagacaauaacuucucaauaaagcaagauaucguaggaauaaaugaguggucaggauauagcgggaguuuuguucagcauccagaacuaacagggcuggacuguauaagaccuugcuucuggguugaacuaaucagagggcgacccaaagagaacacaaucuggacuagcgggagcagcauaucuuuuugugguguaaacagugacacuguggguuggucuuggccagacggugcugaguugccauuuaccauugacaaguaa

SEQ ID NO: 55301 - RNA, 1410 nt, Artificial Sequence
  derived and/or modified CDS sequence (wt) from neuraminidase__InfluenzaA__AGB13353
augaauccaaaccaaaagauaauaaccauugguucggucuguaugacaauuggaauggcuaacuuaauauuacaaauuggaaacauaaucucaauauggauuagccacucaauucaacuugggaaucaaaaucagauugaaacaugcaaucaaagcgucauuacuuaugaaaacaacacuuggguaaaucagacauauguuaacaucagcaacaccaacuuugcugcuggacagucagugguuuccgugaaauuagcgggcaauucuucucucugcccuguuaguggaugggcuauauacaguaaagacaacaguauaagaaucgguuccaagggggauguguuugucauaagggaaccauucauaucaugcuccccuuuggaaugcagaaccuucuucuugacucaaggggccuugcuaaaugacaaacauuccaauggaaccauuaaagacaggagcccauaucgaacccuaaugagcuguccuauuggugaaguucccucuccauacaacucaagauuugagucagucgcuuggucagcaagugcuugucaugauggcaucaauuggcuaacaauuggaauuucuggcccagacaauggggcaguggcuguguuaaaguacaacggcauaauaacagacacuaucaagaguuggagaaacaauauauugagaacacaagaguccgaaugugcauguguaaauggcucuugcuuuacugugaugaccgauggaccaagugauggacaggccucauacaagaucuucagaauagaaaagggaaagauagucaaaucagucgaaaugaaugccccuaauuaucacuaugaggaaugcuccuguuauccugauucuagugaaaucacaugugugugcagggauaacuggcauggcgcgaaucgaccgugggugucuuucaaccagaaucuggaauaucagauaggauacauaugcagugggauuuucggagacaauccacgcccuaaugauaagacaggcaguugugguccaguaucgucuaauggagcaaauggaguaaaaggauuuucauucaaauacggcaaugguguuuggauagggagaacuaaaagcauuaguucaagaaacgguuuugagaugauuugggauccgaacggauggacugggacagacaauaacuucucaauaaagcaagauaucguaggaauaaaugaguggucaggauauagcgggaguuuuguucagcauccagaacuaacagggcuggauuguauaagaccuugcuucuggguugaacuaaucagagggcgacccaaagagaacacaaucuggacuagcgggagcagcauauccuuuugugguguaaacagugacacuguggguuggucuuggccagacggugcugaguugccauuuaccauugacaaguaa

SEQ ID NO: 55302 - RNA, 1410 nt, Artificial Sequence
  derived and/or modified CDS sequence (wt) from neuraminidase__InfluenzaA__AGB13363
augaauccaaaccaaaagauaauaaccauugguucggucuguaugacaauuggaauggcuaacuuaauauuacaaauuggaaacauaaucucaauauggauuagccacucaauucaacuugggaaucaaaaucagauugaaacaugcaaucaaagcgucauuacuuaugaaaacaacaccuggguaaaucagacauauguuaacaucagcaacaccaacuuugcugcuggacagucaguggcuuccgugaaauuagcgggcaauuccucucucugcucuguuaguggaugggcuauauacaguaaagacaacaguauaagaaucgguuccaagggggauguguuugucauaagggaaccauucauaucaugcucccccuuggaaugcagaaccuucuucuugacucaaggggcuuugcuaaaugacaaacauuccaauggaaccauuaaagacaggagcccauaucgaacccuaaugagcugcccuauuggugaaguucccucuccauacaacucaagauuugagucagucgcuuggucagcaagugcuugucaugauggcaucaauuggcuaacaauuggaauuucuggcccagacaauggggcaguggcuguguuaaaguacaacggcauaauaacagacacuaucaagaguuggagaaacaauauauugagaacacaagagucugaaugugcauguguaaaugguucuugcuuuaccauaaugaccgauggaccaagugauggacaggccucauacaagaucuucagaauagaaaagggaaagauagucaaaucagucgaaaugaaugccccuaauuaucacuaugaggaaugcuccuguuauccugauucuagugaaaucacaugugugugcagggauaacuggcauggcucgaaucgaccgugggugucuuucaaccagaaucuggaauaucagauaggauacauaugcagugggauuuucggagacaauccacgcccuaaugauaagacaggcaguugugguccaguaucgucuaauggagcaaauggaguaaaaggauuuucauucaaauacggcaaugguguuuggauagggagaacuaaaagcauuaguucaagaaaagguuuugagaugauuugggauccaaacggauggacugggacagacaauaacuucucaauaaagcaagauaucguaggaauaaaugaguggucaggauauagcgggagcuuuguucagcauccagaacuaacagggcuggauuguauaagaccuugcuucuggguugaacuaaucagagggcgacccaaagagaacacaaucuggacuagcgggagcagcauauccuuuugugguguaaacagugacacuguggguuggucuuggccagacggugcugaguugccauuuaccauugacaaguaa

SEQ ID NO: 55303 - RNA, 1410 nt, Artificial Sequence
  derived and/or modified CDS sequence (wt) from neuraminidase__InfluenzaA__AGB13383
augaauccaaaccaaaagauaauaaccauugguucggucuguaugacaauuggaauggcuaacuuaauauuacaaauuggaaacauaaucucaauauggauuagccacucaauucaacuugggaaucaaaaucagauugaaacaugcaaucaaagcgucauuacuuaugaaaacaacacuuggguaaaucagacauauguuaacaucagcaacaccaacuuugcugcuggacagucaguggucuccgugaaauuagcgggcaauuccucucucugcccuguuaguggaugggcuauauacaguaaagacaacaguauaagaaucgguuccaagggggauguguuugucauaagggaaccauucauaucaugcucccccuuggaaugcagaaccuucuucuugacucaaggggccuugcuaaaugacaaacauuccaauggaaccauuaaagacaggagcccauaucgaacccuaaugagcuguccuauuggugaaguucccucuccauacaacucaagauuugagucagucgcuuggucagcaagugcuugucaugauggcaucaauuggcuaacaauuggaauuucuggcccagacaauggggcaguggcuguguuaaaguacaacggcauaauaacagacacuaucaagaguuggagaaacaauauauugagaacacaagagucugaaugugcauguguaaaugguucuugcuuuaccauaaugaccgauggaccaagugauggacaggccucauacaagaucuucagaauagaaaagggaaagauagucaaaucagucgaaaugaaugccccuaauuaucacuaugaggaaugcuccuguuauccugauucuagugaaaucacaugugugugcagggauaacuggcauggcucgaaucgaccgugggugucuuucaaccagaaucuggaauaucagauaggauacauaugcagugggauuuucggagacaauccacgcccuaaugauaagacaggcaguugugguccaguaucgucuaauggagcaaauggaguaaaaggauuuucauucaaauacggcagugguguuuggauagggagaacuaaaagcauuaguucaagaaaagguuuugagaugauuugggauccaaacggauggacugggacagacaauaacuucucaauaaagcaagauaucguaggaauaaaugaguggucaggauauagcgggaguuuuguucagcauccagaacuaacagggcuggacuguauaagaccuugcuucuggguugaacuaaucagagggcgacccaaagagaacacaaucuggacuagcgggagcagcauauccuuuugugguguaaacagugacacuguggguuggucuuggccagacggugcugaguugccauuuaccauugacaaguaa

SEQ ID NO: 55304 - RNA, 1410 nt, Artificial Sequence
  derived and/or modified CDS sequence (wt) from neuraminidase__InfluenzaA__AGB13393
augaauccaaaccaaaagauaauaaccauugguucggucuguaugacaauuggaauggcuaacuuaauauuacaaauuggaaacauaaucucaauauggauuagccacucaauucaacuugggaaucaaagucagauugaaacaugcaaucaaagcgucauuacuuaugaaaacaacacuuggguaaaucagacauauguuaacaucagcaacaccaacuuugcugcuggacagucagugguuuccgugaaauuagcgggcaauuccucucucugcccuguuaguggaugggcuauauacaguaaagacaacaguauaagaaucgguuccaagggggauguguuugucauaagggaaccauucauaucaugcucccccuuggaaugcagaaccuucuucuugacucaaggggccuugcuaaaugacaaacauuccaauggaaccauuaaagacaggagcccauaucgaacccuaaugagcuguccuauuggugaaguucccucuccauacaacucaagauuugagucagucgcuuggucagcaagugcuugucaugauggcaucaauuggcuaacaauuggaauuucuggcccagacaauggggcaguggcuguguuaaaguacaacggcauaauaacagacacuaucaagaguuggagaaacaauauauugagaacacaagagucugaaugugcauguguaaaugguucuugcuuuaccauaaugaccgauggaccaagugauggacaggccucauacaagaucuucagaauagaaaagggaaagauagucaaaucagucgaaaugaaugccccuaauuaucacuaugaggaaugcuccuguuauccugauucuagugaaaucacaugugugugcagggauaacuggcauggcucgaaucgaccgugggugucuuucaaccagaaucuggaauaucagauaggauacauaugcagugggauuuucggagacaauccacgcccuaaugauaagacaggcaguugugguccaguaucgucuaauggagcaaauggaguaaaaggauuuucauucaaauacggcaaugguguuuggauagggagaacuaaaagcauuaguucaagaaaagguuuugagaugauuugggauccaaacggauggacugggacagacaauaacuucucaauaaagcaagauaucguaggaauaaaugaguggucaggauauagcgggaguuuuguucagcauccagaacuaacagggcuggauugcauaagaccuugcuucuggguugaacuaaucagagggcgacccaaagagaacacaaucuggacuagcgggagcagcauauccuuuugugguguaaacagugacacuguggguuggucuuggccagacggugcugaguugccauuuaccauugacaaguaa

SEQ ID NO: 55305 - RNA, 1410 nt, Artificial Sequence
  derived and/or modified CDS sequence (wt) from neuraminidase__InfluenzaA__AGB13403
augaauccaaaccaaaagauaauaaccauugguucggucuguaugacaauuggaauggccaacuuaauauuacaaauuggaaacauaaucucaauauggauuagccacucaauucaacuugggaaucaaaaucagauugaaacaugcaaucaaagcgucauuacuuaugaaaacaacacuuggguaaaucagacauacguuaacaucagcaacaccaacuuugcugcuggacagucagugguuuccgugaaauuagcgggcaauuccucucucugcccuguuaguggaugggcuauauacaguaaagacaacaguauaagaaucgguuccaagggggauguguuugucauaagggagccauucauaucauguucccccuuggaaugcaggaccuucuucuugacucaaggggccuugcuaaaugacaaacauuccaauggaaccauuaaagacaggagcccauaucgaacucuaaugagcuguccuauuggugaaguucccucuccauacaacucaagauuugaaucagucgcuuggucagcaagugcuugucaugauggcaucaauuggcuaacaauuggaauuucuggcccagacaauggggcaguggcuguguuaaaguacaacggcauaauaacagacacuaucaagaguuggagaaacaauauauugagaacacaagagucugaaugugcauguguaaaugguucuugcuuuacuguaaugaccgauggaccaagugauggacaggccucauacaagaucuucagaauagaaaagggaaagauagucaaaucagucgaaaugaaugccccuaauuaucacuaugaggaaugcuccuguuauccugauucuagugaaaucacaugugugugcagggauaacuggcauggcucgaaucgaccgugggugucuuucaaccagaaucuggaauaucagauaggauacauaugcagugggauuuucggagacaauccacgcccuaaugauaagacaggcaguugugguccaguaucgucuaauggagcaaauggaguaaaaggauuuucauucaaauacggcaaugguguuuggauagggagaacuaaaagcauuaguucaagaaacgguuuugagaugauuugggauccgaacggauggacuggaacagacaauaacuucucaguaaagcaagauaucauaggaauaaaugaguggucaggauauagcgggaguuuuguucagcauccagaacuaacagggcuggauuguauaagaccuugcuucuggguugagcuaaucagagggcggcccaaagagaacacaaucuggacuagcgggagcagcauauccuuuugugguguaaacagugacacuguggguuggucuuggccagacggugcugaguugccauuuaccauugacaaguaa

SEQ ID NO: 55306 - RNA, 1410 nt, Artificial Sequence
  derived and/or modified CDS sequence (wt) from neuraminidase__InfluenzaA__AGB13413
augaauccaaaccaaaagauaauaaccauugguucggucuguaugacaauuggaauggcuaacuuaauauuacaaauuggaaacauaaucucaauauggauuagccacucaauucaacuugggaaucaaagucagauugaaacaugcaaucaaagcgucauuacuuaugaaaacaacacuuggguaaaucagacauauguuaacaucagcaacaccaacuuugcugcuggacagucagugguuuccgugaaauuagcgggcaauuccucucucugcccuguuaguggaugggcuauauacaguaaagacaacaguauaagaaucgguuccaagggggauguguuugucauaagggaaccauucauaucaugcucccccuuggaaugcagaaccuucuucuugacucaaggggccuugcuaaaugacaaacauuccaauggaaccauuaaagacaggagcccauaucgaacccuaaugagcuguccuauuggugaaguucccucuccauacaacucaagauuugagucagucgcuuggucagcaagugcuugucaugauggcaucaauuggcuaacaauuggaauuucuggcccagacaauggggcaguggcuguguuaaaguacaacggcauaauaacagacacuaucaagaguuggagaaacaauauauugagaacacaagagucugaaugugcauguguaaaugguucuugcuuuaccauaaugaccgauggaccaagugauggacaggccucauacaagaucuucagaauagaaaagggaaagauagucaaaucagucgaaaugaaugccccuaauuaucacuaugaggaaugcuccuguuauccugauucuagugaaaucacaugugugugcagggauaacuggcauggcucgaaucgaccgugggugucuuucaaccagaaucuggaauaucagauaggauacauaugcagugggauuuucggagacaauccacgcccuaaugauaagacaggcaguugugguccagugucgucuaauggagcaaauggaguaaaaggauuuucauucaaauacggcaaugguguuuggauagggagaacuaaaagcauuaguucaagaaaagguuuugagaugauuugggauccaaacggauggacugggacagacaauaacuucucaauaaagcaagauaucguaggaauaaaugaguggucaggauauagcgggaguuuuguucagcauccagaacuaacagggcuggauuguauaagaccuugcuucuggguugaacuaaucagagggcgacccaaagagaacacaaucuggacuagcgggagcagcauauccuuuugugguguaaacagugacacuguggguuggucuuggccagacggugcugaguugccauuuaccauugacaaguaa

SEQ ID NO: 55307 - RNA, 1410 nt, Artificial Sequence
  derived and/or modified CDS sequence (wt) from neuraminidase__InfluenzaA__AGB13423
augaauccaaaccaaaagauaauaaccauugguucggucuguaugacaauuggaauggcuaacuuaauauuacaaauuggaaacauaaucucaauauggauuagccacucaauucaacuugggaaucaaagucagauugaaacaugcaaucaaagcgucauuacuuaugaaaacaacacuuggguaaaucagacauauguuaacaucagcaacaccaacuuugcugcuggacagucagugguuuccgugaaauuagcgggcaauuccucucucugcccuguuaguggaugggcuauauacaguaaagacaacaguauaagaaucgguuccaagggggauguguuugucauaagggaaccauucauaucaugcucccccuuggaaugcagaaccuucuucuugacucaaggggccuugcuaaaugacaaacauuccaauggaaccauuaaagacaggagcccauaucgaacccuaaugagcuguccuauuggugaaguucccucuccauacaacucaagauuugagucagucgcuuggucagcaagugcuugucaugauggcaucaauuggcuaacaauuggaauuucuggcccagacaauggggcaguggcuguguuaaaguacaacggcauaauaacagacacuaucaagaguuggagaaacaauauauugagaacacaagagucugaaugugcauguguaaaugguucaugcuuuaccauaaugaccgauggaccaagugauggacaggccucauacaagaucuucagaauagaaaagggaaagauagucaaaucagucgaaaugaaugccccuaauuaucacuaugaggaaugcuccuguuauccugauucuagugaaaucacaugugugugcagggauaacuggcauggcucgaaucgaccgugggugucuuucaaccagaaucuggaauaucagauaggauacauaugcagugggauuuucggagacaauccacgcccuaaugauaagacaggcaguugugguccaguaucgucuaauggagcaaauggaguaaaaggauuuucauucaaauacggcaaugguguuuggauagggagaacuaaaagcauuaguucaagaaaagguuuugagaugauuugggauccaaacggauggacugggacagacaauaacuucucaauaaagcaagauaucguaggaauaaaugaguggucaggauauagcgggaguuuuguucagcauccagaacuaacagggcuggauuguauaagaccuugcuucuggguugaacuaaucagagggcgacccaaagagaacacaaucuggacuagcgggagcagcauauccuuuugugguguaaacagugacacuguggguuggucuuggccagacggugcugaguugccauuuaccauugacaaguaa

SEQ ID NO: 55308 - RNA, 1410 nt, Artificial Sequence; identical to SEQ ID NO: 52969
  derived and/or modified CDS sequence (wt) from neuraminidase__InfluenzaA__AGB13433

SEQ ID NO: 55309 - RNA, 1410 nt, Artificial Sequence
  derived and/or modified CDS sequence (wt) from neuraminidase__InfluenzaA__AGB13443
augaauccaaaccaaaagauaauaaccauugguucggucuguaugacaauuggaauggccaacuuaauauuacaaauuggaaacauaaucucaauauggauuagccacucaauucaacuugggaaucaaaaucagauugaaacaugcaaucaaagcgucauuacuuaugaaaacaacacuuggguaaaucagacauacguuaacaucagcaacaccaacuuugcugcuggacagucagugguuuccgugaaauuagcgggcaauuccucucucugcccuguuaguggaugggcuauauacaguaaagacaacaguauaagaaucgguuccaagggggauguguuugucauaagggaaccauucauaucauguucccccuuggaaugcaggaccuucuucuugacucaaggggccuugcuaaaugacaaacauuccaauggaaccauuaaagacaggagcccauaucgaacucuaaugagcuguccuauuggugaaguucccucuccauacaacucaagauuugaaucagucgcuuggucagcaagugcuugucaugauggcaucaauuggcuaacaauuggaauuucuggcccagacaauggggcaguggcuguguuaaaguacaacggcauaauaacagacacuaucaagaguuggagaaacaauauauugagaacacaagagucugaaugugcauguguaaaugguucuugcuuuacuguaaugaccgauggaccaagugauggacaggccucauacaagaucuucagaauagaaaagggaaagauagucaaaucagucgaaaugaaugccccuaauuaucacuaugaggaaugcuccuguuauccugauucuagugaaaucacaugugugugcagggauaacuggcauggcucgaaucgaccgugggugucuuucaaccagaaucuggaauaucagauaggauacauaugcagugggauuuucggagacaauccacgcccuaaugauaagacaggcaguugugguccaguaucgucuaauggagcaaauggaguaaaaggauuuucauucaaauacggcaaugguguuuggauagggagaacuaaaagcauuaguucaagaaacgguuuugagaugauuugggauccgaacggauggacuggaacagacaauaacuucucaguaaagcaagauaucauaggaauaaaugaguggucaggauauagcgggaguuuuguucagcauccagaacuaacagggcuggauuguauaagaccuugcuucuggguugagcuaaucagagggcggccuaaagagaacacaaucuggacuagcgggagcagcauauccuuuugugguguaaacagugacacuguggguuggucuuggccagacggugcugaguugccauuuaccauugacaaguaa

SEQ ID NO: 55310 - RNA, 1410 nt, Artificial Sequence
  derived and/or modified CDS sequence (wt) from neuraminidase__InfluenzaA__AGB13453
augaauccaaaccaaaagauaauaaccauugguucggucuguaugacaauuggaauggcuaacuuaauauuacaaauuggaaacauaaucucaauauggauuagccacucaauucaacuugggaaucaaagucagauugaaacaugcaaucaaagcgucauuacuuaugaaaacaacacuuggguaaaucagacauauguuaacaucagcaacaccaacuuugcugcuggacagucagugguuuccgugaaauuagcgggcaauuccucucucugcccuguuaguggaugggcuauauacaguaaagacaacaguauaagaaucgguuccaagggggauguguuugucauaagggaaccauucauaucaugcucccccuuggaaugcagaaccuucuucuugacucaaggggccuugcuaaaugacaaacauuccaauggaaccauuaaagacaggagcccauaucgaacccuaaugagcuguccuauuggugaaguucccucuccauacaacucaagauuugagucagucgcuuggucagcaagugcuugucaugauggcaucaauuggcuaacaauuggaauuucuggcccagacaauggggcaguggcuguguuaaaguacaacggcauaauaacagacacuaucaagaguuggagaaacaauauauugagaacacaagagucugaaugugcauguguaaaugguucuugcuuuaccauaaugaccgauggaccaagugauggacaggccucauacaagaucuucagaauagaaaagggaaagauagucaaaucagucgaaaugaaugccccuaauuaucacuaugaggaaugcuccuguuauccugauucuagugaaaucacaugugugugcagggauaacuggcauggcucgaaucgaccgugggugucuuucaaccagaaucuggaauaucagauaggauacauaugcagugggauuuucggagacaauccacgcccuaaugauaagacaggcaguugugguccaguaucgucuaauggagcaaauggaguaaaaggauuuucauucaaauacggcaaugguguuuggauagggagaacuaaaagcuuuaguucaagaaaagguuuugagaugauuugggauccaaacggauggacugggacagacaauaacuucucaauaaagcaagauaucguaggaauaaaugaguggucaggauauagcgggaguuuuguucagcauccagaacuaacagggcuggauuguauaagaccuugcuucuggguugaacuaaucagagggcgacccaaagagaacacaaucuggacuagcgggagcagcauauccuuuugugguguaaacagugacacuguggguuggucuuggccagacggugcugaguugccauuuaccauugacaaguaa

SEQ ID NO: 55311 - RNA, 1410 nt, Artificial Sequence; identical to SEQ ID NO: 52602
  derived and/or modified CDS sequence (wt) from neuraminidase__InfluenzaA__AGB13463

SEQ ID NO: 55312 - RNA, 1410 nt, Artificial Sequence; identical to SEQ ID NO: 53021
  derived and/or modified CDS sequence (wt) from neuraminidase__InfluenzaA__AGB13473

SEQ ID NO: 55313 - RNA, 1410 nt, Artificial Sequence
  derived and/or modified CDS sequence (wt) from neuraminidase__InfluenzaA__AGB13483
augaauccaaaccaaaagauaauaaccauugguucggucuguaugacaauuggaauggcuaacuuaauauuacaaauuggaaacauaaucucaauauggauuagccacucaauccaacuugggaaucaaagucagauugaaacaugcaaucaaagcgucauuacuuaugaaaacaacacuuggguaaaucagacauauguuaacaucagcaacaccaacuuugcugcuggacagucagugguuuccgugaaauuagcgggcaauuccucucucugcccuguuaguggaugggcuauauacaguaaagacaacaguauaagaaucgguuccaagggggauguguuugucauaagggaaccauucauaucaugcucccccuuggaaugcagaaccuucuucuugacucaaggggccuugcuaaaugacaaacauuccaauggaaccauuaaagacaggagcccauaucgaacccuaaugagcuguccuauuggugaaguucccucuccauacaacucaagauuugagucagucgcuuggucagcaagugcuugucaugauggcaucaauuggcuaacaauuggaauuucuggcccagacaauggggcaguggcuguguuaaaguacaacggcauaauaacagacacuaucaagaguuggagaaacaauauauugagaacacaagagucugaaugugcauguguaaaugguucuugcuuuaccauaaugaccgauggaccaagugauggacaggccucauacaaaaucuucagaauagaaaagggaaagauagucaaaucagucgaaaugaaugccccuaauuaccacuaugaggaaugcuccuguuauccugauucuagugaaaucacaugugugugcagggauaacuggcauggcucgaaucgaccgugggugucuuucaaccagaaucuggaauaucagauaggauacauaugcagugggauuuucggagacaauccacgcccuaaugauaagacaggcaguugugguccaguaucgucuaauggagcaaauggaguaaaaggauuuucauucaaauacggcaaugguguuuggauagggagaacuaaaagcauuaguucaagaaaagguuuugagaugauuugggauccaaacggauggacugggacagacaauaacuucucaauaaagcaagauaucguaggaauaaaugaguggucaggauauagcgggaguuuuguucagcauccagaacuaacagggcuggauuguauaagaccuugcuucuggguugaacuaaucagagggcaacccaaagagaacacaaucuggacuagcgggagcagcauauccuuuugugguguaaacagugacacuguggguuggucuuggccagacggugcugaguugccauuuaccauugacaaguaa

SEQ ID NO: 55314 - RNA, 1410 nt, Artificial Sequence
  derived and/or modified CDS sequence (wt) from neuraminidase__InfluenzaA__AGB13493
augaauccaaaccaaaagauaauaaccauugguucggucuguaugacaauuggaauggcuaacuuaauauuacaaauuggaaacauaaucucaauauggauuagccacucaauucaacuugggaaucaaaaucagauugaaacaugcaaucaaagcgucauuacuuaugaaaacaacacuuggguaaaucagacauauguuaacaucagcaacaccaacuuugcugcugaacagucagugguuuccgugaaauuagcgggcaauuccucucucugcccuguuaguggaugggcuauauacaguaaagacaacaguauaagaaucgguuccaagggggauguguuugucauaagggaaccauucauaucaugcuccccuuuggaaugcagaaccuucuucuugacucaaggggccuugcuaaaugacaaacauuccaauggaaccauuaaagacaggagcccauaucgaacccuaaugagcugucccauuggugaaguucccucuccauacaacucaagauuugagucagucgcuuggucagcaagugcuugucaugauggcaucaauuggcuaacaauuggaauuucuggcccagacaauggggcaguggcuguguuaaaguacaacggcauaauaacagacacuaucaagaguuggagaaacaauauauugagaacacaagagucugaaugugcauguguaaaugguucuugcuuuaccauaaugaccgauggaccaagugauggacaggccucauacaagaucuucagaauagaaaagggaaagauagucaaaucagucgaaaugaaugccccuaauuaucacuaugaggaaugcuccuguuauccugauucuagugaaaucacaugugugugcagggauaacuggcauggcucgaaucgaccgugggugucuuucaaccagaaucuggaauaucagauaggauacauaugcagugggauuuucggagacaauccacgcccuaaugauaagacaggcaguugugguccaguaucgucuaauggagcaaauggaguaaaaggauuuucauucaaauacggcaaugguguuuggauagggagaacuaaaagcauuaguucaagaaaagguuuugagaugauuugggauccaaacggauggacugggacagacaauaacuucucaauaaagcaagauaucguaggaauaaaugaguggucaggauauagcgggaguuuuguucagcauccagaacuaacagggcuggacuguauaagaccuugcuucuggguugaacuaaucagagggcgacccaaagagaacacaaucuggacuagcgggagcagcauauccuuuugugguguaaacagugacacuguggguuggucuuggccagacggugcugaguugccauuuaccauugacaaguaa

SEQ ID NO: 55315 - RNA, 1410 nt, Artificial Sequence; identical to SEQ ID NO: 52802
  derived and/or modified CDS sequence (wt) from neuraminidase__InfluenzaA__AGB13503

SEQ ID NO: 55316 - RNA, 1410 nt, Artificial Sequence; identical to SEQ ID NO: 53005
  derived and/or modified CDS sequence (wt) from neuraminidase__InfluenzaA__AGB13513

SEQ ID NO: 55317 - RNA, 1410 nt, Artificial Sequence; identical to SEQ ID NO: 53004
  derived and/or modified CDS sequence (wt) from neuraminidase__InfluenzaA__AGB13523

SEQ ID NO: 55318 - RNA, 1410 nt, Artificial Sequence
  derived and/or modified CDS sequence (wt) from neuraminidase__InfluenzaA__AGB13533
augaauccaaaccaaaagauaauaaccauugguucggucuguaugacaauuggaauggcuaacuuaauauuacaaauuggaaacauaaucucaauauggauuagccacucaauucaacuugggaaucaaaaucagauugaaacaugcaaucaaagcgucauuacuuaugaaaacaacacuuggguaaaucagacauauguuaacaucagcaacaccaacuuugcugcuggacagucagugguuuccgugaaauuagcgggcaauuccucucucugcccuguuaguggaugggcuauauacaguaaagacaacaguauaagaaucgguuccaagggggauguguuugucauaagggaaccauucauaucaugcucccccuuggaaugcagaaccuucuucuugacucaaggggccuugcuaaaugacaaacauuccaauggaaccauuaaagacaggagcccauaucgaacccuaaugagcuguccuauuggugaaguucccucuccauauaacucaagauuugagucagucgcuuggucagcaagugcuugucaugauggcaucaauuggcuaacaauuggaauuucuggcccagacaauggggcaguggcuguguuaaaguacaacggcauaauaacagacacuaucaagaguuggagaaacaauauauugagaacacaagagucugaaugugcauguguaaaugguucuugcuuuaccauaaugaccgauggaccaagugauggacaggccucauacaagaucuucagaauagaaaagggaaagauagucaaaucagucgaaaugaaugccccuaauuaucacuaugaggaaugcuccuguuauccugauucuagugaaaucacaugugugugcagggauaacuggcauggcucgaaucgaccgugggugucuuucaaccagaaucuggaauaucagauaggauacauaugcagugggauuuucggagacaauccacgccccaaugauaagacaggcaguugugguccaguaucgucuaauggagcaaauggaguaaaaggauuuucauucaaauacggcaaugguguuuggauagggagaacuaaaagcauuaguucaagaaaagguuuugagaugauuugggauccaaacggauggacuaggacagacaauaacuucucaauaaagcaagauaucguaggaauaaaugaguggucaggauauagcgggaguuuuguucagcauccagaacuaacagggcuggauuguauaagaccuugcuucuggguugaacuaaucagagggcgacccaaagagaacacaaucuggacuagcgggagcagcauauccuuuugugguguaaacagugacacuguggguuggucuuggccagacggugcugaguugccauuuaccauugacaaguaa

SEQ ID NO: 55319 - RNA, 1410 nt, Artificial Sequence
  derived and/or modified CDS sequence (wt) from neuraminidase__InfluenzaA__AGB13543
augaauccaaaccaaaagauaauaaccauugguucggucuguaugacaauuggaauggcuaacuuaauauuacaaauuggaaacauaaucucaauauggauuagccacucaauucaacuugggaaucaaaaucagauugaaacaugcaaucaaagcgucauuacuuaugaaaacaacacuuggguaaaucagacauauguuaacaucagcaacaccaacuuugcugcuggacagucagugguuuccgugaaauuagcgggcaauuccucucucugcccuguuaguggaugggcuauauacaguaaagacaacaguauaagaaucgguuccaagggggauguguuugucauaagggaaccauucauaucaugcucccccuuggaaugcagaaccuucuucuugacucaaggggccuugcuaaaugacaaacauuccaauggaaccauuaaagacaggagcccauaucgaacccuaaugagcuguccuauuggugaaguucccucuccauacaacucaagauuugagucagucgcuuggucagcaagcgcuugucaugauggcaucaauuggcuaacaauuggaauuucuggcccagacaauggggcaguggcuguguuaaaguacaacggcauaauaacagacacuaucaagaguuggagaaacaauauauugagaacacaagagucugaaugugcauguguaaaugguucuugcuuuaccauaaugaccgauggaccaagugauggacaggccucauacaagaucuucagaauagaaaagggaaagauagucaaaucagucgaaaugaaugccccuaauuaucacuaugaggaaugcuccuguuauccugauucuagugaaaucacaugugugugcagggauaacuggcauggcucgaaucgaccgugggugucuuucaaccagaaucuggaauaucagauaggauacauaugcagugggauuuucggagacaauccacgcccuaaugauaagacaggcaguugugguccaguaucgucuaauggagcaaauggaguaaaaggauuuucauucaaauacggcaaugguguuuggauagggagaacuaaaagcauuaguucaagaaaagguuuugagaugauuugggauccaaacggauggacugggacagacaauaacuucucaauaaagcaagauaucguaggaauaaaugaguggucaggauauagcgggaguuuuguucagcauccagaacuaacagggcuggacuguauaagaccuugcuucuggguugaacuaaucagagggcgacccaaagagaacacaaucuggacuagcgggagcagcauauccuuuugugguguaaacagugacacuguggguuggucuuggccagacggugcugaguugccauuuaccauugacaaguaa

SEQ ID NO: 55320 - RNA, 1410 nt, Artificial Sequence
  derived and/or modified CDS sequence (wt) from neuraminidase__InfluenzaA__AGB13553
augaauccaaaccaaaagauaauaaccauugguucggucuguaugacaauuggaauggcuaacuuaauauuacaaauuggaaacauaaucucaauauggauuagccacucaauucaacuugggaaucaaaaucagauugaaacaugcaaucaaagcgucauuacuuaugaaaacaacacuuggguaaaucagacauauguuaacaucagcaacaccaacuuugcugcuggacagucagugguuuccgugaaauuagcgggcaauuccucucucugcccuguuaguggaugggcuauauacaguaaagacaacaguauaagaaucgguuccaagggggauguguuugucauaagggaaccauucauaucaugcucccccuuggaaugcagaaccuucuucuugacucaaggggcuuugcuaaaugacaaacauuccaauggaaccauuaaagacaggagcccauaucgaacccuaaugagcuguccuauuggugaaguucccucuccauacaacucaagauuugagucagucgcuuggucagcaagugcuugucaugauggcaucaauuggcuaacaauuggaauuucuggcccagacaauggggcaguggcuguguuaaaguacaacggcauaauaacagacacuaucaagaguuggagaaacaauauauugagaacacaagagucugaaugugcauguguaaaugguucuugcuuuaccauaaugaccgauggaccaagugauggacaggccucauacaagaucuucagaauagaaaagggaaagauagucaaaucagucgaaaugaaugccccuaauuaucacuaugaggaaugcuccuguuauccugauucuagugaaaucacaugugugugcagggauaacuggcauggcucgaaucgaccgugggugucuuucaaccagaaucuggaauaucagauaggauacauaugcagugggauuuucggagacaauccacgcccuaaugauaagacaggcaguugugguccaguaucgucuaauggagcaaauggaguaaaaggauuuucauucaaauacggcaaugguguuuggauagggagaacuaaaagcauuaguucaagaaaagguuuugagaugauuugggauccaaacggauggacugggacagacaauaacuucucaauaaagcaagauaucguaggaauaaaugaguggucaggauauagcgggaguuuuguucagcauccagaacuaacagggcuggauuguauaagaccuugcuucuggguugaacuaaucagagggcgacccaaagagaacacaaucuggacuagcgggagcagcauauccuuuugugguguaaacagugacacuguggguuggucuuggccagacggugcugaauugccauuuaccauugacaaguaa

SEQ ID NO: 55321 - RNA, 1410 nt, Artificial Sequence
  derived and/or modified CDS sequence (wt) from neuraminidase__InfluenzaA__AGB13563
augaauccaaaccaaaagauaauaaccauugguucggucuguaugacaauuggaguggcuaacuuaauauuacaaauuggaaacauaaucucaauauggauuagccacucaauucaacuugggaaucaaaaucagauugaaacaugcaaucaaagcgucauuacuuaugaaaacaacacuuggguaaaucagacauauguuaacaucagcaacaccaacuuugcugcuggacagucagugguuuccgugaacuuagcgggcaauuccucucucugcccuguuaguggaugggcuauauacaguaaagacaacaguauaagaaucgguuccaagggggauguguuugucauaagggaaccauucauaucaugcucccccuuggaaugcagaaccuucuucuugacucaaggggccuugcuaaaugacaaacauuccaauggaaccauuaaagacaggagcccauaucgaacccuaaugagcuguccuauuggugaaguucccucuccauacaacucaagauuugagucagucgcuuggucagcaagugcuugucaugauggcaucaauuggcuaacaauuggaauuucuggcccagacaauggggcaguggcuguguuaaaguacaacggcauaauaacagacacuaucaagaguuggagaaacaauauauugagaacacaagagucugaaugugcauguguaaaugguucuugcuuuaccauaaugaccgauggaccaagugauggacaggccucauacaagaucuucagaauagaaaagggaaagauagucaaaucagucgaaaugaaugccccuaauuaucacuaugaggaaugcuccuguuauccugauucuagugaaaucacaugugugugcagggauaacuggcauggcucgaaucgaccgugggugucuuucaaccagaaucuggaauaucagauaggauacauaugcagugggauuuucggagacaauccacgcccuaaugauaagacaggcaguugugguccaguaucgucuaauggagcaaauggaguaaaaggauuuucauucaaauacggcaaugguguuuggauagggagaacuaaaaacauuaguucaagaaaagguuuugagaugauuugggauccaaacggauggacugggacagacaauaacuucucaauaaagcaagauaucguaggaauaaaugaguggucaggauauagcgggaguuuuguucagcauccagaacuaacagggcuggauuguauaagaccuugcuucuggguugaacuaaucagagggcgacccaaagagaacacaaucuggacuagcgggagcagcauauccuuuugugguguaaacagugacacuguggguuggucuuggccagacggugcugaguugccauuuaccauugacaaguaa

SEQ ID NO: 55322 - RNA, 1410 nt, Artificial Sequence; identical to SEQ ID NO: 52837
  derived and/or modified CDS sequence (wt) from neuraminidase__InfluenzaA__AGB13573

SEQ ID NO: 55323 - RNA, 1410 nt, Artificial Sequence
  derived and/or modified CDS sequence (wt) from neuraminidase__InfluenzaA__AGB13583
augaauccaaaccaaaagauaauaaccauugguucggucuguaugacaauuggaauggcuaacuuaauauuacaaauuggaaacauaaucucaauauggauuagccacucaauucaacuugggaaucaaaaucagauugaaacaugcaaucaaagcgucauuacuuaugaaaacaacacuuggguaaaucagacauauguuaacaucagcaacaccaacuuugcugcuggacagucaguggguuccgugaaauuagcgggcaauuccucucucugcccuguuaguggaugggcuauauacaguaaagacaacaguauaagaaucgguuccaagggggauguguuugucauaagggaaccauucauaucaugcucccccuuggaaugcagaaccuucuucuugacucaaggggccuugcuaaaugacaaacauuccaauggaaccauuaaagacaggagcccauaucgaacccuaaugagcuguccuauuggugaaguucccucuccauacaacucaagauuugagucagucgcuuggucagcaagugcuugucaugauggcaucaauuggcuaacaauuggaauuucuggcccagacaauggggcaguggcuguguuaaaguacaacggcauaauaacagacacuaucaagaguuggagaaacaauauauugagaacacaagagucugaaugugcauguguaaaugguucuugcuuuaccauaaugaccgauggaccaagugauggacaggccucauacaagaucuucagaauagaaaagggaaagauagucaaaucagucgaaaugaaugccccuaauuaucacuaugaggaaugcuccuguuauccugauucuagugaaaucacaugugugugcagggauaacuggcauggcucgaaucgaccgugggugucuuucaaccagaaucuggaauaucagauaggauacauaugcagugggauuuucggagacaauccacgcccuaaugauaagacaggcaguugugguccaguaucgucuaauggagcaaauggaguaaaaggauuuucauucaaauacggcaaugguguuuggauagggagaacuaaaagcauuaguucaagaaaagguuuugagaugauuugggauccaaacggauggacugggacagacaauaacuucucaauaaagcaagauaucguaggaauaaaugaguggucaggauauagcgggaguuuuguucagcauccagaacuaacagggcuggacuguauaagaccuugcuucuggguugaacuaaucagagggcgacccaaagagaacacaaucuggacuagcgggagcagcauauccuuuugugguguaaacagugacacuguggguuggucuuggccagacggugcugaguugccauuuaccauugacaaguaa

SEQ ID NO: 55324 - RNA, 1410 nt, Artificial Sequence
  derived and/or modified CDS sequence (wt) from neuraminidase__InfluenzaA__AGB13593
augaauccaaaccaaaagauaauaaccauugguucggucuguaugacaauuggaauggcuaacuuaauauuacaaauuggaaacauaaucucaauauggauuagccacucaauucaacuugggaaucaaaaucagauugaaacaugcaaucaaagcgucauuacuuaugaaaacaacacuuggguaaaucagacauauguuaacaucagcaacaccaacuuugcugcuggacaaucagugguuuccgugaaauuagcgggcaauuccucucucugcccuguuaguggaugggcuauauacaguaaagacaacaguauaagaaucgguuccaagggggauguguuugucauaagggaaccauucauaucaugcucccccuuggaaugcagaaccuucuucuugacucaaggggccuugcuaaaugacaaacauuccaauggaaccauuaaagacaggagcccauaucgaacccuaaugagcuguccuauuggugaaguucccucuccauacaacucaagauuugagucagucgcuuggucagcaagugcuugucaugauggcaucaauuggcuaacaauuggaauuucuggcccagacaauggggcaguggcuguguuaaaguacaacggcauaauaacagacacuaucaagaguuggagaaacaauauauugagaacacaagagucugaaugugcauguguaaaugguucuugcuuuaccauaaugaccgauggaccaagugauggacaggccucauacaagaucuucagaauagaaaagggaaagauagucaaaucagucgaaaugaaugccccuaauuaucacuaugaggaaugcuccuguuauccugauucuagugaaaucacaugugugugcagggauaacuggcauggcucgaaucgaccgugggugucuuucaaccagaaucuggaauaucagauaggauacauaugcagugggauuuucggagacaauccacgcccuaaugauaagacaggcaguugugguccaguaucgucuaauggagcaaauggaguaaaaggauuuucauucaaauacggcaaugguguuuggauagggagaacuaaaagcauuaguucaagaaaagguuuugagaugauuugggauccaaacggauggacugggacagacaauaacuucucaauaaagcaagauaucguaggaauaaaugaguggucaggauauagcgggaguuuuguucagcauccagaacuaacagggcuggacuguauaagaccuugcuucuggguugaacuaaucagagggcgacccaaagagaacacaaucuggacuagcgggagcagcauauccuuuugugguguaaacagugacacuguggguuggucuuggccagacggugcugaguugccauuuaccauugacaaguaa

SEQ ID NO: 55325 - RNA, 1410 nt, Artificial Sequence; identical to SEQ ID NO: 53021
  derived and/or modified CDS sequence (wt) from neuraminidase__InfluenzaA__AGB13603

SEQ ID NO: 55326 - RNA, 1410 nt, Artificial Sequence
  derived and/or modified CDS sequence (wt) from neuraminidase__InfluenzaA__AGB13613
augaauccaaaccaaaagauaauaaccauugguucggucuguaugacaauuggaauggcuaacuuaauauuacaaauuggaaacauaaucucaauauggauuagccacucaauucaacuugggaaucaaaaucagauugaaacaugcaaucaaagcgucauuacuuaugaaaacaacacuuggguaaaucagacauauguuaacaucagcaacaccaacuuugcugcuggacagucagugguuuccgugaaauuagcgggcaauuccucucucugcccuguuaguggaugggcuauauacaguaaagacaacaguauaagaaucgguuccaagggggauguguuugucauaagggaaccauucauaucaugcucccccuuggaaugcagaaccuucuucuugacucaaggggccuugcuaaaugacaaacauuccaauggaaccauuaaagacaggagcccauaucgaacccuaaugagcuguccuauuggugaaguucccucuccauacaacucaagauuugagucagucgcuuggucagcaagugcuugucaugauggcaucaauuggcuaacaauuggaauuucuggcccagacaauggggcaguggcugugcuaaaguacaacggcauaauaacagacacuaucaagaguuggagaaacaauauauugagaacacaagagucugaaugugcauguguaaaugguucuugcuuuaccauaaugaccgauggaccaagugauggacaggccucauacaagaucuucagaauagaaaagggaaagauagucaaaucagucgaaaugaaugccccuaauuaucacuaugaggaaugcuccuguuauccugauucuagugaaaucacaugugugugcagggauaacuggcauggcucgaaucgaccgugggugucuuucaaccagaaucuggaauaucagauaggauacauaugcagugggauuuucggagacaauccacgcccuaaugauaagacaggcaguugugguccaguaucgucuaauggagcaaauggaguaaaaggauuuucauucaaauacggcaaugguguuuggauagggagaacuaaaagcauuaguucaagaaaagguuuugagaugauuugggauccaaacggauggacugggacagacaauaacuucucaauaaagcaagauaucguaggaauaaaugaguggucaggauauagcgggaguuuuguucagcauccagaacuaacagggcuggacuguauaagaccuugcuucuggguugaacuaaucagagggcgacccaaagagaacacaaucuggacuagcgggagcagcauauccuuuugugguguaaacagugacacuguggguuggucuuggccagacggugcugaguugccauuuaccauugacaaguaa

SEQ ID NO: 55327 - RNA, 1410 nt, Artificial Sequence
  derived and/or modified CDS sequence (wt) from neuraminidase__InfluenzaA__AGB13623
augaauccaaaccaaaagauaauaaccauugguucggucuguaugacaauuggaauggcuaacuuaauauuacaaauuggaaacauaaucucaauauggauuagccacucaauucaacuugggaaucaaaaucagauugaaacaugcaaucaaagcgucauuacuuaugaaaacaacacuuggguaaaucagacauauguuaacaucagcaacaccaacuuugcugcuggacagucagugguuuccgugaaauuagcgggcaauuccucucucugcccuguuaguggaugggcuauauacaguaaagacaacaguauaagaaucgguuccaagggggauguuuuugucauaagggaaccauucauaucaugcucccccuuggaaugcagaaccuucuucuugacucaaggggccuugcuaaaugacaaacauuccaauggaaccauuaaagacaggagcccauaucgaacccuaaugagcuguccuauuggugaaguucccucuccauacaacucaagauuugagucagucgcuuggucagcaagugcuugucaugauggcaucaauuggcuaacaauuggaauuucuggcccagacaauggggcaguggcuguguuaaaguacaacggcauaauaacagacacuaucaagaguuggagaaacaauauauugagaacacaagagucugaaugugcauguguaaaugguucuugcuuuaccauaaugaccgauggaccaagugauggacaggccucauacaagaucuucagaauagaaaagggaaagauagucaaaucagucgaaaugaaugccccuaauuaucacuaugaggaaugcuccuguuauccugauucuagugaaaucacaugugugugcagggauaacuggcauggcucgaaucgaccgugggugucuuucaaccagaaucuggaauaucagauaggauacauaugcagugggauuuucggagacaauccacgcccuaaugauaagacaggcaguugugguccaguaucgucuaauggagcaaauggaguaaaaggauuuucauucaaauacggcaaugguguuuggauagggagaacuaaaagcauuaguucaagaaaagguuuugagaugauuugggauccaaacggauggacugggacagacaauaacuucucaauaaagcaagauaucguaggaauaaaugaguggucaggauauagcgggaguuuuguucagcauccagaacuaacagggcuggacuguauaagaccuugcuucuggguugaacuaaucagagggcgacccaaagagaacacaaucuggacuagcgggagcagcauauccuuuugugguguaaacagugacacuguggguuggucuuggccagacggugcugaguugccauuuaccauugacaaguaa

SEQ ID NO: 55328 - RNA, 1410 nt, Artificial Sequence
  derived and/or modified CDS sequence (wt) from neuraminidase__InfluenzaA__AGB13633
augaauccaaaccaaaagauaauaaccauugguucggucuguaugacaauuggaauggcuaacuuaauauuacaaauuggaaacauaaucucaauauggauuagccacucaauucaacuugggaaucaaagucagauugaaacaugcaaucaaagcgucauuacuuaugaaaacaacacuuggguaaaucagacauauguuaacaucagcaacaccaacuuugcugcuggacagucagugguuuccgugaaauuagcgggcaauuccucucucugcccuguuaguggaugggcuauauacaguaaagacaacaguauaagaaucgguuccaagggggauguguuugucauaagggaaccauucauaucaugcucccccuuggaaugcagaaccuucuucuugacucaaggggccuugcuaaaugacaaacauuccaauggaaccauuaaagacaggagcccauaucgaacccuaaugagcuguccuauuggugaaguucccucuccauacaacucaagauuugagucagucgcuuggucagcaagugcuugucaugauggcaucaauuggcuaacaauuggaauuucuggcccagacaauggggcaguggcugugcuaaaguacaacggcauaauaacagacacuaucaagaguuggagaaacaauauauugagaacacaagagucugaaugugcauguguaaaugguucuugcuuuaccauaaugaccgauggaccaagugauggacaggccucauacaagaucuucagaauagaaaagggaaagauagucaaaucagucgaaaugaaugccccuaauuaucacuaugaggaaugcuccuguuauccugauucuagugaaaucacaugugugugcagggauaacuggcauggcucgaaucgaccgugggugucuuucaaccagaaucuggaauaucagauaggauacauaugcagugggauuuucggagacaauccacgcccuaaugauaagacaggcaguugugguccaguaucgucuaauggagcaaauggaguaaaaggauuuucauucaaauacggcaaugguguuuggauagggagaacuaaaagcauuaguucaagaaaagguuuugagaugauuugggauccaaacggauggacugggacagacaauaacuucucaauaaagcaagauaucguaggaauaaaugaguggucaggauauagcgggaguuuuguucagcauccagaacuaacagggcuggauuguauaagaccuugcuucuggguugaacuaaucagagggcgacccaaagagaacacaaucuggacuagcgggagcaucauauccuuuugugguguaaacagugacacuguggguuggucuuggccagacggugcugaguugccauuuaccauugacaaguaa

SEQ ID NO: 55329 - RNA, 1410 nt, Artificial Sequence
  derived and/or modified CDS sequence (wt) from neuraminidase__InfluenzaA__AGB13643
augaauccaaaccaaaagauaauaaccauugguucggucuguaugacaauuggaauggccaacuuaauauuacaaauuggaaacauaaucucaauauggauuagccacucaauucaacuugggaaucaaaaucagauugaaacaugcaaucaaagcgucauuacuuaugaaaacaacacuuggguaaaucagacauacguuaacaucagcaacaccaacuuugcugcuggacagucagugguuuccgugaaauuagcgggcaauuccucucucugcccuguuaguggaugggcuauauacaguaaagacaacgguauaagaaucgguuccaagggggauguguuugucauaagggaaccauucauaucauguucccccuuggaaugcaggaccuucuucuugacucaaggggccuugcuaaaugacaaacauuccaauggaaccauuaaagacaggagcccauaucgaacucuaaugagcuguccuauuggugaaguucccucuccauacaacucaagauuugaaucagucgcuuggucagcaagugcuugucaugauggcaucaauuggcuaacaauuggaauuucuggcccagacaauggggcaguggcuguguuaaaguacaacggcauaauaacagacacuaucaagaguuggagaaacaauauauugagaacacaagagucugaauguguauguguaaaugguucuugcuuuacuguaaugaccgauggaccaagugauggacaggccucauacaagaucuucagaauagaaaagggaaagauagucaaaucagucgaaaugaaugccccuaauuaucacuaugaggaaugcuccuguuauccugauucuagugaaaucacaugugugugcagggauaacuggcauggcucgaaucgaccgugggugucuuucaaccagaaucuggaauaucagauaggauacauaugcagugggauuuucggagacaauccacgcccuaaugauaagacaggcaguugugguccaguaucgucuaauggagcaaauggaguaaaaggauuuucauucaaauacggcaaugguguuuggauagggagaacuaaaagcauuaguucaagaaacgguuuugagaugauuugggauccgaacggauggacuggaacagacaauaacuucucaguaaagcaagauaucauaggaauaaaugaguggucaggauauagcgggaguuuuguucagcauccagagcuaacagggcuggauuguauaagaccuugcuucuggguugagcuaaucagagggcggcccaaagagaacacaaucuggacuagcgggagcagcauauccuuuugugguguaaacagugacacuguggguuggucuuggccagacggugcugaguugccauuuaccauugacaaguaa

SEQ ID NO: 55330 - RNA, 1410 nt, Artificial Sequence
  derived and/or modified CDS sequence (wt) from neuraminidase__InfluenzaA__AGB13653
augaauccaaaccaaaagauaauaaccauugguucggucuguaugacaauuggaauggccaacuuaauauuacaaauuggaaacauaaucucaauauggauuagccacucaauucaacuugggaaucaaaaucagauugaaacaugcaaucaaagcgucauuacuuaugaaaacaacacuuggguaaaucagacauacguuaacaucagcaacaccaacuuugcugcuggacagucagugguuuccgugaaauuagcgggcaauuccucucucugcccuguuaguggaugggcuauauacaguaaagacaacaguauaagaaucgguuccaagggggauguguuugucauaagggaaccauucauaucauguucccccuuggaaugcaggaccuucuucuugacucaaggggccuugcuaaaugacaaacauuccaauggaaccauuaaagacaggagcccauaucgaacucuaaugagcugcccuauuggugaaguucccucuccauacaacucaagauuugaaucagucgcuuggucagcaagugcuugucaugauggcaucaauuggcuaacaauuggaauuucuggcccagacaauggggcaguggcuguguuaaaguacaacggcauaauaacagacacuaucaagaguuggagaaacaauauauugagaacacaagagucugaauguguauguguaaaugguucuugcuuuacuguaaugaccgauggaccaagugauggacaggccucauacaagaucuucagaauagaaaagggaaagauagucaaaucagucgaaaugaaugccccuaauuaucacuaugaggaaugcuccuguuauccugauucuagugaaaucacaugugugugcagggauaacuggcauggcucgaaucgaccgugggugucuuucaaccagaaucuggaauaucagauaggauacauaugcagugggauuuucggagacaauccacgcccuaaugauaagacaggcaguugugguccaguaucgucuaauggagcaaauggaguaaaaggauuuucauucaaauacggcaaugguguuuggauagggagaacuaaaagcauuaguucaagaaacgguuuugagaugauuugggauccgaacggauggacuggaacagacaauaacuucucaguaaagcaagauaucauaggaauaaaugaguggucaggauauagcgggaguuuuguucagcauccagagcugacagggcuggauuguauaagaccuugcuucuggguugagcuaaucagagggcggcccaaagagaacacaaucuggacuagcgggagcagcauauccuuuugugguguaaacagugacacuguggguuggucuuggccagacggugcugaguugccauuuaccauugacaaguaa

SEQ ID NO: 55331 - RNA, 1410 nt, Artificial Sequence; identical to SEQ ID NO: 52606
  derived and/or modified CDS sequence (wt) from neuraminidase__InfluenzaA__AGB13663

SEQ ID NO: 55332 - RNA, 1410 nt, Artificial Sequence; identical to SEQ ID NO: 52602
  derived and/or modified CDS sequence (wt) from neuraminidase__InfluenzaA__AGB13724

SEQ ID NO: 55333 - RNA, 1410 nt, Artificial Sequence; identical to SEQ ID NO: 52837
  derived and/or modified CDS sequence (wt) from neuraminidase__InfluenzaA__AGB13734

SEQ ID NO: 55334 - RNA, 1410 nt, Artificial Sequence; identical to SEQ ID NO: 49226
  derived and/or modified CDS sequence (wt) from neuraminidase__InfluenzaA__AGB51359

SEQ ID NO: 55335 - RNA, 1410 nt, Artificial Sequence
  derived and/or modified CDS sequence (wt) from neuraminidase__InfluenzaA__AGB97270
augaauccaaaccaaaagauaauaaccauugguucggucuguaugacaauuggaauggcuaacuuaauauuacaaauuggaaacauaaucucaauauggauuagccacucaauucaacuuaggaaucaaaaucagauugaaacaugcaaucaaagcgucauuacuuaugaaaacaacacuuggguaaaucagacauauguuaacaucagcaacaccaacuuugcugcuggacagucagugguuuccgugaaauuagcgggcaauuccucucucugcccuguuaguggaugggcuauauacaguaaagacaacaguauaagaaucgguuccaagggggauguguuugucauaagggaaccauucauaucaugcucccccuuggaaugcagaaccuucuucuugacccaaggggccuugcuaaaugacaaacauuccaauggaaccauuaaagacaggagcccauaucgaacccuaaugagcuguccuauuggugaaguucccucuccauacaacucaagauuugagucagucgcuuggucagcaagugcuugucaugauggcaucaauuggcuaacaauuggaauuucuggcccagacaauggggcaauggcuguguuaaaguacaacggcauaauaacagacacuaucaagaguuggagaaauaauauauugagaacacaagaaucugaaugugcauguguaaaugguucuugcuuuaccauaaugaccgauggaccaagugauggacaggccucauacaagaucuucagaauagaaaagggaaagauagucaaaucagucgaaaugaaugccccuaauuaucacuaugaggaaugcuccuguuauccugauucuagugaaaucacaugugugugcagggauaacuggcauggcucgaaucgaccgugggugucuuucaaccagaaucuggaauaucagauaggauacauaugcagugggauuuucggagacaauccacgccccaaugauaagacaggcaguugugguccaguaucgucuaauggagcaaauggaguaaaaggauuuucauucaaauacggcaaugguguuuggauagggagaacuaaaagcauuaguucaagaaaagguuuugagaugauuugggauccaaacggauggacugggacagacaauaacuucucaauaaagcaagauaucguaggaauaaaugaguggucaggauacagcgggaguuuuguucagcauccagaacuaacagggcuggauuguauaagaccuugcuucuggguugaacuaaucagaggacgacccaaagagaacacaaucuggacuagcgggagcagcauauccuuuugugguguaaacagugacacuguggguuggucuuggccagacggugcugaguugccauuuaccauugacaaguaa

SEQ ID NO: 55336 - RNA, 1410 nt, Artificial Sequence
  derived and/or modified CDS sequence (wt) from neuraminidase__InfluenzaA__AGB97274
augaauccaaaccaaaagauaauaaccauugguucggucuguaugacaauuggaauggcuaacuuaauauuacaaauuggaaacauaaucucaauauggauuagccacucaauucaacuuaggaaucaaaaucagauugaaacaugcaaucaaagcgucauuacuuaugaaaacaacacuuggguaaaucagacauauguuaacaucagcaacaccaacuuugcugcuggacagucagugguuuccgugaaauuagcgggcaauuccucucucugcccuguuaguggaugggcuauauacaguaaagacaacaguauaagaaucgguuccaagggggauguguuugucauaagggaaccauucauaucaugcucccccuuggaaugcagaaccuucuucuugacccaaggggccuugcuaaaugacaaacauuccaauggaaccauuaaagacaggagcccauaucgaacccuaaugagcuguccuauuggugaaguucccucuccauacaacucaagauuugagucagucgcuuggucagcaagugcuugucaugauggcaucaauuggcuaacaauuggaauuucuggcccagacaauggggcaguggcuguguuaaaguacaacggcauaauaacagacacuaucaagaguuggagaaauaauauauugagaacacaagaaucugaaugugcauguguaaaugguucuugcuuuaccauaaugaccgauggaccaagugauggacaggccucauacaagaucuucagaauagaaaagggaaagauagucaaaucagucgaaaugaaugccccuaauuaucacuaugaggaaugcuccuguuauccugauucuagugaaaucacaugugugugcagggauaacuggcauggcucgaaucgaccgugggugucuuucaaccagaaucuggaauaucagauaggauacauaugcagugggauuuucggagacaauccacgccccaaugauaagacaggcaguugugguccaguaucgucuaauggagcaaauggaguaaaaggauuuucauucaaauacggcaaugguguuuggauagggagaacuaaaagcauuaguucaagaaaagguuuugagaugauuugggauccaaacggauggacugggacagacaauaacuucucaauaaagcaagauaucguaggaauaaaugaguggucaggauacagcgggaguuuuguucagcauccagaacuaacagggcuggauuguauaagaccuugcuucuggguugaacuaaucagaggacgacccaaagagaacacaaucuggacuagcgggagcagcauauccuuuugugguguaaacagugacacuguggguuggucuuggccagacggugcugaguugccauuuaccauugacaaguaa

SEQ ID NO: 55337 - RNA, 1410 nt, Artificial Sequence
  derived and/or modified CDS sequence (wt) from neuraminidase__InfluenzaA__AGB97289
augaauccaaaucaaaagauaauaacgauuggcucuguuucucucaccauuuccacaauaugcuucuucaugcaaauugccaucuugauaacuacuguaacauugcauuucaagcaauaugaauucaacucccccccaaacaaccaagugaugcugugugaaccaacaauaauagaaagaaacauaacagagauaguguaucugaccaacaccaccauagagaaggaaauaugccccaaaccagcagaauacagaaauuggucaaaaccgcaauguggcauuacaggauuugcaccuuucucuaaggacaauucgauuaggcuuuccgcugguggggacaucugggugacaagagaaccuuaugugucaugcgauccugacaaguguuaucaauuugcccuuggacagggaacaacacuaaacaacgugcauucaaauaacacaguacgugauaggaccccuuaucggacucuauugaugaaugaguuggguguuccuuuucaucuggggaccaagcaagugugcauagcaugguccagcucaaguugucacgauggaaaagcauggcugcauguuuguauaacgggggaugauaaaaaugcaacugcuagcuucauuuacaaugggaggcuuguagauaguguuguuucaugguccaaagaaauucucaggacccaggagucagaaugcguuuguaucaauggaacuuguacaguaguaaugacugauggaagugcuucaggaaaagcugauacuaaaauacuauucauugaggaggggaaaaucguucauacuagcacauugucaggaagugcucagcaugucgaagagugcucuugcuauccucgauauccuggugucagaugugucugcagagacaacuggaaaggcuccaaucggcccaucguagauauaaacauaaaggaucauagcauuguuuccaguuauguguguucaggacuuguuggagacacacccagaaaaaacgacagcuccagcaguagccauuguuuggauccuaacaaugaagaagguggucauggagugaaaggcugggccuuugaugauggaaaugacguguggaugggaagaacaaucaacgagacgucacgcuuaggguaugaaaccuucaaagucauugaaggcugguccaauccuaaguccaaauugcagauaaauaggcaagucauaguugacagaggugauagguccgguuauucugguauuuucucuguugaaggcaaaagcugcaucaaucggugcuuuuauguagaguugauuaggggaagaaaagaggaaacugaagucuuguggaccucaaacaguauuguuguguuuuguggcaccucagguacauauggaacaggcucauggccugauggggcggaccucaaucucaugccuauauaa

SEQ ID NO: 55338 - RNA, 1410 nt, Artificial Sequence
  derived and/or modified CDS sequence (wt) from neuraminidase__InfluenzaA__AGE15475
augaauccaaaccaaaagauaauaaccauugguucggucuguaugacaauuggaauggcuaacuuaauauuacaaauuggaaacauaaucucaauauggauuagccacucaauucaacuugggaaucaaagucagauugaaacaugcaaucaaagcgucauuacuuaugaaaacaacacuuggguaaaucagacauauguuaacaucagcaacaccaacuuugcugcuggacagucagugguuuccgugaaauuagcgggcaauuccucucucugcccuguuaguggaugggcuauauacaguaaagacaacaguauaagaaucgguuccaagggggauguguuugucauaagggaaccauucauaucaugcucccccuuggaaugcagaacuuucuucuugacucaaggguccuugcuaaaugacaaacauuccaauggaaccauuaaagacaggagcccauaucgaacccuaaugagcuguccuauuggugaaguucccucuccauacaacucaagauuugagucagucgcuuggucagcaagugcuugucaugauggcaucaauuggcuaacaauuggaauuucuggcccagacaauggggcaguggcuguguuaaaguacaacggcauaauaacagacacuaucaaaaguuggagaaacaauauauugagaacacaagagucugaaugugcauguguaaaugguucuugcuuuaccauaaugaccgauggaccaagugauggacaggccucauacaagaucuucagaauagaaaagggaaagauagucaaaucagucgaaaugaaugccccuaauuaucacuaugaggaaugcuccuguuauccugauucuagugaaaucacaugugugugcagggauaacuggcauggcucgaaucgaccgugggugucuuucaaccagaaucuggaauaucagauaggauacauaugcagugggauuuucggagacaauccacgcccuaaugauaagacaggcaguugugguccaguaucgucuaauggagcaaauggaguaaaaggauuuucauucaaauacggcaaugguguuuggauagggagaacuaaaagcauuaguucaagaaaagguuuugagaugauuugggauccaaauggauggacugggacagacaauuacuucucaauaaagcaagauaucguaggaauaaaugaguggucaggauauagcgggaguuuuguucagcauccagaacuaacagggcuggauuguauaagaccuugcuucuggguugaacuaaucagagggcgacccaaagagaacacaaucuggacuagcgggagcagcauauccuuuugugguguaaacagugacacuguggguuggucuuggccagacggugcugaguugccauuuagcauugacaaguaa

SEQ ID NO: 55339 - RNA, 1410 nt, Artificial Sequence
  derived and/or modified CDS sequence (wt) from neuraminidase__InfluenzaA__AGE15476
augaauccaaaccaaaagauaauaaccauugguucggucuguaugacaauuggaauggcuaacuuaauauuacaaauuggaaacauaaucucaauauggauuagccacucaauucaacuugggaaucaaagucagauugaaacaugcaaucaaagcgucauuacuuaugaaaacaacacuuggguaaaucagacauauguuaacaucagcaacaccaacuuugcugcuggacagucagugguuuccgugaaauuagcgggcaauuccucucucugcccuguuaguggaugggcuauauacaguaaagacaacaguauaagaaucgguuccaagggggauguguuugucauaagggaaccauucauaucaugcucccccuuggaaugcagaaccuucuucuugacucaaggguccuugcuaaaugacaaacauuccaauggaaccauuaaagacaggagcccauaucgaacccuaaugagcuguccuauuggugaaguucccucuccauacaacucaagauuugagucagucgcuuggucagcaagugcuugucaugauggcaucaauuggcuaacaauuggaauuucuggcccagacaauggggcaguggcuguguuaaaguacaacggcauaauaacagacacuaucaagaguuggagaaacaauauauugagaacacaagagucugaaugugcauguguaaaugguucuugcuuuaccauaaugaccgauggaccaagugauggacaggccucauacaagaucuucagaauagaaaagggaaagauagucaaaucagucgaaaugaaugccccuaauuaucacuaugaggaaugcuccuguuauccugauucuagugaaaucacaugugugugcagggauaacuggcauggcucgaaucgaccgugggugucuuucaaccagaaucuagaauaucagauaggauacauaugcagugggauuuucggagacaauccacgcccuaaugauaagacaggcaguugugguccaguaucgucuaauggagcaaauggaguaaaaggauuuucauucaaauacggcaaugguguuuggauagggagaacuaaaagcauuaguucaagaaaagguuuugagaugauuugggauccaaauggauggacugggacagacaauuacuucucaauaaagcaagauaucguaggaauaaaugaguggucaggauauagcgggaguuuuguucagcauccagaacuaacagggcuggauuguauaagaccuugcuucuggguugaacuaaucagagggcgacccaaagagaacacaaucuggacuagcgggagcagcauauccuuuugugguguaaacagugacacuguggguuggucuuggccagacggugcugaguugccauuuaccauugacaaguaa

SEQ ID NO: 55340 - RNA, 1410 nt, Artificial Sequence
  derived and/or modified CDS sequence (wt) from neuraminidase__InfluenzaA__AGE15477
augaauccaaaccaaaagauaauaaccauugguucggucuguaugacaauuggaauggcuaacuuaauauuacaaauuggaaacauaaucucaauauggauuagccacucaauucaacuuaggaaucaaagucagauugaaacaugcaaucaaagcgucauuacuuaugaaaacaacacuuggguaaaucagacauauguuaacaucagcaacaccaacuuugcugcuggacagucagugguuuccgugaaauuagcgggcaauuccucucucugcccuguuaguggaugggcuauauacaguaaagacaacaguauaagaaucgguuccaagggggauguguuugucauaagggaaccauucauaucaugcuccccccuggaaugcagaaccuucuucuugacccaaggggccuugcuaaaugacaaacauuccaauggaaccauuaaagacaggagcccauaucgaacccuaaugagcuguccuauuggugaaguucccucuccauacaacucaagauuugagucagucgcuuggucagcaagugcuugucaugauggcaucaauuggcuaacaauuggaauuucuggcccagacaauggggcaguggcuguguuaaaguacaacggcauaauaacagacacuaucaagaguuggagaaauaauauauugagaacacaagaaucugaaugugcauguguaaaugguucuugcuuuaccauaaugaccgauggaccaagugauggacaggccucauacaagaucuucagaauagaaaagggaaagauagucaaaucagucgaaaugaaugccccuaauuaucacuaugaggaaugcuccuguuauccugauucuagugaaaucacaugugugugcagggauaacuggcauggcucgaaucgaccgugggugucuuucaaccagaaucuggaauaucagauaggauacauaugcagugggauuuucggagacaauccacgcccuaaugauaagacaggcaguugugguccaguaucgucuaauggagcaaauggaguaaaaggauuuucauucaaauacggcaaugguguuuggauagggagaacuaaaagcauuaguucaagaaaagguuuugagaugauuugggauccaaacggauggacugggacagacaauaacuucucaauaaagcaagauaucguaggaauaaaugaguggucaggauacagcgggaguuuuguucagcauccagaacuaacagggcuggauuguauaagaccuugcuucuggguugaacuaaucagaggacgacccaaagagaacacaaucuggacuagcgggagcagcauauccuuuugugguguaaacagugacacuguggguuggucuuggccagacggugcugaguugccauuuaccauugacaaguaa

SEQ ID NO: 55341 - RNA, 1410 nt, Artificial Sequence
  derived and/or modified CDS sequence (wt) from neuraminidase__InfluenzaA__AGE15478
augaauccaaaccaaaagauaauaaccauugguucggucuguaugacaauuggaauggcuaacuuaauauuacaaauuggaaacauaaucucaauauggauuagccacucaauucaacuugggaaucaaagucagauugaaacaugcaaucaaagcgucauuacuuaugaaaacaacacuuggguaaaucagacauauguuaacaucagcaacaccaacuuugcugcuggacagucagugguuuccgugaaauuagcgggcaauuccucucucugcccuguuaguggaugggcuauauacaguaaagacaacaguauaagaaucgguuccaagggggauguguuugucauaagggaaccauucauaucaugcucccccuuggaaugcagaaccuucuucuugacucaaggguccuugcuaaaugacaaacauuccaauggaaccauuaaagacaggagcccauaucgaacccuaaugagcuguccuauuggugaaguucccucuccauacaacucaagauuugagucagucgcuuggucagcaagugcuugucaugauggcaucaauuggcuaacaauuggaauuucuggcccagacaauggggcaguggcuguguuaaaguacaacggcauaauaacagacacuaucaagaguuggagaaacaauauauugagaacacaagagucugaaugugcauguguaaaugguucuugcuuuaccauaaugaccgauggaccaagugauggacaggccucauacaagaucuucagaauagaaaagggaaagauagucaaaucagucgaaaugaaugccccuaauuaucacuaugaggaaugcuccuguuauccugauucuagugaaaucacaugugugugcagggauaacuggcauggcucgaaucgaccgugggugucuuucaaccagaaucuagaauaucagauaggauacauaugcagugggauuuucggagacaauccacgcccuaaugauaagacaggcaguugugguccaguaucgucuaauggagcaaauggaguaaaaggauuuucauucaaauacggcaaugguguuuggauagggagaacuaaaagcauuaguucaagaaaagguuuugagaugauuugggauccaaauggauggacugggacagacaauuauuucucaauaaagcaagauaucguaggaauaaaugaguggucaggauauagcgggaguuuuguucagcauccagaacuaacagggcuggauuguauaagaccuugcuucuggguugaacuaaucagagggcgacccaaagagaacacaaucuggacuagcgggagcagcauauccuuuugugguguaaaaagugacacuguggguuggucuuggccagacggugcugaguugccauuuaccauugacaaguaa

SEQ ID NO: 55342 - RNA, 1410 nt, Artificial Sequence
  derived and/or modified CDS sequence (wt) from neuraminidase__InfluenzaA__AGE15479
augaauccaaaccaaaagauaauaaccauugguucggucuguaugacaauuggaauggcuaacuuaauauuacaaauuggaaacauaaucucaauauggauuagccacucaauucaacuugggaaucaaagucagauugaaacaugcaaucaaagcgucauuacuuaugaaaacaacacuuggguaaaucagacauauguuaacaucagcaacaccaacuuugcugcuggacagucagugguuuccgugaaauuagcgggcaauuccucucucugcccuguuaguggaugggcuauauacaguaaagacaacaguauaagaaucgguuccaagggggauguguuugucauaagggaaccauucauaucaugcucccccuuggaaugcagaacuuucuucuugacucaaggguccuugcuaaaugacaaacauuccaauggaaccauuaaagacaggagcccauaucgaacccuaaugagcuguccuauuggugaaguucccucuccauacaacucaagauuugagucagucgcuuggucagcaagugcuugucaugauggcaucaauuggcuaacaauuggaauuucuggcccagacaauggggcaguggcuguguuaaaguacaacggcauaauaacagacacuaucaagaguuggagaaacaauauauugagaacacaagagucugaaugugcauguguaaaugguucuugcuuuaccauaaugaccgauggaccaauugauggacaggccucauacaagaucuucagaauagaaaagggaaagauagucaaaucagucgaaaugaaugccccuaauuaucacuaugaggaaugcuccuguuauccugauucuagugaaaucacaugugugugcagggauaacuggcauggcucgaaucgaccgugggugucuuucaaccagaaucuggaauaucagauaggauacauaugcagugggauuuucggagacaauccacgcccuaaugauaagacaggcaguugugguccaguaucgucuaauggagcaaauggaguaaaaggauuuucauucaaauacggcaaugguguuuggauagggagaacuaaaagcauuaguucaagaaaagguuuugagaugauuugggauccaaauggauggacugggacagacaauuacuucucaauaaagcaagauaucguaggaauaaaugaguggucaggauauagcgggaguuuuguucagcauccagaacuaacagggcuggauuguauaagaccuugcuucuggguugaacuaaucagagggcgacccaaagagaacacaaucuggacuagcgggagcagcauauccuuuugugguguaaacagugacacuguggguuggucuuggccagacggugcugaguugccauuuaccauugacaaguaa

SEQ ID NO: 55343 - RNA, 1410 nt, Artificial Sequence; identical to SEQ ID NO: 55340
  derived and/or modified CDS sequence (wt) from neuraminidase__InfluenzaA__AGE15480

SEQ ID NO: 55344 - RNA, 1410 nt, Artificial Sequence; identical to SEQ ID NO: 53005
  derived and/or modified CDS sequence (wt) from neuraminidase__InfluenzaA__AGE89270

SEQ ID NO: 55345 - RNA, 1410 nt, Artificial Sequence
  derived and/or modified CDS sequence (wt) from neuraminidase__InfluenzaA__AGE89280
augaauccaaaccaaaagauaauaaccauugguucggucuguaugacaauuggaauggccaacuuaauauuacaaauuggaaacauaaucucaauauggauuagccacucaauucaacuugggaaucaaaaucagauugaaacaugcaaucaaagcgucauuacuuaugaaaacaacacuuggguaaaucagacauauguuaacaucagcaacaccaacuuugcugcuggacagucaguaguucccgugaaauuagcgggcaauuccucucucugcccuguuaguggaugggcuauauacaguaaagacaacaguauaagaaucgguuccaagggggauguguuugucauaagggaaccauucauaucaugcucccccuuggaaugcagaaccuucuucuugacucaaggggccuuacuaaaugacaaacauuccaauggaaccauuaaagacaggagcccauaucgaacccuaaugagcuguccuauuggugaaguucccucuccauacaacucaagauuugagucagucgcuuggucagcaagugcuugucaugauggcaucaauuggcuaacaauuggaauuucuggcccagacaauggggcaguggcuguguuaaaguacaacggcauaauaacagacacuaucaagaguuggagaaacaauauauugagaacacaagagucugaaugugcauguguaaaugguucuugcuuuacuguaaugaccgauggaccaagugauggacaggccucauacaagaucuucagaauagaaaagggaaagauagucaaaucagucgaaaugaaugccccuaauuaucacuaugaggaaugcuccuguuauccugauucuagugaaaucacaugugugugcagggauaacuggcauggcucgaaccgaccgugggugucuuucaaccagaaucuggaauaucagauaggauacauaugcagugggauuuucggagacaauccacguccuaaugacaagacaggcaguugugguccaguaucgucuaauggagcaaauggaguaaaaggauuuucauucaaauacggcaaugguguuuggauagggagaacuaaaagcauuaguucaagaaacggguuugagaugauuugggauccgaacggauggacugggacagacaauaacuucucaauaaagcaagauaucguaggaauaaaugaguggucaggauauagcgggaguuuuguucagcauccagaacuaacagggcuggauuguauaagaccuugcuucuggguugaacuaaucagagggcgacccaaagagaacacaaucuggacuagcgggagcagcauauccuuuugugguguaaacagugacacuguggguuggucuuggccagacggugcugaguugccauuuaccauugacaaguaa

SEQ ID NO: 55346 - RNA, 1410 nt, Artificial Sequence
  derived and/or modified CDS sequence (wt) from neuraminidase__InfluenzaA__AGE89290
augaauccaaaucaaaagauaauaacgauuggcucuguuucucucaccauuuccacaauaugcuucuucaugcaaauugccaucuugauaacuacuguaacauugcauuucaagcaauaugaauucaacucccccccaaacaaccaagugaugcugugugaaccaacaauaauagaaagaaacauaacagagauaguguaucugaccaacaccaccauagagaaggaaauaugccccaaacuagcagaauacagaaauuggucaaagccgcaaugugacauuacaggauuugcaccuuuuucuaaggacaauucgauuaggcuuuccgcugguggggacaucugggugacaagagaaccuuaugugucaugcgauccugacaaguguuaucaauuugcccuuggacagggaacaacacuaaacaacgugcauucaaauaacacaguacgugauaggaccccuuaucggacccuauugaugaaugaguuagguguuccuuuucaucuggggaccaagcaaguuugcauagcaugguccagcucaaguugucacgauggaaaagcauggcugcauguuuguauaacgggggaugauaaaaaugcaacugcuagcuucauuuacaaugggaagcuuguagauaguguuguuucaugguccaaagaaauccucaggacccaggagucagaaugcguuuguaucaauggaacuuguauaguaguaaugacugaugggagugcuucaggaaaagcugauacuaaaauacuauucguugaggaggggaaaaucguucauacuagcacauugucaggaagugcucagcaugucgaggagugcucuugcuauccucgauauccuggugucagaugugucugcagagacaacuggaaaggcuccaauaggcccauaguagauauaaacauaaaggaucauagcauuauuuccaguuauguauguucaggacuuguuggagacacacccagaaaaaacgacagcuccagcaguagccauuguuuggauccuaacaaugaagaagguggucauggagugaaaggcugggccuuugaugauggaaaugacguguggaugggaagaacgaucaacgagacgucacguuuaggguaugaaaccuucaaagucauugaaggcugguccaacccuaaguccaaauugcagauaaauaggcaagucauaguugacagagguaauagguccgguuauucugguauuuucucuguugaaggcaaaagcugcaucaaucggugcuuuuauguggaguugauuaggggaagaaaggaggaaacugaagucuuguggaccucaaacaguauuguuguguuuuguggcaccucagguacauauggaacaggcucauggccugauggggcggaccucaaucucaugccuauauaa

SEQ ID NO: 55347 - RNA, 1410 nt, Artificial Sequence
  derived and/or modified CDS sequence (wt) from neuraminidase__InfluenzaA__AGE89301
augaauccaaaccaaaagauaauaaccauugguucggucuguaugacaauuggaauggcuaacuuaauauuacaaauuggaaacauaaucucaauauggauuagccacucaauccaacuugggaaucaaagucagauugaaacaugcaaucaaagcgucauuacuuaugaaaacaacacuuggguaaaucagacauauguuaacaucagcaacaccaauuuugcugcuggacagucagugguuuccgugaaauuagcgggcaauuccucucucugcccuguuaguggaugggcuauauacaguaaagacaacaguauaagaaucgguuccaagggggauguguuugucauaagggaaccauucauaucaugcucccccuuggaaugcagaaccuucuucuugacucaaggggccuugcuaaaugacaaacauuccaauggaaccauuaaagacaggagcccauaucgaacccuaaugagcuguccuauuggugaaguucccucuccauacaacucaagauuugagucagucgcuuggucagcaagugcuugucaugauggcaucaauuggcuaacaauuggaauuucuggcccagacaauggggcaguggcuguguuaaaguacaacggcauaauaacagacacuaucaagaguuggagaaacaauauauugagaacacaagagucugaaugugcauguguaaaugguucuugcuuuaccauaaugaccgauggaccaagugauggacaggccucauacaagaucuucagaauagaaaagggaaagauagucaaaucagucgaaaugaaugccccuaauuaucacuaugaggaaugcuccuguuauccugauucuagugaaaucacaugugugugcagggauaacuggcauggcucgaaucgaccgugggugucuuucaaccagaaucuggaauaucagauaggauacauaugcagugggauuuucggagacaauccacgcccuaaugauaagacaggcaguugugguccaguaucgucuaauggagcaaauggaguaaaaggauuuucauucaaauacggcaaugguguuuggauagggagaacuaaaagcauuaguucaagaaaagguuuugagaugauuugggauccaaacggauggacugggacagacaauaacuucucaauaaagcaagauaucguaggaauaaaugaguggucaggauauagcgggaguuuuguucagcauccagaacuaacagggcuggauuguauaagaccuugcuucuggguugaacuaaucagagggcgacccaaagagaacacaaucuggacuagcgggagcagcauauccuuuugugguguaaacagugacacuguggguuggucuuggccagacggugcugaguugccauuuaccauugacaaguaa

SEQ ID NO: 55348 - RNA, 1410 nt, Artificial Sequence
  derived and/or modified CDS sequence (wt) from neuraminidase__InfluenzaA__AGE89311
augaauccaaaccaaaagauaauaaccauugguucggucuguaugacaauuggaauggcuaacuuaauauuacaaauuggaaacauaaucucaauauggauuagccacucaauucaacuugggaaucaaaaucagauugaaacaugcaaucaaagcgucauuacuuaugaaaacaacacuuggguaaaucagacauauguuaacaucagcaacaccaacuuugcugcuggacagucagugguuuccgugaaauuagcgggcaauuccucucucugcccuguuaguggaugggcuauauacaguaaagacaacaguauaagaaucgguuccaagggggauguguuugucauaagggaaccauucauaucaugcucccccuuggaaugcagaaccuucuucuugacucaaggggccuugcuaaaugacaaacauuccaauggaaccauuaaagacaggagcccauaucgaacccuaaugagcuguccuauuggugaaguucccucuccauacaacucaagauuugagucagucgcuuggucagcaagugcuugucaugaugguaucaauuggcuaacaauuggaauuucuggcccagacaauggggcaguggcuguguuaaaguacaacggcauaauaacagacacuaucaagaguuggaaaaacaauauauugagaacacaagagucugaaugugcauguguaaaugguucuugcuuuacuguaaugaccgauggaccaagugauggacaggccucauacaagaucuucagaauagaaaagggaaagauagucaaaucagucgaaaugaaugccccuaauuaucacuaugaggaaugcuccuguuauccugauucuagugaaaucacaugugugugcagggauaacuggcauggcucgaaucgaccgugggugucuuucaaccagaaucuggaauaucggauaggauacauaugcagugggauuuucggagacaauccacgcccuaaugauaagacaggcaguugugguccaguaucgucuaauggagcaaauggaguaaaaggauuuucauucaaauacggcaaugguguuuggauagggagaacuaaaagcauuaguucaagaaacgguuuugagaugauuugggacccgaacggauggacugggacagacaauaacuucucaaaaaagcaagauaucauaggaauaaaugaguggucaggauauagcgggaguuuuguucagcauccagaacuaacagggcuggauuguauaagaccuugcuucuggguugaacuaaucagagggcggcccaaagagaacacaaucuggacuagcgggagcagcauguccuuuugugguguaaacagugacacuguggguuggucuuggccagacggugcugaguugccauuuaccauugacaaguaa

SEQ ID NO: 55349 - RNA, 1410 nt, Artificial Sequence; identical to SEQ ID NO: 53811
  derived and/or modified CDS sequence (wt) from neuraminidase__InfluenzaA__AGE89321

SEQ ID NO: 55350 - RNA, 1410 nt, Artificial Sequence
  derived and/or modified CDS sequence (wt) from neuraminidase__InfluenzaA__AGE89332
augaauccaaaucaaaagauaauaacgauuggcucuguuucucucaccauuuccacaauaugcuucuucaugcaaauugccaucuugauaacuacuguaacauugcauuucaagcaauaugaauucaacucccccccaaacaaccaagugaugcugugugaaccaacaauaauagaaagaaacauaacagagauaguguaucugaccaacaccaccauagagaaggaaauaugccccaaacuagcagaauacagaaauuggucaaagccgcaaugugacauuacaggauuugcaccuuuuucuaaggacaauucgauuaggcuuuccgcugguggggacaucugggugacaagagaaccuuaugugucaugcgauccugacaaguguuaucaauuugcccuuggacagggaacaacacuaaacaacgugcauucaaauaacacaguacgugauaggaccccuuaucggacccuauugaugaaugaguuagguguuccuuuucaucuggggaccaaacaagugugcauagcaugguccagcucaaguugucacgauggaaaagcauggcugcauguuuguauaacgggggaugauaaaaaugcaacugcuagcuucauuuacaaugggaagcuuguagauaguguuguuucaugguccaaagaaauccucaggacccaggagucagaaugcguuuguaucaauggaacuuguacaguaguaaugacugaugggagugcuucaggaaaagcugauacuaaaauacuauucauugaggaggggaaaaucguucauacuagcacauugucaggaagugcucagcauguugaggagugcucuugcuauccucgauauccuggugucagaugugucugcagagacaacuggaaaggcuccaauaggcccaucguagauauaaacauaaaggaucauagcauuguuuccaguuauguguguucaggacuuguuggagacacacccagaaaaaacgacagcuccagcaguagccauuguuuggauccuaacaaugaggaagguggucauggagugaaaggcugggccuuugaugauggaaaugacguguggaugggaagaacgaucaacgagacgucacguuuaggguaugaaaccuucaaagucauugaaggcugguccaacccuaaguccaaauugcagauaaauaggcaagucauaguugacagagguaauagguccgguuauucugguauuuucucuguugaaggcaaaagcugcaucaaucggugcuuuuauguggaguugauuaggggaagaaaagaggaaacugaagucuuauggaccucaaacaguauuguuguguuuuguggcaccucagguacauauggaacaggcucauggccugauggggcggaccucaaucucaugccuauauaa

SEQ ID NO: 55351 - RNA, 1410 nt, Artificial Sequence
  derived and/or modified CDS sequence (wt) from neuraminidase__InfluenzaA__AGE89343
augaauccaaaccaaaagauaauaaccauugguucggucuguaugacaauuggaauggcuaacuuaauauuacaaauuggaaacauaaucucaauauggauuagccacucaauucaacuugggaaucaaagucaaauugaaacaugcaaucaaagcgucauuacuuaugaaaacaacacuuggguaaaucagacauauguuaacaucagcaacaccaacuuugcugcuggacagucagugguuuccgugaaauuagcgggcaauuccucucucugcccuguuaguggaugggcuauauacaguaaagacaacaguauaagaaucgguuccaagggggauguguuugucauaagggaaccauucauaucaugcuccccauuggaaugcagaaccuucuuuuugacucaaggggccuugcuaaaugacaaacauuccaauggaaccauuaaagacaggagcccauaucgaacccuaaugagcuguccuauuggugaaguucccucuccauacaacucaagauuugagucagucgcuuggucagcaagugcuugucaugauggcaucaauuggcuaacaauuggaauuucuggcccagacaauggggcaguggcuguguuaaaguacaacggcauaauaacagacacuaucaagaguuggagaaacaauauauugagaacacaagagucugaaugugcauguguaaaugguucuugcuuuaccauaaugaccgauggaccaagugauggacaggccucauacaagaucuucagaauagaaaagggaaagauagucaaaucagucgaaaugaaugccccuaauuaucacuaugaggaaugcuccuguuauccugauucuagugaaaucacaugugugugcagggauaacuggcauggcucgaaucgaccgugggugucuuucaaccagaaucuggaauaucagauaggauacauaugcagugggauuuucggagacaauccacgcccuaaugauaagacaggcaguugugguccaguaucgucuaauggagcaaauggaguaaaaggauuuucauucaaauacggcaaugguguuuggauagggagaacuaaaagcauuagcucaagaaaagguuuugagaugauuugggauccaaacggauggacugggacagacaauaacuucucaauaaagcaagauaucguaggaauaaaugaguggucaggauauagcgggaguuuuguucagcauccagaacuaacagggcuggauuguauaagaccuugcuucuggguugaacuaaucagagggcgacccaaagagaacacaaucuggacuagcgggagcagcauauccuuuugugguguaaacagugacacuguggguuggucuuggccagacggugcugaguugccauuuaccauugacaaguaa

SEQ ID NO: 55352 - RNA, 1410 nt, Artificial Sequence
  derived and/or modified CDS sequence (wt) from neuraminidase__InfluenzaA__AGE89353
augaauccaaaucaaaagauaauaacgauuggcucaguuucucucaccauuuccacaauaugcuucuucaugcaaauugccaucuugauaacuacuguaacauugcauuucaagcaauaugaauucaacucccccccaaacaaccaagugaugcugugugaaccgacaauaauagaaagaaacauaacagagauaguguaucugaccaacaucaccauagagaaggaaauaugccccaaacuagcagaauacagaaauuggucaaaaccgcaaugugacauuacaggauuugcaccuuuuucuaaggacaauucgauuaggcuuuccgcugguggggacaucugggugacaagagaaccuuaugugucaugcgauccugacaaguguuaucaauuugcccuuggacagggaacaacacuaaacaacgugcauucaaauaacacaguacgugauaggaccccuuaucggacccuauugaugaaugaguuagguguuccuuuucaucuggggaccaagcaagugugcauagcaugguccagcucaaguugucacgaugggaaagcauggcugcauguuuguauaacgggggaugauaaaaaugcaacugcaagcuucauuuacaaugggaggcuuguagauaguguuguuucaugguccaaagaaauucucaggacccaggagucagaaugcguuuguaucaauggaacuuguacaguaguaaugacugauggaagugcuucaggaaaagcugauacuaaaauacuauucauugaggaggggaaaaucguucauacuagcacauugucaggaagugcucagcaugucgaggagugcucuugcuauccucgauauccuggugucagaugugucugcagagacaacuggaaaggcuccaauaggcccaucguagauauaaacauaaaggaucauagcauaguuuccaguuauguguguucaggacuuguuggagacacacccagaaaaaacgacagcuccagcaguagccauuguuuggauccuaacaaugaagaagguggucauggagugaaaggcugggccuuugaugauggaaaugacguguggaugggaagaacaaucaacgagacgucacgcuugggguaugaaaccuucaaagucauugaaggcugguccaacccuaaguccaaauugcagauaaauaggcaagucauaguugacaaagguaauagguccgguuauucugguauuuucucuguugaaggcaaaagcugcaucaaucggugcuuuuauguggaguugauuaggggaagaaaagaggaaacugaagucuuguggaccucaaacaguauuguuguguuuuguggcaccucagguacauauggaacaggcucauggccugauggggcggaccucaaucucaugccuauauaa

SEQ ID NO: 55353 - RNA, 1410 nt, Artificial Sequence
  derived and/or modified CDS sequence (wt) from neuraminidase__InfluenzaA__AGE89364
augaauccaaaccaaaagauaauaaccauugguucggucuguaugacaauuggaauggcuaacuuaauauuacaaauuggaaacauaaucucaauauggauuagccacucaauucaacuugggaaucaaaaucagauugaaacaugcaaucaaagcgucauuacuuaugaaaacaacacuuggguaaaucagacauauguuaacaucagcaacaccaacuuugcugcugaacagucagugguuuccgugaaauuagcgggcaauuccucucucugcccuguuaguggaugggcuauauacaguaaagacaacaguauaagaaucgguuccaagggggauguguuugucauaagagaaccauucauaucaugcucccccuuggaaugcagaaccuucuucuugacucaaggggccuugcuaaaugacaaacauuccaauggaaccauuaaagacaggagcccauaucgaacccuaaugagcuguccuauuggugaaguucccucuccauacaacucaagauuugagucagucgcuuggucagcaagugcuugucaugauggcaucaauuggcuaacaauuggaauuucuggcccagacaauggggcaguggcuguguuaaaguacaacggcauaauaacagacacuaucaagaguuggagaaacaauauauugagaacacaagagucugaaugugcauguguaaaugguucuugcuuuaccauaaugaccgauggaccaagugauggacaggccucauacaagaucuucagaauagaaaagggaaagauagucaaaucagucgaaaugaaugccccuaauuaucacuaugaggaaugcuccuguuauccugauucuagugaaaucacaugugugugcagggauaacuggcauggcucgaaucgaccgugggugucuuucaaccagaaucuggaauaucagauaggauacauaugcagugggauuuucggagacaauccacgcccuaaugauaagacaggcaguugugguccaguaucgucuaauggagcaaauggaguaaaaggauuuucauucaaauacggcaaugguguuuggauagggagaacuaaaagcauuaguucaagaaaagguuuugagaugauuugggauccaaacggauggacugggacagacaauaacuucucaauaaagcaagauaucguaggaauaaaugaguggucaggauauagcgggaguuuuguucagcauccagaacuaacagggcuggacuguauaagaccuugcuucuggguugaacuaaucagagggcgacccaaagagaacacaaucuggacuagcgggagcagcauauccuuuugugguguaaacagugacacuguggguuggucuuggccagacggugcugaguugccauuuaccauugacaaguaa

SEQ ID NO: 55354 - RNA, 1410 nt, Artificial Sequence
  derived and/or modified CDS sequence (wt) from neuraminidase__InfluenzaA__AGE89374
augaauccaaaucaaaagauaauaacgauuggcucuguuucucucaccauuuccacaauaugcuucuucaugcaaauugccaucuugauaacuacuguaacauugcauuucaagcaauaugaauucaacucccccccaaacaaccaagugaugcugugugaaccgacaauaauagaaagaaacauaacagagauaguguaucugaccaacaccaccauagagaaggaaauaugccccaaacuagcagaauacagaaauuggucaaaaccgcaaugugacauuacaggauuugcaccuuuuucuaaggacaauucgauuaggcuuuccgcugguggggacaucugggugacaagagaaccuuaugugucaugcgauccugacaaguguuaucaauuugcccuuggacagggaacaacacuaaacaacgugcauucaaauaacacaguacgugauaggaccccuuaucggacccuauugaugaaugaguuagguguuccuuuucaucuggggaccaagcaagugugcauagcaugguccagcucaaguugucacgauggaaaagcauggcugcauguuuguauaacgggggaugauaaaaaugcaacugcaagcuucauuuacaaugggaggcuuguagauaguguuguuucaugguccaaagaaauucucaggacccaggagucagaaugcguuuguaucaauggaacuuguacaguaguaaugacugauggaagugcuucaggaaaagcugauacuaaaauacuauucauugaggaggggaaaaucguucauacuagcacauugucaggaagugcucagcaugucgaggagugcucuugcuauccucgauauccuggcgucagaugugucugcagagacaacuggaaaggcuccaauaggcccaucguagauauaaacauaaaggaucauagcauaguuuccaguuauguguguucaggacuuguuggagacacacccagaaaaaacgacagcuccagcaguagccauuguuuggauccuaacaaugaagaagguggucauggagugaaaggcugggccuuugaugauggaaaugacguguggaugggaagaacaaucaacgagacgucacgcuugggguaugaaaccuucaaagucauugaaggcugguccaacccuaaguccaaauugcagauaaauaggcaagucauaguugacaaagguaauagguccgguuauucugguauuuucucuguugaaggcaaaagcugcaucaaucggugcuuuuauguggaguugauuaggggaagaaaagaggaaacugaagucuuguggaccucaaacaguauuguuguguuuuguggcaccucagguacauauggaacaggcucauggccugauggggcggaccucaaucucaugccuauauaa

SEQ ID NO: 55355 - RNA, 1410 nt, Artificial Sequence
  derived and/or modified CDS sequence (wt) from neuraminidase__InfluenzaA__AGE89385
augaauccaaaccaaaagauaauaaccauugguucggucuguaugacaauuggaauggcuaacuuaauauugcaaauuggaaacauaaucucaauauggauuagccacucaauucaacuugggaaucaaaaucagauugaaacaugcaaucaaagcgucauuacuuaugaaaacaacacuuggguaaaucagacauauguuaacaucagcaacaccaacuuugcugcuggacagucaguggcuuccgugaaauuagcgggcaauuccucucucugcccuguuaguggaugggcuauauacaguaaagacaacaguauaagaaucgguuccaagggggauguguuugucauaagggaaccauucauaucaugcucccccuuggaaugcagaaccuucuucuugacucaaggggcuuugcuaaaugacaaacauuccaauggaaccauuaaagacaggagcccauaucgaacccuaaugagcuguccuauuggugaaguucccucuccauacaacucaagauuugagucagucgcuuggucagcaagugcuugucaugauggcaucaauuggcuaacaauuggaauuucuggcccagacaauggggcaguggcuguguuaaaguacaacggcauaauaacagacacuaucaagaguuggagaaacaauauauugagaacacaagagucugaaugugcauguguaaaugguucuugcuuuaccauaaugaccgauggaccaagugauggacaggccucauacaagaucuucagaauagaaaagggaaagauagucaaaucagucgaaaugaaugccccuaauuaucacuaugaggaaugcuccuguuauccugauucuagugaaaucacaugugugugcagagauaacuggcauggcucgaaucgaccgugggugucuuucaaccagaaucuggaauaucagauaggauacauaugcagugggauuuucggagacaauccacgcccuaaugauaagacaggcaguugugguccaguaucgucuaauggagcaaauggaguaaaaggauuuucauucaaauacggcaaugguguuuggauagggagaacuaaaagcauuaguucaagaaaagguuuugagaugauuugggauccaaacggauggacugggacagacaauaacuucucaauaaagcaagauaucguaggaauaaaugaguggucaggauauagcggaaguuuuguucagcauccagaacuaacagggcuggauuguauaagaccuugcuucuggguugaacuaaucagagggcgacccaaagagaacacaaucuggacuagcgggagcagcauauccuuuugugguguaaacagugacacuguggguuggucuuggccagacggugcugaguugccauuuaccauugacaaguaa

SEQ ID NO: 55356 - RNA, 1410 nt, Artificial Sequence
  derived and/or modified CDS sequence (wt) from neuraminidase__InfluenzaA__AGE89395
augaauccaaaucaaaagauaauaacgauuggcucuguuucucucaccauuuccacaauaugcuucuucaugcaaauugccaucuugauaacuacuguaacauugcauuucaagcaauaugaauucaacucccccccaaacaaccaagugaugcugugugaaccaacaauaauagaaagaaacauaacagagauaguguaucugaccaacaccaccauagagaaggaaauaugccccaaaccagcagaauacagaaauuggucaaagccgcaaugugacauuacaggauuugcaccuuuuucuaaggacaauucgauuaggcuuuccgcugguggggacaucugggugacaagagaaccuuaugugucaugcgauccugacaaguguuaucaauuugcccuuggacagggaacaacacuaaacaacgugcauucaaauaacacaguacgugauaggaccccuuaucggacccuauugaugaaugaguuagguguuccuuuucaucuggggaccaagcaagugugcauagcaugguccagcucaaguugucacgauggaaaagcauggcugcauguuuguauaacgggggaugauaaaaaugcaacugcuagcuucauuuacaaugggaggcuuguagauaguguuguuucaugguccaaagaaauccucaggacccaggagucagaaugcguuuguaucaauggaacuuguacaguaguaaugacugaugggagugcuucaggaaaagcugauacuaaaauacuauucauugaggaggggaaaaucguucauacuagcacauugucaggaagugcucagcaugucgaggagugcucuugcuauccucgauauccuggugucagaugugucugcagagacaacuggaaaggcuccaauaggcccaucguagauauaaacauaaaggaucauagcauuguuuccaguuauguguguucaggacuuguuggagacacacccagaaaaaacgacagcuccagcaguagccauuguuuggauccuaacaaugaagaagguggucauggagugaaaggcugggccuucgaugauggaaaugacguguggaugggaagaacgaucaacgagacgucacguuuaggguaugaaaccuucaaagucauugaaggcugguccaacccuaaguccaaauugcagauaaauaggcaggucauaguugacagagguaauagguccgguuauucugguauuuucucuguugaaggcaaaagcugcaucaaucggugcuuuuauguggaguugauuaggggaagaaaagaggaaacugaagucuuguggaccucaaacaguauuguuguguuuuguggcaccucagguacauauggaacaggcucauggccugauggggcggaccucaaucucaugccuauauaa

SEQ ID NO: 55357 - RNA, 1410 nt, Artificial Sequence; identical to SEQ ID NO: 53005
  derived and/or modified CDS sequence (wt) from neuraminidase__InfluenzaA__AGE89425

SEQ ID NO: 55358 - RNA, 1410 nt, Artificial Sequence
  derived and/or modified CDS sequence (wt) from neuraminidase__InfluenzaA__AGE89722
augaauccaaaucaaaagauaauaacgauuggcucuguuucucucaccauuuccacaauaugcuucuucaugcaaauugccaucuugauaacuacuguaacauugcauuucaagcaauaugaauucaacucccccccaaacaaccaagugaugcugugugaaccaacaauaauagaaagaaacauaacagagauaguguaucugaccaacaccaccauagagaaggaaauaugccccaaacuagcagaauacagaaauuggucaaagccgcaaugugacauuacaggauuugcaccuuuuucuaaggacaauucgauuaggcuuuccgcugguggggacaucugggugacaagagaaccuuaugugucaugcgauccugacaaguguuaucaauuugcccuuggacagggaacaacacuaaacaaugugcauucaaauaacacaguacgugauaggaccccuuaucggacccuauugaugaaugaguuagguguuccuuuucaucuggggaccaagcaagugugcauagcaugguccagcucaaguugucacgauggaaaagcauggcugcauguuuguauaacgggggaugauaaaaaugcaacugcuagcuucauuuacaaugggaggcuuguagauaguguuguuucaugguccaaagaaauccucaggacccaggagucagaaugcguuuguaucaauggaacuuguacaguaguaaugacugaugggagugcuucaggaaaagcugauacuaaaauacuauucauugaggaggggaaaaucguucauacuagcacauugucaggaagugcucagcaugucgaggagugcucuugcuauccucgauauccuggugucagaugugucugcagagacaacuggaaaggcuccaauaggcccaucguagauauaaacauaaaggaucauagcauuguuuccaguuauguguguucaggacuuguuggagacacacccagaaaaaacgacagcuccagcaguagccauuguuuggauccuaacaaugaagaagguggucauggagugaaaggcugggccuuugaugauggaaaugacguguggaugggaagaacgaucaacgagacgucacguuuaggguaugaaaccuucaaagucauugaaggcugguccaacccuaaguccaaauugcagauaaauaggcaagucauaguugauagagguaauagguccgguuauucugguauuuucucuguugaaggcaaaagcugcaucaaucggugcuuuuauguggaguugauuaggggaagaaaagaggaaacugaagucuuguggaccucaaacaguauuguuguguuuuguggcaccucagguacauauggaacaggcucauggccugauggggcggaccucaaucucaugccuauauaa

SEQ ID NO: 55359 - RNA, 1410 nt, Artificial Sequence
  derived and/or modified CDS sequence (wt) from neuraminidase__InfluenzaA__AGE89733
augaauccaaaccaaaagauaauaaccauugguucggucuguaugacaauuggaauggcuaacuuaauauuacaaauuggaaacauaaucucaauauggauuagccacucaauucaacuugggaaucaaaaucagauugaaacaugcaaucaaagcgucauuacuuaugaaaacaacacuuggguaaaucagacauauguuaacaucagcaacaccaacuuugcugcuggacagucagugguuuccgugaaauuagcgggcaauuccucucucugcccuguuaguggaugggcuauauacaguaaagacaacaguauaagaaucgguuccaagggggauguguuugucauaagggaaccauucauaucaugcucccccuuggaaugcagaaccuucuucuugacucaaggggcuuugcuaaaugacaaacauuccaauggaaccauuaaagacaggagcccauaucgaacccuaaugagcuguccuauuggugaaguucccucuccauacaacucaagauuugagucagucgcuuggucagcaagugcuugucaugauggcaucaauuggcuaacaauuggaauuucuggcccagacaauggggcaguggcuguguuaaaguacaacggcauaauaacagacacuaucaagaguuggagaaacaauauauugagaacacaagagucugaaugugcauguguaaaugguucuugcuuuaccauaaugaccgauggaccaaaugauggacaggccucauacaagaucuucagaauagaaaagggaaagauagucaaaucagucgaaaugaaugccccuaauuaucacuaugaggaaugcuccuguuauccugauucuagugaaaucacaugugugugcagggauaacuggcauggcucgaaucgaccgugggugucuuucaaccagaaucuggaauaucagauaggauacauaugcagugggauuuucggagacaauccacgcccuaaugauaagacaggcaguugugguccaguaucgucuaauggagcaaauggaguaaaaggauuuucauucaaauauggcaaugguguuuggauagggagaacuaaaagcauuaguucaagaaaagguuuugagaugauuugggauccaaacggauggacugggacagacaauaacuucucaauaaagcaagauaucguaggaauaaaugaguggucaggauauagcgggaguuuuguucagcauccagaacuaacagggcuggauuguauaagaccuugcuucuggguugaacuaaucagagggcgacccaaagagaacacaaucuggacuagcgggagcagcauauccuuuugugguguaaacagugacacuguggguuggucuuggccagacggugcugaguugccauuuaccauugacaaguaa

SEQ ID NO: 55360 - RNA, 1410 nt, Artificial Sequence
  derived and/or modified CDS sequence (wt) from neuraminidase__InfluenzaA__AGE89743
augaauccaaaucaaaagauaauaacgauuggcucuguuucucucaccauuuccacaauaugcuucuucaugcaaauugccaucuugauaacuacuguaacauugcauuucaagcaauaugaauucaacucccccccaaacaaccaagugaugcugugugaaccgacaauaauagaaagaaacauaacagagauaguguaucugaccaacaccaccauagagaaggaaauaugccccaaacuagcagaauacagaaauuggucaaaaccgcaaugugacauuacaggauuugcaccuuuuucuaaggacaauucgauuaggcuuuccgcugguggggacaucugggugacaagagaaccuuaugugucaugcgauccugacaaguguuaucaauuugcccuuggacagggaacaacacuaaacaacgugcauucaaauaacacaguacgugauaggacuccuuaucggacccuauugaugaaugaguuagguguuccuuuucaucuggggaccaagcaagugugcauagcaugguccagcucaaguugucacgauggaaaagcauggcugcauguuuguauaacgggggaugauaaaaaugcaacugcaagcuucauuuacaaugggaggcuuguagauaguguuguuucaugguccaaagaaauucucaggacccaggagucagaaugcguuuguaucaauggaacuuguacaguaguaaugacugauggaagugcuucaggaaaagcugauacuaaaauacuauucauugaggaggggaaaaucguucauacuagcacauugucaggaagugcucagcaugucgaggagugcucuugcuauccucgauauccuggugucagaugugucugcagagacaacuggaaaggcuccaauaggcccaucguagauauaaacauaaaggaucauagcauaguuuccaguuauguguguucaggacuuguuggagacacacccagaaaaaacgacagcuccagcaguagccauuguuuggauccuaacaaugaagaagguggucauggagugaaaggcugggccuuugaugauggaaaugacguguggaugggaagaacaaucaacgagacgucacgcuugggguaugaaaccuucaaagucauugaaggcugguccaacccuaaguccaaauugcagauaaauaggcaagucauaguugacaaagauaauagguccgguuauucugguauuuucucuguugaaggcaaaagcugcaucaaucggugcuuuuauguggaguugauuaggggaagaaaagaggaaacugaagucuuguggaccucaaacaguauuguuguguuuuguggcaccucagguacauauggaacaggcucauggccugauggggcggaccucaaucucaugccuauauaa

SEQ ID NO: 55361 - RNA, 1410 nt, Artificial Sequence
  derived and/or modified CDS sequence (wt) from neuraminidase__InfluenzaA__AGE89754
augaauccaaaucaaaagauaauaacgauuggcucuguuucucucaccauuuccacaauaugcuucuucaugcaaauugccaucuugauaacuacuguaacauugcauuucaagcaauaugaauucaacucccccccaaacaaccaagugaugcugugugaaccgacaauaauagaaagaaacauaacagagauaguguaucugaccaacaccaccauagagaaggaaauaugccccaaacuagcagaauacagaaauuggucaaaaccgcaaugugacauuacaggauuugcaccuuuuucuaaggacaauucgauuaggcuuuccgcugguggggacaucugggugacaagagaaccuuaugugucaugcgauccugacaaguguuaucaauuugcccuuggacagggaacaacacuaaacaacgugcauucaaauaacacaguacgugauaggaccccuuaucggacccuauugaugaaugaguuagguguuccuuuucaucuggggaccaagcaagugugcauagcaugguccagcucaaguugucacgauggaaaagcauggcugcauguuuguauaacgggggaugauaaaaaugcaacugcaagcuucauuuacaaugggaggcuuguagauaguguuguuucaugguccaaagaaauucucaggacccaggagucagaaugcguuuguaucaauggaacuuguacaguaguaaugacugauggaagugcuucaggaaaagcugauacuaaaauacuauucauugaggaggggaaaaucguucauacuagcacauugucaggaagugcucagcaugucgaggagugcucuugcuauccucgauauccuggugucagaugugucugcagagacaacuggaaaggcuccaauaggcccaucguagauauaaacauaaaggaucauagcauaguuuccaguuauguguguucaggacuuguuggagacacacccagaaaaaacgacagcuccagcaguagccauuguuuggauccuaacaaugaagaagguggucauggagugaaaggcugggccuuugaugauggaaaugacguguggaugggaagaacaaucaacgagacgucacgcuugggguaugaaaccuucaaagucauugaaggcugguccaacccuaaguccaaauugcagauaaauaggcaagucauaguugacaaagguaauagguccgguuauucugguauuuucucuguugaaggaaaaagcugcaucaaucggugcuuuuauguggaguugauuaggggaagaaaagaggaaacugaagucuuguggaccucaaacaguauuguuguguuuuguggcaccucagguacauauggaacaggcucauggccugauggggcggaccucaaucucaugccuauauaa

SEQ ID NO: 55362 - RNA, 1410 nt, Artificial Sequence; identical to SEQ ID NO: 53799
  derived and/or modified CDS sequence (wt) from neuraminidase__InfluenzaA__AGE89765

SEQ ID NO: 55363 - RNA, 1410 nt, Artificial Sequence
  derived and/or modified CDS sequence (wt) from neuraminidase__InfluenzaA__AGG13414
augaauccaaaucaaaagauaauaacgauuggcucuguuucucucaccauuuccacaauaugcuucuucaugcaaauugccaucuugauaacuacuguaacauugcauuucaagcaauaugaauucaacucccccccaaacaaccaagugaugcugugugaaccaacaauaauagaaagaaacauaacagagauaguguaucuaaccaacaccaccauagagaaggaaauaugccccaaaccagcagaauacagaaauuggucaaagccgcagugugacauuacaggauuugcaccuuuuucuaaggacaauucgauuaggcuuuccgcugguggggacaucugggugacaagagaaccuuaugugucaugcgauccugacaaguguuaucaauuugcucuuggacagggaacaacacuaaacagcgugcauucaaauaacacaguacgugauaggaccccuuaucggacccuauugaugaaugaguuagguguuccuuuucaucuggggaccaagcaagugugcauagcaugguccagcucaaguugucacgauggaaaagcauggcugcauguuuguauaacgggggaugauaaaaaugcaacugcuagcuucauuuacaaugggaggcuuguagauaguguuguuucaugguccaaagaaauccucaggacccaggagucagaaugcguuuguaucaauggaacuuguacaguaguaaugacugaugggagugcuucaggaaaagcugauacuaaaauacuauucauugaggaggggaaaaucguucauacuagcacauugucaggaagugcucagcaugucgaggagugcucuugcuauccucgauauccuggugucagaugugucugcagagacaacuggaaaggcuccaauaggccuaucguagauauaaacauaaaggaucauagcauuguuuccagguauguguguucaggacuuguuggagacacacccagaaaaaacgacagcuccagcaguagccauuguuuggauccuaacaaugaagaagguggucauggagugaaaggcugggccuucgaugauggaaaugacguguggaugggaagaacgaucaacgagacgucacguuuaggguaugaaaccuucaaagucauugaaggcugguccaacccuaaguccaaauugcagauaaauaagcaggucauaguugacagaggugauagguccgguuauucugguauuuucucuguugaaggcaaaagcugcaucaaucggugcuuuuauguggaguugauuaggggaagaaaagaggaaacugaagucuuguggaccucaaacaguauuguuguguuuuguggcaccucagguacauauggaacaggcucauggccugauggggcggaccucaaucucaugccuauauaa

SEQ ID NO: 55364 - RNA, 1410 nt, Artificial Sequence
  derived and/or modified CDS sequence (wt) from neuraminidase__InfluenzaA__AGG13426
augaauccaaaucaaaagauaauaacgauuggcucuguuucucucaccauuuccacaauaugcuucuucaugcaaauugccaucuugauaacuacuguaacauugcauuucaagcaauaugaauucaacucccccccaaacaaccaagugaugcugugugaaccgacaauaauagaaagaaacauaacagagauaguguaucugaccaacaccaccauagagaaggaaauaugccccaaaccagcagaauacagaaauuggucaaaaccgcaauguggcauuacaggauuugcaccuuucucuaaggacaauucgauuaggcuuuccgcugguggggacaucugggugacaagagaaccuuaugugucaugcgauccugacaaguguuaucaauuugcccuuggacagggaacaacacuaaacaacgugcauucaaauaacacaguacgugauaggaccccuuaucggacucuauugaugaaugaguuggguguuccuuuucaucuggggaccaagcaagugugcauagcaugguccagcucaaguugucacgauggaaaagcauggcugcauguuuguauaacgggggaugauaaaaaugcaacugcuagcuucauuuacaaugggaggcuuguagauaguguuguuucaugguccaaagaaauucucaggacccaggagucagaaugcguuuguaucaauggaacuuguacaguaguaaugacugauggaagugcuucaggaaaagcugauacuaaaauacuauucauugaggaggggaaaaucguucauacuagcacauugucaggaagugcucagcaugucgaagagugcucuugcuauccucgauauccuggugucagaugugucugcagagacaacuggaaaggcuccaaucggcccaucguagauauaaacauaaaggaucauagcauuguuuccaguuauguguguucaggacuuguuggagacacacccagaaaaaacgacagcuccagcaguagccauuguuuggauccuaacaaugaagaagguggucauggagugaaaggcugggccuuugaugauggaaaugacguguggaugggaagaacaaucaacgagacgucacgcuuaggguaugaaaccuucaaagucauugaaggcugguccaauccuaaguccaaauugcagauaaauaggcaagucauaguugacagaggugauagguccgguuauucugguauuuucucuguugaaggcaaaagcugcaucaaucggugcuuuuauguagaguugauuaggggaagaaaagaggaaacugaagucuuguggaccucaaacaguauuguuguguuuuguggcaccucagguacauauggaacaggcucauggccugauggggcggaccucaaucucaugccuauauaa

SEQ ID NO: 55365 - RNA, 1410 nt, Artificial Sequence; identical to SEQ ID NO: 55337
  derived and/or modified CDS sequence (wt) from neuraminidase__InfluenzaA__AGG13438

SEQ ID NO: 55366 - RNA, 1410 nt, Artificial Sequence
  derived and/or modified CDS sequence (wt) from neuraminidase__InfluenzaA__AGG13498
augaacccaaaucaaaagauaauaacgauuggcucuguuucucucaccauuuccacaauaugcuucuucaugcaaauugccaucuugauaacuacuguaacauugcauuucaagcaauaugaauucaacucccccccaaacaaccaagugaugcugugugaaccaacaauaauagaaagaaacauaacagagauaguguaucuaaccaacaccaccauagaaaaggaaauaugccccaaacuagcagaauacagaaauuggucaaagccgcaaugugacauuacaggauuugcaccuuuuucuaaggacaauucgauuaggcuuuccgcugguggggacaucugggugacaagagaaccuuaugugucaugcgauccugacaaguguuaucaauuugcccuuggacagggaacaacacuaaacaacgugcauucaaauaacacaguacgugauaggacuccuuaucggacccuauugaugaaugaguuagguguuccuuuucaucuggggaccaagcaggugugcauagcaugguccagcucaaguugucacgauggaaaagcauggcugcauguuuguauaacgggggaugauaaaaaugcaacugcuagcuucauuuacaaugggaggcuuguagauaguguuguuucaugguccaaagacauccucaggacccaggagucagaaugcguuuguaucaauggaacuugugcgguaguaaugacugaugggagugcuucaggaaaagcugauacuaaaauacuauucauugaggaggggaaaaucguucauacuagcacauugucaggaagugcucagcaugucgaggagugcucuugcuauccucgauauccuggugucagaugugucugcagagacaacuggaaaggcuccaauaggcccaucguagauauaaacauaaaggaucauagcauuguuuccaguuauguguguucaggacuuguuggagacacacccagaaaaaacgacagcuccagcaguggccauuguuuggauccuaacaaugaagaagguggucauggaguaaaaggcugggccuuugaugauggaaaugacguguggaugggaagaacgaucaacgagacgucacgcuuaggguaugaaaccuucaaagucauugaaggcugguccaacccgaaguccaaauugcagauaaauaggcaagucauaguugacagagguaauagguccgguuauucugguauuuucucuguugaaggcaaaaacugcaucaaucggugcuuuuauguggaguugauuaggggaaggaaagaggaaacugaagucuuguggaccucaaacaguauuguuguguuuuguggcaccucagguacauauggaacaggcucauggccugauggggcggaccucaaucucaugccuauauaa

SEQ ID NO: 55367 - RNA, 1410 nt, Artificial Sequence; identical to SEQ ID NO: 55337
  derived and/or modified CDS sequence (wt) from neuraminidase__InfluenzaA__AGG13510

SEQ ID NO: 55368 - RNA, 1410 nt, Artificial Sequence
  derived and/or modified CDS sequence (wt) from neuraminidase__InfluenzaA__AGG13522
augaacccaaaucaaaagauaauaacgauuggcucuguuucucucaccauuuccacaauaugcuucuucaugcaaauugccaucuugauaacuacuguaacauugcauuucaagcaauaugaauucaacucccccccaaacaaccaagugaugcugugugaaccaacaauaauagaaagaaacauaacagagauaguguaucuaaccaacaccaccauagagaaggaaauaugccccaaacuagcagaauacagaaauuggucaaagccgcaaugugacauuacaggauuugcaccuuuuucuaaggacaauucgauuaggcuuuccgcugguggggacaucugggugacaagagaaccuuaugugucaugcgauccugacaaguguuaucaauuugcccuuggacagggaacaacacuaaacaacgugcauucaaauaacacaguacgugauaggacuccuuaucggacccuauugaugaaugaguuagguguuccuuuucaucuggggaccaagcaggugugcauagcaugguccagcucaaguugucacgauggaaaagcauggcugcauguuuguauaacgggggaugauaaaaaugcaacugcuagcuucauuuacaaugggaggcuuguagauaguguuguuucaugguccaaagacauccucaggacccaggagucagaaugcguuuguaucaauggaacuugugcgguaguaaugacugaugggagugcuucaggaaaagcugauacuaaaauacuauucauugaggaggggaaaaucguucauacuagcacauugucaggaagugcucagcaugucgaggagugcucuugcuauccucgauauccuggugucagaugugucugcagagacaacuggaaaggcuccaauaggcccaucguagauauaaacauaaaggaucauagcauuguuuccaguuauguguguucaggacuuguuggagacacacccagaaaaaacgacagcuccagcaguggccauuguuuggauccuaacaaugaagaagguggucauggaguaaaaggcugggccuuugaugauggaaaugacguguggaugggaagaacgaucaacgagacgucacgcuuaggguaugaaaccuucaaagucauugaaggcugguccaacccgaaguccaaauugcagauaaauaggcaagucauaguugacagagguaauagguccgguuauucugguauuuucucuguugaaggcaaaaacugcaucaaucggugcuuuuauguggaguugauuaggggaaggaaagaggaaacugaagucuuguggaccucaaacaguauuguuguguuuuguggcaccucagguacauauggaacaggcucauggccugauggggcggaccucaaucucaugccuauauaa

SEQ ID NO: 55369 - RNA, 1410 nt, Artificial Sequence
  derived and/or modified CDS sequence (wt) from neuraminidase__InfluenzaA__AGG13534
augaauccaaaucaaaagauaauaacaauuggcucuguuucucucaccauuuccacaguaugcuucuucaugcaaauugccaucuugauaacuacuguaacauugcauuucaagcaauaugaauucaacucccccccaaacaaccaagugaugcugugugaaccaacaauaauagaaagaaacauaacagagauaguguaucuaaccaacaccaccauagagaaggaaauaugccccaaaccagcagaauacagaaauuggucaaaaccgcaauguggcauuacaggauuugcaccuuucucuaaggacaauucgauuaggcuuuccgcugguggggacaucugggugacaagagaaccuuaugugucaugcgauccugacaaguguuaucaauuugcccuuggacagggaacaacacuaaacaacgugcauucaaauaacacaguacgugauaggaccccuuaucggacucuauugaugaaugaguuggguguuccuuuucaucuggggaccaagcaagugugcauagcaugguccagcucaaguugucacgauggaaaagcauggcugcauguuuguauaacgggggaugauaaaaaugcaacugcuagcuucauuuacaaugggaggcuuguagauaguguuguuucaugguccaaagaaauucucaggacccaggagucagaaugcguuuguaucaauggaacuuguacaguaguaaugacugauggaagugcuucaggaaaagcugauacuaaaauacuauucauugaggaggggaaaaucguucauacuagcacauugucaggaagugcucagcaugucgaagagugcucuugcuauccucgauauccuggugucagaugugucugcagagacaacuggaaaggcuccaaucggcccaucguagauauaaacauaaaggaucauagcauuguuuccaguuauguguguucaggacuuguuggagacacacccagaaaaaacgacagcuccagcaguagccauuguuuggauccuaacaaugaagaagguggucauggagugaaaggcugggccuuugaugauggaaaugacguguggaugggaagaacaaucaacgagacgucacgcuuaggguaugaaaccuucaaagucauugaaggcugguccaauccuaaguccaaauugcagauaaauaggcaagucauaguugacagaggugauagguccgguuauucugguauuuucucuguugaaggcaaaagcugcaucaaucggugcuuuuauguagaguugauuaggggaagaaaagaggaaacugaagucuuguggaccucaaacaguauuguuguguuuuguggcaccucagguacauauggaacaggcucauggccugauggggcggaccucaaucucaugccuauauaa

SEQ ID NO: 55370 - RNA, 1410 nt, Artificial Sequence
  derived and/or modified CDS sequence (wt) from neuraminidase__InfluenzaA__AGG13546
augaauccaaaucaaaagauaauaacgauuggcucuguuucucucaccauuuccacaauaugcuucuucaugcaaauugccaucuugauaacuacuguaacauugcauuucaagcaauaugaauucaacucccccccaaacaaccaagugaugcugugugaaccaacaauaauagaaagaaacauaacagagauaguguauuugaccaacaccaccauagagaaggaaauaugccccaaaccagcagaauacagaaauuggucaaaaccgcaauguggcauuacaggauuugcaccuuucucuaaggacaauucgauuaggcuuuccgcugguggggacaucugggugacaagagaaccuuaugugucaugcgauccugacaaguguuaucaauuugcccuuggacagggaacaacacuaaacaacgugcauucaaauaacacaguacgugauaggaccccuuaucggacucuauugaugaaugaguuggguguuccuuuucaucuggggaccaagcaagugugcauagcaugguccagcucaaguugucacgauggaaaagcauggcugcauguuuguauaacgggggaugauaaaaaugcaacugcuagcuucauuuacaaugggaggcuuguagauaguguuguuucaugguccaaagaaauucucaggacccaggagucagaaugcguuuguaucaauggaacuuguacaguaguaaugacugauggaagugcuucaggaaaagcugauacuaaaauacuauucauugaggaggggaaaaucguucauacuagcacauugucaggaagugcucagcaugucgaagagugcucuugcuauccucgauauccuggugucagaugugucugcagagacaacuggagaggcuccaaucggcccaucguagauauaaacauaaaggaucauagcauuguuuccaguuauguguguucaggacuuguuggagacacacccagaaaaaacgacagcuccagcaguagccauuguuuggauccuaacaaugaagaagguggucauggagugaaaggcugggccuuugaugauggaaaugacguauggaugggaagaacaaucaacgagacgucacgcuuaggguaugaaaccuucaaagucauugaaggcugguccaacccuaaguccaaauugcagauaaauaggcaagucauaguugacagaagugauagguccgguuauucugguauuuucucuguugaaggcaaaagcugcaucaaucggugcuuuuauguggaguugauuaggggaagaaaagaggaaacugaagucuuguggaccucaaacaguauuguuguguuuuguggcaccucagguacauauggaacaggcucauggccugauggggcggaccucaaucucaugccuauauaa

SEQ ID NO: 55371 - RNA, 1410 nt, Artificial Sequence
  derived and/or modified CDS sequence (wt) from neuraminidase__InfluenzaA__AGG13558
augaauccaaaucaaaagauaauaacgauuggcucuguuucucucaccauuuccacaauaugcuucuucaugcaaauugccaucuugauaacuacuguaacauugcauuucaagcaauaugaauucaacucccccccaaacaaccaagugaugcugugugaaccgacaauaauagaaagaaacauaacagagauaguguaucugaccaacaccaccauagagaaggaaauaugccccaaaccagcagaauacagaaauuggucaaaaccgcaauguggcauuacaggauuugcaccuuucucuaaggacaauucgauuaggcuuuccgcugguggggacaucugggugacaagagaaccuuaugugucaugcgauccugacaaguguuaucaauuugcccuuggacagggaacaacacuaaacaacgugcauucaaauaacacaguacgugauaggaccccuuaucggacucuauugaugaaugaguuggguguuccuuuucaucuggggaccaagcaagugugcauagcaugguccagcucaaguugucacgauggaaaagcauggcugcauguuuguauaacgggggaugauaaaaaugcaacugcuagcuucauuuacaaugggaggcuuguagauaguguuguuucaugguccaaagaaauucucaggacccaggagucagaaugcguuuguaucaauggaacuuguacaguaguaaugacugauggaagugcuucaggaaaagcugauacuaaaauacuauucauugaggaggggaaaaucguucauacuagcacauugucaggaagugcucagcaugucgaagaaugcucuugcuauccucgauauccuggugucagaugugucugcagagacaacuggaaaggcuccaaucggcccaucguagauauaaacauaaaggaucauagcauuguuuccaguuauguguguucaggacuuguuggagacacacccagaaaaaacgacagcuccagcaguagccauuguuuggauccuaacaaugaagaagguggucauggagugaaaggcugggccuuugaugauggaaaugacguguggaugggaagaacaaucaacgagacgucacgcuuaggguaugaaaccuucaaagucauugaaggcugguccaauccuaaguccaaauugcagauaaauaggcaagucauaguugacagaggugauagguccgguuauucugguauuuucucuguugaaggcaaaagcugcaucaaucggugcuuuuauguagaguugauuaggggaagaaaagaggaaacugaagucuuguggaccucaaacaguauuguuguguuuuguggcaccucagguacauauggaacaggcucauggccugauggggcggaccucaaucucaugccuauauaa

SEQ ID NO: 55372 - RNA, 1410 nt, Artificial Sequence; identical to SEQ ID NO: 55337
  derived and/or modified CDS sequence (wt) from neuraminidase__InfluenzaA__AGG13570

SEQ ID NO: 55373 - RNA, 1410 nt, Artificial Sequence
  derived and/or modified CDS sequence (wt) from neuraminidase__InfluenzaA__AGG13582
augaauccaaaucaaaagauaauaacgauuggcucuguuucucucaccauuuccacaauaugcuucuucaugcaaauugccaucuugauaacuacuguaacauugcauuucaagcaauaugaauucaacucccccccaaacaaccaagugaugcugugugaaccaacaauaauagaaagaaacauaacagagauaguguaucugaccaacaccaccauagagaaggaaauaugccccaaaccagcagaauacagaaauuggucaaaaccgcaauguggcauuacaggauuugcaccuuucucuaaggacaauucgauuaggcuuuccgcugguggggacaucugggugacaagagaaccuuaugugucaugcgauccugacaaguguuaucaauuugcccuuggacagggaacaacacuaaacaacgugcauucaaauaacacaguacgugauaggaccccuuaucggacucuauugaugaaugaguuggguguuccuuuucaucuggggaccaagcaagugugcauagcaugguccagcucaaguugucacgauggaaaagcauggcugcauguuuguauaacgggggaggauaaaaaugcaacugcuagcuucauuuacaaugggaggcuuguagauaguguuguuucaugguccaaagaaacucucaggacccaggagucagaaugcguuuguaucaauggaacuuguacaguaguaaugacugauggaagugcuucaggaaaagcugauacuaaaauacuauucauugaggaggggaaaaucguucauacuagcacauugucaggaagugcucagcaugucgaagagugcucuugcuauccucgauauccuggugucagaugugucugcagagacaacuggaaaggcuccaaucggcccaucguagauauaaacauaaaggaucauagcauuguuuccaguuauguguguucaggacuuguuggagacacacccagaaaaaacgacagcuccagcaguagccauuguuuggauccuaacaaugaagaagguggucauggagugaaaggcugggccuuugaugauggaaaugacguguggaugggaagaacaaucaacgagacgucacgcuuaggguaugaaaccuucaaagucauugaaggcugguccaacccuaaguccaaauugcagauaaauaggcaagucauaguugacagaggugauagguccgguuauucugguauuuucucuguugaaggcaaaagcugcaucaaucggugcuuuuauguggaguugauuaggggaagaaaagaggaaacugaagucuuguggaccucaaacaguauuguuguguuuuguggcaccucagguacauauggaacaggcucauggccugauggggcggaccucaaucucaugccuauauaa

SEQ ID NO: 55374 - RNA, 1410 nt, Artificial Sequence
  derived and/or modified CDS sequence (wt) from neuraminidase__InfluenzaA__AGG13606
augaauccaaaucaaaagauaauaacgauuggcucuguuucucucaccauuuccacaauaugcuucuucaugcaaauugccaucuugauaacuacuguaacauugcauuucaagcaauaugaauucaacucccccccaaacaaccaagugaugcugugugaaccaacaauaauagaaagaaacauaacagagauaguguaucugaccaacaccaccauagagaaggaaauaugccccaaaccagcagaauacagaaauuggucaaaaccgcaauguggcauuacaggauuugcaccuuucucuaaggacaauucgauuaggcuuuccgcugguggggacaucugggugacaagagaaccuuaugugucaugcgauccugacaaguguuaucaauuugcccuuggacagggaacaacacuaaacaacgugcauucaaauaacacaguacgugauaggaccccuuaucggacucuauugaugaaugaguuggguguuccuuuucaucuggggaccaagcaagugugcauagcaugguccagcucaaguugucacgauggaaaagcauggcugcauguuuguauaacgggggaugauaaaaaugcaacugcuagcuucauuuacaaugggaggcuuguagauaguguuguuucaugguccaaagaaauucucaggacccaggagucagaaugcguuuguaucaauggaacuuguacaguaguaaugacugauggaagugcuucaggaaaagcugauacuaaaauacuauucauugaggaggggaaaaucguucauacuagcacauugucaggaagugcucagcaugucgaagagugcucuugcuauccucgauauccuggugucagaugugucugcagagacaacuggaaaggcuccaaucggcccaucguagauauaaacauaaaggaucauagcauuguuuccaguuauguguguucaggacuuguuggagacacacccagaaaaaacgacagcuccagcaguagccauuguuuggauccuaacaacgaagaagguggucauggagugaaaggcugggccuuugaugauggaaaugacguguggaugggaagaacaaucaacgagacgucacgcuuaggguaugaaaccuucaaagucauugaaggcugguccaacccuaaguccaaauugcagauaaauaggcaagucauaguugacagaggugauagguccgguuauucugguauuuucucuguugaaggcaaaagcugcaucaaucggugcuuuuauguggaguugauuaggggaagaaaagaggaaacugaagucuuguggaccucaaacaguauuguuguguuuuguggcaccucagguacauauggaacaggcucauggccugauggggcggaccucaaucucaugccuauauaa

SEQ ID NO: 55375 - RNA, 1410 nt, Artificial Sequence
  derived and/or modified CDS sequence (wt) from neuraminidase__InfluenzaA__AGG13618
augaauccaaaucaaaagauaauaacgauuggcucuguuucucucaccauuuccacaauaugcuucuucaugcaaauugccaucuugauaacuacuguaacauugcauuucaagcaauaugaauucaacucccccccaaacaaccaagugaugcugugugaaccaacaauaauagaaagaaacauaacagagauaguguaucugaccaacaccaccauagagaaggaaauaugccccaaaccagcagaauacagaaauuggucaaaaccgcaauguggcauuacaggauuugcaccuuucucuaaggacaauucgauuaggcuuuccgcugguggggacaucugggugacaagagaaccuuaugugucaugcgauccugacaaguguuaucaauuugcccuuggacagggaacaacacuaaacaacgugcauucaaauaacacaguacgugauaggaccccuuaucggacucuauugaugaaugaguuggguguuccuuuucaucuggggaccaagcaagugugcauagcaugguccagcucaaguugucacgauggaaaagcauggcugcauguuuguauaacgggggaugauaaaaaugcaacugcuagcuucauuuacaaugggaggcuuguagauaguguuguuucaugguccaaagaaauucucaggacccaggagucagaaugcguuuguaucaauggaacuuguacaguaguaaugacugauggaagugcuucagggaaagcugauacuaaaauacuauucauugaggaggggaaaaucguucauacuagcacauugucaggaagugcucagcaugucgaagagugcucuugcuauccucgauauccuggugucagaugugucugcagagacaacuggaaaggcuccaaucggcccaucguagauauaaacauaaaggaucauagcauuguuuccaguuauuuguguucaggacuuguuggagacacacccagaaaaaacgacggcuccagcaguagccauuguuuggauccuaacaaugaagaagguggucauggagugaaaggcugggccuuugaugauggaaaugacguguggaugggaagaacaaucaacgagacgucacgcuuaggguaugaaaccuucaaagucauugaaggcugguccaacccuaaguccaaauugcagauaaauaggcaaaucauaguugacagaggugauagguccgguuauucugguauuuucucuguugaaggcaaaagcugcaucaaucggugcuuuuauguggaguugauuaggggaagaaaagaggaaacugaaguuuuguggaccucaaacaguauuguuguguuuuguggcaccucagguacauauggaacaggcucauggccugauggggcggaccucaaucucaugccuauauaa

SEQ ID NO: 55376 - RNA, 1410 nt, Artificial Sequence
  derived and/or modified CDS sequence (wt) from neuraminidase__InfluenzaA__AGG13630
augaauccaaaucaaaagauaauaacgauuggcucuguuucucucaccauuuccacaauaugcuucuucaugcaaauugccaucuugauaacuacuguaacauugcauuucaagcaauaugaauucaacucccccccaaacaaccaagugaugcugugugaaccaacaauaauagaaagaaacauaacagagauaguguaucugaccaacaccaccauagagaaggaaauaugccccaaaccagcagaauacagaaauuggucaaaaccgcaauguggcauuacaggauuugcaccuuucucuaaggacaauucgauuaggcuuuccgcugguggggacaucugggugacaagagaaccuuaugugucaugcgauccugacaaguguuaucaauuugcccuuggacagggaacaacacuaaacaacgugcauucaaauaacacaguacgugauaggaccccuuaucggacucuauugaugaaugaguuggguguuccuuuucaucuggggaccaagcaagugugcauagcaugguccagcucaaguugucacgauggaaaagcauggcugcauguuuguauaacgggggaggauaaaaaugcaacugcuagcuucauuuacaaugggaggcuuguagauaguguuguuucaugguccaaagaaauucucaggacccaggagucagaaugcguuuguaucaauggaacuuguacaguaguaaugacugauggaagugcuucaggaaaagcugauacuaaaauacuauucauugaggaggggaaaaucguucauacuagcacauugucaggaagugcucagcaugucgaagagugcucuugcuauccucgauauccuggugucagaugugucugcagagacaacuggaaaggcuccaaucggcccaucguagauauaaacauaaaggaucauagcauuguuuccaguuauguguguucaggacuuguuggagacacacccagaaaaaacgacagcuccagcaguagccauuguuuggauccuaacaaugaagaagguggucauggagugaaaggcugggccuuugaugauggaaaugacguguggaugggaagaacaaucaacgagacgucacgcuuaggguaugaaaccuucaaagucauugaaggcugguccaacccuaaguccaaauugcagauaaauaggcaagucauaguugacagaggugauagguccgguuauucugguauuuucucuguugaaggcaaaagcugcaucaaucggugcuuuuauguggaguugauuaggggaagaaaagaggaaacugaagucuuguggaccucaaacaguauuguuguguuuuguggcaccucagguacauauggaacaggcucauggccugauggggcggaccucaaucucaugccuauauaa

SEQ ID NO: 55377 - RNA, 1410 nt, Artificial Sequence; identical to SEQ ID NO: 55374
  derived and/or modified CDS sequence (wt) from neuraminidase__InfluenzaA__AGG13642

SEQ ID NO: 55378 - RNA, 1410 nt, Artificial Sequence
  derived and/or modified CDS sequence (wt) from neuraminidase__InfluenzaA__AGG13654
augaacccaaaucaaaagauaauaacgauuggcucuguuucucucaccauuuccacaauaugcuucuucaugcaaauugccaucuugauaacuacuguaacauugcauuucaagcaauaugaauucaacucccccccaaacaaccaagugaugcugugugaaccaacaauaauagaaagaaacauaacagagauaguguaucuaaccaacaccaccauagagaaggaaauaugccccaaacuagcagaauacagaaauuggucaaagccgcaaugugacauuacaggauuugcaccuuuuucuaaggacaauucgauuaggcuuuccgcugguggggacaucugggugacaagagaaccuuaugugucaugcgauccugacaaguguuaucaauuugcccuuggacagggaacaacacuaaacaacgugcauucaaauaacacaguacgugauaggacuccuuaucggacccuauugaugaaugaguuagguguuccuuuucaucuggggaccaagcaggugugcauagcaugguccagcucaaguugucacgauggaaaagcauggcugcauguuuguauaacgggggaugauaaaaaugcaacugcuagcuucauuuacaaugggaggcuuguagauaguguuguuucaugguccaaagacauccucaggacccaggagucagaaugcguuuguaucaauggaacuugugcgguaguaaugacugaugggagugcuucaggaaaagcugauacuaaaauacuauucauugaggaggggaaaaucguucagacuagcacauugucaggaagugcucagcaugucgaggagugcucuugcuauccucgauauccuggugucagaugugucugcagagacaacuggaaaggcuccaauaggcccaucguagauauaaacauaaaggaucauagcauuguuuccaguuauguguguucaggacuuguuggagacacacccagaaaaaacgacagcuccagcaguggccauuguuuggauccuaacaaugaagaagguggucauggaguaaaaggcugggccuuugaugauggaaaugacguguggaugggaagaacgaucaacgagacgucacgcuuaggguaugaaaccuucaaagucauugaaggcugguccaacccgaaguccaaauugcagauaaauaggcaagucauaguugacagagguaauagguccgguuauuccgguauuuucucuguugaaggcaaaaacugcaucaaucggugcuuuuauguggaguugauuaggggaaggaaagaggaaauugaagucuuguggaccucaaacaguauuguuguguuuuguggcaccucagguacauauggaacaggcucauggccugauggggcggaccucaaucucaugccuauauaa

SEQ ID NO: 55379 - RNA, 1410 nt, Artificial Sequence
  derived and/or modified CDS sequence (wt) from neuraminidase__InfluenzaA__AGG13666
augaauccaaaucaaaagauaauaacaauuggcucuguuucucucaccauuuccacaguaugcuucuucaugcaaauugccaucuugauaacuacuguaacauugcauuucaagcaauaugaauucaacucccccccaaacaaccaagugaugcugugugaaccaacaauaauagaaagaaacauaacagagauaguguaucugaccaacaccaccauagagaaggaaauaugccccaaaccagcagaauacagaaauuggucaaaaccgcaauguggcauuacaggauuugcaccuuucucuaaggacaauucgauuaggcuuuccgcugguggggacaucugggugacaagagaaccuuaugugucaugcgauccugacaaguguuaucaauuugcccuuggacagggaacaacacuaaacaacgugcauucaaauaacacaguacgugauaggaccccuuaucggacucuauugaugaaugaguuggguguuccuuuucaucuggggaccaagcaagugugcauagcaugguccagcucaaguugucacgauggaaaagcauggcugcauguuuguauaacgggggaugauaaaaaugcaacugcuagcuucauuuacaaugggaggcuuguagauaguguuguuucaugguccaaagaaauucucaggacccaggagucagaaugcguuuguaucaauggaacuuguacaguaguaaugacugauggaagugcuucaggaaaagcugauacuaaaauacuauucauugaggaggggaaaaucguucauacuagcacauugucaggaagugcucagcaugucgaagagugcucuugcuauccucgauauccuggugucagaugugucugcagagacaacuggaaaggcuccaaucggcccaucguagauauaaacauaaaggaucauagcauuguuuccaguuauguguguucaggacuuguuggagacacacccagaaaaaacgacagcuccagcaguagccauuguuuggauccuaacaaugaagaagguggucauggagugaaaggcugggccuuugaugauggaaaugacguguggaugggaagaacaaucaacgagacgucacgcuuaggguaugaaaccuucaaagucauugaaggcugguccaauccuaaguccaaauugcagauaaauaggcaagucauaguugacagaggugauagguccgguuauucugguauuuucucuguugaaggcaaaagcugcaucaaucggugcuuuuauguagaguugauuaggggaagaaaagaggaaacugaagucuuguggaccucaaacaguauuguuguguuuuguggcaccucagguacauauggaacaggcucauggccugauggggcggaccucaaucucaugccuauauaa

SEQ ID NO: 55380 - RNA, 1410 nt, Artificial Sequence
  derived and/or modified CDS sequence (wt) from neuraminidase__InfluenzaA__AGG13678
augaauccaaaucaaaagauaauaacgauuggcucuguuucucucaccauuuccacaauaugcuucuucaugcaaauugccaucuugauaacuacuguaacauugcauuucaagcaauaugaauucaacucccccccaaacaaccaagugaugcugugugaaccaacaauaauagaaagaaacauaacagagauaguauaucugaccaacaccaccauagagaaggaaauaugccccaaaccagcagaauacagaaauuggucaaaaccgcaauguggcauuacaggauuugcaccuuuaucuaaggacaauucgauuaggcuuuccgcugguggggacaucugggugacaagagaaccuuaugugucaugcgauccugacaaguguuaucaauuugcccuuggacagggaacaacacuaaacaacgugcauucaaauaacacaguacgugauaggaccccuuaucggacucuauugaugaaugaguuggguguuccuuuucaucuggggaccaagcaagugugcauagcaugguccagcucaaguugucacgauggaaaagcauggcugcauguuuguauaacgggggaugauaaaaaugcaacugcuagcuucauuuacaaugggaggcuuguagauaguguuguuucaugguccaaagaaauucucaggacccaggagucagaaugcguuuguaucaauggaacuuguacaguaguaaugacugauggaagugcuucaggaaaagcugauacuaaaauacuauucauugaggaggggaaaaucguucauacuagcacauugucaggaagugcucagcaugucgaagagugcucuugcuauccucgauauccuggugucagaugugucugcagagacaacuggaaagguuccaaucggcccaucguagauauaaacauaaaggaucauagcauuguuuccaguuauguguguucaggacuuguuggagacacacccagaaaaaacgacagcuccagcaguagccauuguuuggguccuaacaaugaagaagguggucauggagugaaaggcugggccuuugaugauggaaaugacguguggaugggaagaacaaucaacgagacgucacgcuuaggguaugaaaccuucaaagucauugaaggcugguccaauccuaaguccaaauugcagauaaauaggcaagucauaguugacagaggugauagguccgguuauucugguauuuucucuguugaaggcaaaagcugcaucaaucggugcuuuuauguagaguugauuaggggaagaaaagaggaaaccgaagucuuguggaccucaaacaguauuguuguguuuuguggcaccgcagguacauauggaacaggcucauggccugauggggcggaccucaaucucaugccuauauaa

SEQ ID NO: 55381 - RNA, 1410 nt, Artificial Sequence; identical to SEQ ID NO: 55337
  derived and/or modified CDS sequence (wt) from neuraminidase__InfluenzaA__AGG13690

SEQ ID NO: 55382 - RNA, 1410 nt, Artificial Sequence
  derived and/or modified CDS sequence (wt) from neuraminidase__InfluenzaA__AGG13702
augaauccaaaucaaaagauaauaacgauuggcucuguuucucucaccauuuccacaauaugcuucuucaugcaaauugccaucuugauaacuacuguaacauugcauuucaagcaauaugaauucaacucccccccaaacaaccaagugaugcugugugaaccaacaauaauagaaagaaacauaacagagauaguguaucuaaccaacaccaccauagagaaggaaauaugccccaaaccagcagaauacagaaauuggucaaagccgcagugugacauuacaggauuugcaccuuuuucuaaggacaauucgauuaggcuuuccgcugguggggacaucugggugacaagagaaccuuaugugucaugcgauccugacaaguguuaucaauuugcucuuggacagggaacaacacuaaacaacgugcauucaaauaacacaguacgugauaggaccccuuaucggacccuauugaugaaugaguuagguguuccuuuucaucuggggaccaagcaagugugcauagcaugguccagcucaaguugucacgauggaaaagcauggcugcauguuuguauaacgggggaugauaaaaaugcaacugcuagcuucauuuacaaugggaggcuuguagauaguguuguuucaugguccaaagaaauccucaggacccaggagucagaaugcguuuguaucaauggaacuuguacaguaguaaugacugaugggagugcuucaggaaaagcugauacuaaaauacuauucauugaggaggggaaaaucguucauacuagcacauugucaggaaaugcucagcaugucgaggagugcucuugcuauccucgauauccuggugucagaugugucugcagagacaacuggaaaggcuccaauaggccuaucguagauauaaacauaaaggaucauagcauuguuuccagguauguguguucaggacuuguuggagacacacccagaaaaaacgacagcuccagcaguagccauuguuuggauccuaacaaugaagaagguggucauggagugaaaggcugggccuucgaugauggaaaugacguguggaugggaagaacgaucaacgagacgucacguuuaggguaugaaaccuucaaagucauugaaggcugguccaacccuaaguccaaauugcagauaaauaggcaggucauaguugacagaggugauagguccgguuauucugguauuuucucuguugaaggcaaaagcugcaucaaucggugcuuuuauguggaguugauuaggggaagaaaagaggaaacugaagucuuguggaccucaaacaguauuguuguguuuuguggcaccucagguacauauggaacaggcucauggccugauggggcggaccucaaucucaugccuauauaa

SEQ ID NO: 55383 - RNA, 1410 nt, Artificial Sequence; identical to SEQ ID NO: 55368
  derived and/or modified CDS sequence (wt) from neuraminidase__InfluenzaA__AGG13714

SEQ ID NO: 55384 - RNA, 1410 nt, Artificial Sequence; identical to SEQ ID NO: 55337
  derived and/or modified CDS sequence (wt) from neuraminidase__InfluenzaA__AGG13726

SEQ ID NO: 55385 - RNA, 1410 nt, Artificial Sequence; identical to SEQ ID NO: 55337
  derived and/or modified CDS sequence (wt) from neuraminidase__InfluenzaA__AGG13738

SEQ ID NO: 55386 - RNA, 1410 nt, Artificial Sequence
  derived and/or modified CDS sequence (wt) from neuraminidase__InfluenzaA__AGG13750
augaauccaaaucaaaagauaauaacgauuggcucuguuucucucaccauuuccacaauaugcuucuucaugcaaauugccaucuugauaacuacuguaacauugcauuucaagcaauaugaauucaacucccccccaaacaaccaagugaugcugugugaaccaacaauaauagaaagaaacauaacagagauaguguaucugaccaacaccaccauagagaaggaaauaugccccaaaccagcagaauacagaaauuggucaaaaccgcaauguggcauuacaggauuugcaccuuucucuaaggacaauucgauuaggcuuuccgcugguggggacaucugggugacaagagaaccuuaugugucaugcgauccugacaaguguuaucaauuugcccuuggacagggaacaacacuaaacaacgugcauucaaauaacacaguacgugauaggaccccuuaucggacucuauugaugaaugaguuggguguuccuuuucaucuggggaccaagcaagugugcauagcaugguccagcucaaguugucacgauggaaaagcauggcugcauguuuguauaacgggggaugauaaaaaugcaacugcuagcuucauuuacaaugggaggcuuguagauaguguuguuucaugguccaaagaaauucucaggacccaggagucagaaugcguuuguaucaauggaacuuguacaguaguaaugacugauggaagugcuucaggaaaagcugauacuaaaauacuauucauugaggaggggaaaaucguucauacuagcacauugucaggaagugcucagcaugucgaagagugcucuugcuacccucgauauccuggugucagaugugucugcagagacaacuggaaaggcuccaaucggcccaucguagauauaaacauaaaggaucauagcauuguuuccaguuauguguguucaggacuuguuggagacacacccagaaaaaacgacagcuccagcaguagccauuguuuggauccuaacaaugaagaagguggucauggagugaaaggcugggccuuugaugauggaaaugacguguggaugggaagaacaaucaacgagacgucacgcuuaggguaugaaaccuucaaagucauugaaggcugguccaauccuaaguccaaauugcagauaaauaggcaagucauaguugacagaggugauagguccgguuauucugguauuuucucuguugaaggcaaaagcugcaucaaucggugcuuuuauguagaguugauuaggggaagaaaagaggaaacugaagucuuguggaccucaaacaguauuguuguguuuuguggcaccucagguacauauggaacaggcucauggccugauggggcggaccucaaucucaugccuauauaa

SEQ ID NO: 55387 - RNA, 1410 nt, Artificial Sequence
  derived and/or modified CDS sequence (wt) from neuraminidase__InfluenzaA__AGG13762
augaauccaaaucaaaagauaauaacgauuggcucuguuucucucaccauuuccacaauaugcuucuucaugcaaauugccaucuugauaacuacuguaacauugcauuucaagcaauaugaauucaacucccccccaaacaaccaagugaugcugugugaaccaacaauaauagaaagaaacauaacagagauaguguaucuaaccaacaccaccauagagaaggaaauaugccccaaaccagcagaauacagaaauuggucaaagccgcagugugacauuacaggauuugcaccuuuuucuaaggacaauucgauuaggcuuuccgcugguggggacaucugggugacaagagaaccuuaugugucaugcgauccugacaaguguuaucaauuugcucuuggacagggaacaacacuaaacaacgugcauucaaauaacacaguacgugauaggaccccuuaucggacccuauugaugaaugaguuagguguuccuuuucaucuggggaccaagcaagugugcauagcaugguccagcucaaguugucacgauggaaaagcauggcugcauguuuguauaacgggggaugauaaaaaugcaacugcuagcuucauuuacaaugggaggcuuguagauaguguuguuucaugguccaaagaaauccucaggacccaggagucagaaugcguuuguaucaauggaacuuguacaguaguaaugacugaugggagugcuucaggaaaagcugauacuaaaauacuauucauugaggaggggaaaaucguucauacuagcacauugucaggaagugcucagcaugucgaggagugcucuugcuauccucgauauccuggugucagaugugucugcagagacaacuggaaaggcuccaauaggccuaucguagauauaaacauaaaggaucauagcauuguuuccagguauguguguucaggacuuguuggagacacacccagaaaaaacgacagcuccagcaguagccauuguuuggauccuaacaaugaagaagguggucauggagugaaaggcugggccuucgaugauggaaaugacguguggaugggaagaacgaucaacgagacgucacguuuaggguaugaaaccuucaaagucauugaaggcugguccaacccuaaguccaaauugcagauaaauaggcaggucauaguugacagaggugauagguccgguuauucugguauuuucucuguugaaggcaaaagcugcaucaaucggugcuuuuauguggaguugauuaggggaagaaaagaggaaacugaagucuuguggaccucaaacaguauuguuguguuuuguggcaccucagguacauauggaacaggcucauggccugauggggcggaccucaaucucaugccuauauaa

SEQ ID NO: 55388 - RNA, 1410 nt, Artificial Sequence
  derived and/or modified CDS sequence (wt) from neuraminidase__InfluenzaA__AGG13774
augaacccaaaucaaaagauaauaacgauuggcucuguuucucucaccauuuccacaauaugcuucuucaugcaaauugccaucuugauaacuacuguaacauugcauuucaagcaauaugaauucaacucccccccaaacaaccaagugaugcugugugaaccaacaacaauagaaagaaacauaacagagauaguguaucuaaccaacaccaccauagagaaggaaauaugccccaaacuagcagaauacagaaauuggucaaagccgcaaugugacauuacaggauuugcaccuuuuucuaaggacaauucgauuaggcuuuccgcugguggggacaucugggugacaagagaaccuuaugugucaugcgauccugacaaguguuaucaauuugcccuuggacagggaacaacacuaaacaacgugcauucaaauaacacaguacgugauaggacuccuuaucggacccuauugaugaaugaguuagguguuccuuuucaucuggggaccaagcaggugugcauagcaugguccagcucaaguugucacgauggaaaagcauggcugcauguuuguauaacgggggaugauaaaaaugcaacugcuagcuucauuuacaaugggaggcuuguagauaguguuguuucaugguccaaagacauccucaggacccaggagucagaaugcguuuguaucaauggaacuugugcgguaguaaugacugaugggagugcuucaggaaaagcugauacuaaaauacuauucauugaggaggggaaaaucguucauacuagcacauugucaggaagugcucagcaugucgaggagugcucuugcuauccucgauauccuggugucagaugugucugcagagacaacuggaaaggcuccaauaggcccaucguagauauaaacauaaaggaucauagcauuguuuccaguuauguguguucaggacuuguuggagacacacccagaaaaaacgacagcuccagcaguggccauuguuuggauccuaacaaugaagaagguggucauggaguaaaaggcugggccuuugaugauggaaaugacguguggaugggaagaacgaucaacgagacgucacgcuuaggguaugaaaccuucaaagucauugaaggcugguccaacccgaaguccaaauugcagauaaauaggcaagucauaguugacagagguaauagguccgguuauucugguauuuucucuguugaaggcaaaaacugcaucaaucggugcuuuuauguggaguugauuaggggaaggaaagaggaaacugaagucuuguggaccucaaacaguauuguuguguuuuguggcaccucagguacauauggaacaggcucauggccugauggggcggaccucaaucucaugccuauauaa

SEQ ID NO: 55389 - RNA, 1410 nt, Artificial Sequence
  derived and/or modified CDS sequence (wt) from neuraminidase__InfluenzaA__AGG13786
augaauccaaaucaaaagauaauaacgauuggcucuguuucucucaccauuuccacaauaugcuucuucaugcaaauugccaucuugauaacuacuguaacauugcauuucaagcaauaugaauucaacucccccccaaacaaccaagugaugcugugugaaccaacaauaauagaaagaaacauaacagagauaguguaucuaaccaacaccaccauagagaaggaaauaugccccaaaccagcagaauacagaaauuggucaaaaccgcaauguggcauuacaggauuugcaccuuucucuaaggacaauucgauuaggcuauccgcugguggggacaucugggugacaagagaaccuuaugugucaugcgauccugacaaguguuaucaauuugcccuuggacagggaacaacacuaaacaacuugcauucaaauaacacaguacgugauaggaccccuuaucggacucuauugaugaaugaguuggguguuccuuuucaucuggggaccaagcaagugugcauagcaugguccagcucaaguugucacgauggaaaagcauggcugcauguuuguauaacgggggaugauaaaaaugcaacugcuagcuuuauuuacaaugggaggcuuguagauaguguuguuucaugguccaaagaaauucucaggacccaggagucagaaugcguuuguaucaauggaacuuguacaguaguaaugacugauggaagugcuucagggaaagcugauacuaaaauacuauucauugaggaggggaaaaucguucauacuagcacauugucaggaagugcucagcaugucgaagagugcucuugcuauccucgauauccuggugucagaugugucugcagagacaacuggaaaggcuccaaucggcccaucguagauauaaacauaaaggaucauagcauuguuuccaguuauguguguucaggacuuguuggagacacacccagaaaaaacgacagcuccagcaguagccauuguuuggauccuaacaaugaagaagguggucauggagugaaaggcugggccuuugaugauggaaaugacguguggaugggaagaacaaucaacgagacgucacgcuuaggguaugaaaccuucaaagucauugaaggcugguccaacccuaaguccaaauugcagauaaauaggcaggucauaguugacagaggugauagguccgguuauucugguauuuucucuguugaaggcaaaagcugcaucaaucggugcuuuuauguggaguugauuaggggaagaaaagaggaaacugaagucuuguggaccucaaacaguauuguuguguuuuguggcaccucagguacauauggaacaggcucauggccugauggggcggaccucaaucucaugccuauauaa

SEQ ID NO: 55390 - RNA, 1410 nt, Artificial Sequence
  derived and/or modified CDS sequence (wt) from neuraminidase__InfluenzaA__AGG13798
augaacccaaaucaaaagauaauaacgauuggcucuguuucucucaccauuuccacaauaugcuucuucaugcaaauugccaucuugauaacuacuguaacauugcauuucaagcaauaugaauucaacuccccuccaaacaaccaagugaugcugugugaaccaacaauaauagaaagaaacauaacagagauaguguaucuaaccaacaccaccauagagaaggaaauaugccccaaacuagcagaauacagaaauuggucaaagccgcaaugugacauuacaggauuugcaccuuuuucuaaggacaauucgauuaggcuuuccgcugguggggacaucugggugacaagagaaccuuaugugucaugcgauccugacaaguguuaucaauuugcccuuggacagggaacaacacuaaacaacgugcauucaaauaacacaguacgugauaggacuccuuaucggacccuauugaugaaugaguuagguguuccuuuucaucuggggaccaagcaggugugcauagcaugguccagcucaaguugucacgauggaaaagcauggcugcauguuuguauaacgggggaugauaaaaaugcaacugcuagcuucauuuacaaugggaggcuuguagauaguguuguuucaugguccaaagacauccucaggacccaggagucagaaugcguuuguaucaauggaacuugugcgguaguaaugacugaugggagugcuucaggaaaagcugauacuaaaauauuauucauugaggaggggaaaaucguucauacuagcacauugucaggaagugcucagcaugucgaggagugcucuugcuauccucgauauccuggugucagaugugucugcagagacaacuggaaaggcuccaauaggcccaucguagauauaaacauaaaggaucauagcauuguuuccaguuauguguguucaggacuuguuggagacacacccagaaaaaacgacagcuccagcaguggccauuguuuggauccuaacaaugaagaagguggucauggaguaaaaggcugggccuuugaugauggaaaugacguguggaugggaagaacgaucaacgagacgucacgcuuaggguaugaaaccuucaaagucauugaaggcugguccaacccgaaguccaaauugcagauaaauaggcaagucauaguugacagagguaauagguccgguuauucugguauuuucucuguugaaggcaaaaacugcaucaaucggugcuuuuauguggaguugauuaggggaaggaaagaggaaacugaagucuuguggaccucaaacaguauuguuguguuuuguggcaccucagguacauauggaacaggcucauggccugauggggcggaccucaaucucaugccuauauaa

SEQ ID NO: 55391 - RNA, 1410 nt, Artificial Sequence
  derived and/or modified CDS sequence (wt) from neuraminidase__InfluenzaA__AGG13810
augaauccaaaucaaaagauaauaacgauuggcucuguuucucucaccauuuccacaauaugcuucuucaugcaaauugccaucuugauaacuacuguaacauugcauuucaagcaauaugaauucaacucccccccaaacaaccaagugaugcugugugaaccaacaauaauagaaagaaacauaacagagauaguguaucuaaccaacaccaccauagagaaggaaauaugccccaaaccagcagaauacagaaauuggucaaagccgcaaugugacauuacaggauuugcaccuuuuucuaaggacaauucgauuaggcuuuccgcugguggggacaucugggugacaagagaaccuuaugugucaugcgauccugacaaguguuaucaauuugcucuuggacagggaacaacacuaaacaacgugcauucaaauaacacaguacgugauaggaccccuuaucggacccuauugaugaaugaguuagguguuccuuuucaucuggggaccaagcaagugugcauagcaugguccagcucaaguugucacgauggaaaagcauggcugcauguuuguauaacgggggaugauaaaaaugcaacugcuagcuucauuuacaaugggaggcuuguagauaguguuguuucaugguccaaagaaauccucaggacccaggagucagaaugcguuuguaucaauggaacuuguacaguaguaaugacugaugggagugcuucaggaaaagcugauacuaaaauacuauucauugaggaggggaaaaucguucauacuagcacauugucaggaagugcucagcaugucgaggagugcucuugcuauccucgauauccuggugucagaugugucugcagagacaacuggaaaggcuccaauaggccuaucguagauauaaacauaaaggaucauagcauuguuuccagguauguguguucaggacuuguuggagacacacccagaaaaaacgacagcuccagcaguagccauuguuuggguccuaacaaugaagaagguggucauggagugaaaggcugggccuucgaugauggaaaugacguguggaugggaagaacgauuaacgagacgucacguuuaggguaugaaaccuucaaagucauugaaggcugguccaacccuaaguccaaauugcagauaaauaggcaggucauaguugacagaggugauagguccgguuauucugguauuuucucuguugaaggcaaaagcugcaucaaucggugcuuuuauguggaguugauuaggggaagaaaagaggaaacugaagucuuguggaccucaaacaguauuguuguguuuuguggcaccucagguacauauggaacaggcucauggccugauggggcggaccucaaucucaugccuauauaa

SEQ ID NO: 55392 - RNA, 1410 nt, Artificial Sequence; identical to SEQ ID NO: 55368
  derived and/or modified CDS sequence (wt) from neuraminidase__InfluenzaA__AGG13822

SEQ ID NO: 55393 - RNA, 1410 nt, Artificial Sequence; identical to SEQ ID NO: 55368
  derived and/or modified CDS sequence (wt) from neuraminidase__InfluenzaA__AGG13834

SEQ ID NO: 55394 - RNA, 1410 nt, Artificial Sequence
  derived and/or modified CDS sequence (wt) from neuraminidase__InfluenzaA__AGG13846
augaauccaaaucaaaagauaauaacgauuggcucuguuucucucaccauuuccacaauaugcuucuucaugcaaauugccaucuugauaacuacuguaacauugcauuucaagcaauaugaauucaacucccccccaaacaaccaagugaugcugugugaaccaacaauaauagaaagaaacauaacagagauaguguaucuaaccaacaccaccauagagaaggaaauaugccccaaaccagcagaauacagaaauuggucaaagccgcagugugacauuacaggauuugcaccuuuuucuaaggacaauucgauuaggcuuuccgcugguggggacaucugggugacaagagaaccuuaugugucaugcgauccugacaaguguuaucaauuugcucuuggacagggaacaacacuaaacaacgugcauucaaauaacacaguacgugauaggaccccuuaucggacccuauugaugaaugaguuagguguuccuuuucaucuggggaccaagcaagugugcauagcaugguccagcucaaguugucacgauggaaaagcauggcugcaugucuguauaacgggggaugauaaaaaugcaacugcuagcuucauuuacaaugggaggcuuguagauaguguuguuucaugguccaaagaaauccucaggacccaggagucagaaugcguuuguaucaauggaacuuguacaguaguaaugacugaugggagugcuucaggaaaagcugauacuaaaauacuauucauugaggaggggaaaaucguucauacuagcacauugucaggaagugcucagcaugucgaggagugcucuugcuauccucgauauccuggugucagaugugucugcagagacaacuggaaaggcuccaauaggccuaucguagauauaaacauaaaggaucauagcauuguuuccagguauguguguucaggacuuguuggagacacacccagaaaaaacgacagcuccagcaguagccauuguuuggauccuaacaaugaagaagguggucauggagugaaaggcugggccuucgaugauggaaaugacguguggaugggaagaacgaucaacgagacgucacguuuaggguaugaaaccuucaaagucauugaaggcugguccaacccuaaguccaaauugcagauaaauaggcaggucauaguugacagaggugauagguccgguuauucugguauuuucucuguugaaggcaaaagcugcaucaaucggugcuuuuauguggaguugauuaggggaagaaaagaggaaacugaagucuuguggaccucaaacaguauuguuguguuuuguggcaccucagguacauauggaacaggcucauggccugauggggcggaccucaaucucaugccuauauaa

SEQ ID NO: 55395 - RNA, 1410 nt, Artificial Sequence; identical to SEQ ID NO: 55337
  derived and/or modified CDS sequence (wt) from neuraminidase__InfluenzaA__AGG13858

SEQ ID NO: 55396 - RNA, 1410 nt, Artificial Sequence
  derived and/or modified CDS sequence (wt) from neuraminidase__InfluenzaA__AGG13870
augaauccaaaucaaaagauaauaacgauuggcucuguuucucucaccauuuccacaauaugcuucuucaugcaaauugccaucuugauaacuacuguaacauugcauuucaagcaauaugaauucaacucccccccaaacaaccaagugaugcugugugaaccaacaauaauagaaagaaacauaacagagauaguguauuugaccaacaccaccauagagaaggaaauaugccccaaaccagcagaauacagaaauuggucaaaaccgcaauguggcauuacaggauuugcaccuuucucuaaggacaauucgauuaggcuuuccgcugguggggacaucugggugacaagagaaccuuaugugucaugcgauccugacagguguuaucaauuugcccuuggacagggaacaacacuaaacaacaugcauucaaauaacacaguacgugauaggaccccuuaucggacucuauugaugaaugaguuggguguuccuuuucaucuggggaccaagcaagugugcauagcaugguccagcucaaguugucacgauggaaaagcauggcugcauguuuguauaacgggggaugauaaaaaugcaacugcuagcuucauuuacaaugggaggcuuguagauaguguuguuucaugguccaaagaaauucucaggacccaggagucagaaugcguuuguaucaauggaacuuguacaguaguaaugacugauggaagugcuucaggaaaagcugauacuaaaauauuauucauugaggaggggaaaaucguucauacuagcacauugucaggaagugcucagcaugucgaagagugcucuugcuauccucgauauccuggugucagaugugucugcagagacaacuggaaaggcuccaaucggcccaucguagauauaaacauaaaggaucauagcauugucuccaguuauguguguucaggacuuguuggagacacacccagaaaaaacgacagcuccagcaguagccauuguuuggauccuaacaaugaagaagguggucauggagugaaaggcugggccuuugaugauggaaaugacguguggaugggaagaacaaucaacgagacgucacgcuuaggguaugaaaccuucaaagucauugaaggcugguccaacccuaaguccaaauugcagauaaauaggcaagucauaguugacagaggugauagguccgguuauucugguauuuucucuguugaaggcacaagcugcaucaaucggugcuuuuauguggaguugauuaggggaagaaaagaggaaacugaagucuuguggaccucaaacaguauuguuguguuuuguggcaccucagguacauauggaacaggcucauggccugauggggcggaccucaaucucaugccuauauaa

SEQ ID NO: 55397 - RNA, 1410 nt, Artificial Sequence
  derived and/or modified CDS sequence (wt) from neuraminidase__InfluenzaA__AGG13894
augaauccaaaucaaaagauaauaacaauuggcucuguuucucucaccauuuccacaguaugcuucuucaugcaaauugccaucuugauaacuacuguaacauugcauuucaagcaauaugaauucaacucccccccaaacaaccaagugaugcugugugaaccaacaauaauagaaagaaacguaacagagauaguguaucugaccaacaccaccauagagaaggaaauaugccccaaaccagcagaauacagaaauuggucaaaaccgcaauguggcauuacaggauuugcaccuuucucuaaggacaauucgauuaggcuuuccgcugguggggacaucugggugacaagagaaccuuaugugucaugcgauccugacaaguguuaucaauuugcccuuggacagggaacaacacuaaacaacgugcauucaaauaacacaguacgugauaggaccccuuaucggacucuauugaugaaugaguuggguguuccuuuucaucuggggaccaagcaagugugcauagcaugguccagcucaaguugucacgauggaaaagcauggcugcauguuuguauaacgggggaugauaaaaaugcaacugcuagcuucauuuacaaugggaggcuuguagauaguguuguuucaugguccaaagaaauucucaggacccaggagucagaaugcguuuguaucaauggaacuuguacaguaguaaugacugauggaagugcuucaggaaaagcugauacuaaaauacuauucauugaggaggggaaaaucguucauacuagcacauugucaggaagugcucagcaugucgaagagugcucuugcuauccucgauauccuggugucagaugugucugcagagacaacuggaaaggcuccaaucggcccaucguagauauaaacauaaaggaucauagcauuguuuccaguuauguguguucaggacuuguuggagacacacccagaaaaaacgacagcuccagcaguagccauuguuuggauccuaacaaugaagaagguggucauggagugaaaggcugggccuuugaugauggaaaugacguguggaugggaagaacaaucaacgagacgucacgcuuaggguaugaaaccuucaaagucauugaaggcugguccaauccuaaguccaaauugcagauaaauaggcaagucauaguugacagaggugauagguccgguuauucugguauuuucucuguugaaggcaaaagcugcaucaaucggugcuuuuauguagaguugauuaggggaagaaaagaggaaacugaagucuuguggaccucaaacaguauuguuguguuuuguggcaccucagguacauauggaacaggcucauggccugauggggcggaccucaaucucaugccuauauaa

SEQ ID NO: 55398 - RNA, 1410 nt, Artificial Sequence; identical to SEQ ID NO: 55368
  derived and/or modified CDS sequence (wt) from neuraminidase__InfluenzaA__AGG13906

SEQ ID NO: 55399 - RNA, 1410 nt, Artificial Sequence
  derived and/or modified CDS sequence (wt) from neuraminidase__InfluenzaA__AGG13930
augaauccaaaucaaaagauaauaacgauuggcucuguuucucucaccauuuccacaauaugcuucuucaugcaaauugccaucuugauaacuacuguaacguugcauuucaagcaauaugaauucaacucccccccaaacaaccaagugaugcugugugaaccgacaauaauagaaagaaacauaacagagauaguguaucugaccaacaccaccauagagaaggaaauaugccccaaaccagcagaauacagaaauuggucaaaaccgcaauguggcauuacaggauuugcaccuuucucuaaggacaauucgauuaggcuuuccgcugguggggacaucugggugacaagagaaccuuaugugucaugcgauccugacaaguguuaucaauuugcccuuggacagggaacaacacuaaacaacgugcauucaaauaacacaguacgugauaggaccccuuaucggacucuauugaugaaugaguuggguguuccuuuucaucuggggaccaagcaagugugcauagcaugguccagcucaaguugucacgauggaaaagcauggcugcauguuuguauaacgggggaugauaaaaaugcaacugcuagcuucauuuacaaugggaggcuuguagauaguguuguuucaugguccaaagaaauucucaggacccaggagucagaaugcguuuguaucaauggaacuuguacaguaguaaugacugauggaagugcuucaggaaaagcugauacuaaaauacuauucauugaggaggggaaaaucguucauacuagcacauugucaggaagugcucagcaugucgaagagugcucuugcuauccucgauauccuggugucagaugugucugcagagacaacuggaaaggcuccaaucggcccaucguagauauaaacauaaaggaucauagcauuguuuccaguuauguguguucaggacuuguuggagacacacccagaaaaaacgaccgcuccagcaguagccauuguuuggauccuaacaaugaagaagguggucauggagugaaaggcugggccuuugaugauggaaaugacguguggaugggaagaacaaucaacgagacgucacgcuuaggguaugaaaccuucaaagucauugaaggcugguccaauccuaaguccaaauugcagauaaauaggcaagucauaguugacagaggugauagguccgguuauucugguauuuucucuguugaaggcaaaagcugcaucaaucggugcuuuuauguagaguugauuaggggaagaaaagaggaaacugaagucuuguggaccucaaacaguauuguuguguuuuguggcaccucagguacauauggaacaggcucauggccugauggggcggaccucaaucucaugccuauauaa

SEQ ID NO: 55400 - RNA, 1410 nt, Artificial Sequence; identical to SEQ ID NO: 55376
  derived and/or modified CDS sequence (wt) from neuraminidase__InfluenzaA__AGG13942

SEQ ID NO: 55401 - RNA, 1410 nt, Artificial Sequence
  derived and/or modified CDS sequence (wt) from neuraminidase__InfluenzaA__AGG13965
augaauccaaaccaaaagauaauaaccauugguucggucuguaugacaauuggaauggcuaacuuaauauuacaaauuggaaacauaaucucaauauggauuagccacucaauucaacuugggaaucaaagucagauugaaacaugcaaucaaagcgucauuacuuaugaaaacaacacuuggguaaaucagacauauguuaacaucaguaacaccaacuuugcugcuggacagucagugguuuccgugaaauuagcgggcaauuccucucucugcccuguuaguggaugggcuauauacaguaaagacaacaguguaagaaucgguuccaagggggauguguuugucauaagggaaccauucauaucaugcucccccuuggaaugcagaaccuucuucuugacucaaggggccuugcuaaaugacaaacauuccaauggaaccauuaaagacaggagcccauaucgaacccuaaugagcuguccuauuggugaaguucccucuccauacaacucaagauuugagucggucgcuuggucagcaagugcuugucaugauggcaucaauuggcuaacaauuggaauuucuggcccagacaguggggcaguugcuguauuaaaguacaauggcauaauaacagacacuaucaagaguuggagaaacaauauauugagaacacaagagucugaaugugcauguguaaaugguucuugcuuuaccauaaugaccgauggaccaagugauggacaggccucauacaagaucuucagaauagaaaagggaaagauagucaaaucagucgaaaugaaugccccuaauuaucacuaugaggaaugcuccuguuauccugauucuagugaaaucacaugugugugcagggauaacuggcauggcucgaaucgaccgugggugucuuucaaccagaaucuggaauaucagauaggauacauaugcagugggauuuucggagacaauccacgcccuaaugauaagacaggcaguugugguccaguaucgucuaauggagcaaauggaguaaaaggauuuucauucaaauacggcaaugguguuuggauagggagaacuaaaagcauuaguucaagaaaagguuuugagaugauuugggauccaaauggauggacugggacagacaauaacuucucaauaaagcaagauaucguaggaauaaaugaguggucaggauauagcgggaguuuuguucagcauccagaacuaacagggcuggauuguauaagaccuugcuucuggguugaacuaaucagagggcgacccaaagaaaacacaaucuggacuagcgggagcagcauauccuuuugugguguaaacagugacacuguggguuggucuuggccagacggugcugaguugccauuuaccauugacaaguaa

SEQ ID NO: 55402 - RNA, 1410 nt, Artificial Sequence; identical to SEQ ID NO: 55379
  derived and/or modified CDS sequence (wt) from neuraminidase__InfluenzaA__AGG13976

SEQ ID NO: 55403 - RNA, 1410 nt, Artificial Sequence
  derived and/or modified CDS sequence (wt) from neuraminidase__InfluenzaA__AGG13988
augaauccaaaucaaaagauaauaacgauuggcucuguuucucucaccauuuccacaguaugcuucuucaugcaaauugccaucuugauaacuacuguaacauugcauuucaagcaauaugaauucaacucccccccaaacaaccaagugaugcugugugaaccaacaauaauagaaagaaacauaacagagauaguguaucugaccaacaccaccauagagaaggaaauaugccccaaaccagcagaauacagaaauuggucaaaaccgcaauguggcauuacaggauuugcaccuuucucuaaggacaauucgauuaggcuuuccgcugguggggacaucugggugacaagagaaccuuaugugucaugcgauccugacaaguguuaucaauuugcccuuggacagggaacaacacuaaacaacgugcauucaaauaacacaguacgugauaggaccccuuaucggacucuauugaugaaugaguuggguguuccuuuucaucuggggaccaagcaagugugcauagcaugguccagcucaaguugucacgauggaaaagcauggcugcauguuuguauaacgggggaugauaaaaaugcaacugcuagcuucauuuacaaugggaggcuuguagauaguguuguuucaugguccaaagaaauucucaggacccaggagucagaaugcguuuguaucaaugggacuuguacaguaguaaugacugauggaagugcuucaggaaaagcugauacuaaaauacuauucauugaggaggggaaaaucguucauacuagcaccuugucaggaagugcucagcaugucgaagagugcucuugcuauccucgauauccuggugucagaugugucugcagagacaacuggaaaggcuccaaucggcccaucguagauauaaacauaaaggaucauagcauuguuuccaguuauguguguucaggacuuguuggagacacacccagaaaaaacgacagcuccagcaguagccauuguuuggauccuaacaaugaagaagguggucauggagugaaaggcugggccuuugaugauggaaaugacguguggaugggaagaacaaucaacgagacgucacgcuuaggguaugaaaccuucaaagucauugaaggcugguccaauccuaaguccaaauugcagauaaauaggcaagucauaguugacagaggugauagguccgguuauucugguauuuucucuguugaaggcaaaagcugcaucaaucggugcuuuuauguagaguugauuaggggaagaaaagaggaaacugaagucuuguggaccucaaacaguauuguuguguuuuguggcaccucagguacauauggaacaggcucauggccugauggggcggaccucaaucucaugccuauauaa

SEQ ID NO: 55404 - RNA, 1410 nt, Artificial Sequence
  derived and/or modified CDS sequence (wt) from neuraminidase__InfluenzaA__AGG14000
augaauccaaaucaaaagauaauaacgauuggcucuguuucucucaccauuuccacaguaugcuucuucaugcaaauugccaucuugauaacuacuguaacauugcauuucaagcaauaugaauucaacucccccccaaacaaccaagugaugcugugugaaccaacaauaauagaaagaaacauaacagagauaguguaucugaccaacaccaccauagagaaggaaauaugccccaaaccagcagaauacagaaauuggucaaaaccgcaauguggcauuacaggauuugcaccuuucucuaaggacaauucgauuaggcuuuccgcugguggggacaucugggugacaagagaaccuuaugugucaugcgauccugacaaguguuaucaauuugcccuuggacagggaacaacacuaaacaacgugcauucaaauaacacaguacgugauaggaccccuuaucggacucuauugaugaaugaguuggguguuccuuuucaucuggggaccaagcaagugugcauagcaugguccagcucaaguugucacgauggaaaagcauggcugcauguuuguauaacgggggaugauaaaaaugcaacugcuagcuucauuuacaaugggaggcuuguagauaguguuguuucaugguccaaagaaauucucaggacccaggagucagaaugcguuuguaucaaugggacuuguacaguaguaaugacugauggaagugcuucaggaaaagcugauacuaaaauacuauucauugaggaggggaaaaucguucauacuagcacauugucaggaagugcucagcaugucgaagagugcucuugcuauccucgauauccuggugucagaugugucugcagagacaacuggaaaggcuccaaucggcccaucguagauauaaacauaaaggaucauagcauuguuuccaguuauguguguucaggacuuguuggagacacacccagaaaaaacgacagcuccagcaguagccauuguuuggauccuaacaaugaagaagguggucauggagugaaaggcugggccuuugaugauggaaaugacguguggaugggaagaacaaucaacgagacgucacgcuuaggguaugaaaccuucaaagucauugaaggcugguccaauccuaaguccaaauugcagauaaauaggcaagucauaguugacagaggugauagguccgguuauucugguauuuucucuguugaaggcaaaagcugcaucaaucggugcuuuuauguagaguugauuaggggaagaaaagaggaaacugaagucuuguggaccucaaacaguauuguuguguuuuguggcaccucagguacauauggaacaggcucauggccugauggggcggaccucaaucucaugccuauauaa

SEQ ID NO: 55405 - RNA, 1410 nt, Artificial Sequence; identical to SEQ ID NO: 55379
  derived and/or modified CDS sequence (wt) from neuraminidase__InfluenzaA__AGG14012

SEQ ID NO: 55406 - RNA, 1410 nt, Artificial Sequence; identical to SEQ ID NO: 55394
  derived and/or modified CDS sequence (wt) from neuraminidase__InfluenzaA__AGG14024

SEQ ID NO: 55407 - RNA, 1410 nt, Artificial Sequence
  derived and/or modified CDS sequence (wt) from neuraminidase__InfluenzaA__AGG14036
augaacccaaaucaaaagauaauaacgauuggcucuguuucucucaccauuuccacaauaugcuucuucaugcaaauugccaucuugauaacuacuguaacauugcauuucaagcaauaugaauucaacucccccccaaacaaccaagugaugcugugugaaccaacaauaauagaaagaaacauaacagagauaguguaucuaaccaacaccaccauagagaaggaaauaugcccuaaacuagcagaauacagaaauuggucaaagccgcaaugugacauuacaggauuugcaccuuuuucuaaggacaauucgauuaggcuuuccgcugguggggacaucugggugacaagagaaccuuaugugucaugcgauccugacaaguguuaucaauuugcccuuggacagggaacaacacuaaacaacgugcauucaaauaacacaguacgugauaggacuccuuaucggacccuauugaugaaugaguuagguguuccuuuucaucuggggaccaagcaggugugcauagcaugguccagcucaaguugucacgauggaaaagcauggcugcauguuuguauaacgggggaugauaaaaaugcaacugcuagcuucauuuacaaugggaggcuuguagauaguguuguuucaugguccaaagacauccucaggacccaggagucagaaugcguuuguaucaauggaacuugugcgguaguaaugacugaugggagugcuucaggaaaagcugauacuaaaauacuauucauugaggaggggaaaaucguucauacuagcacauugucaggaagugcucagcaugucgaggagugcucuugcuauccucgauauccuggugucagaugugucugcagagacaacuggaaaggcuccaauaggcccaucguagauauaaacauaaaggaucauagcauuguuuccaguuauauguguucaggacuuguuggagacacacccagaaaaaacgacagcuccagcaguggccauuguuuggauccuaacaaugaagaagguggucauggaguaaaaggcugggccuuugaugauggaaaugacguguggaugggaagaacgaucaacgagacgucacgcuuaggguaugaaaccuucaaagucauugaaggcugguccaacccgaaguccaaauugcagauaaauaggcaagucauaguugacagagguaauagguccgguuauucugguauuuucucuguugaaggcaaaaacugcaucaaucggugcuuuuauguggaguugauuaggggaaggaaagaggaaacugaagucuuguggaccucaaacaguauuguuguguuuuguggcaccucagguacauauggaacaggcucauggccugauggggcggaccucaaucucaugccuauauaa

SEQ ID NO: 55408 - RNA, 1410 nt, Artificial Sequence; identical to SEQ ID NO: 55387
  derived and/or modified CDS sequence (wt) from neuraminidase__InfluenzaA__AGG14321

SEQ ID NO: 55409 - RNA, 1410 nt, Artificial Sequence; identical to SEQ ID NO: 55337
  derived and/or modified CDS sequence (wt) from neuraminidase__InfluenzaA__AGG14333

SEQ ID NO: 55410 - RNA, 1410 nt, Artificial Sequence
  derived and/or modified CDS sequence (wt) from neuraminidase__InfluenzaA__AGG84182
augaauccaaaucaaaagauaauaacgauuggcucuguuucucucaccauuuccacaauaugcuucuucaugcaaauugccaucuugauaacuacuguaacauugcauuucaagcaauaugaauucaacucccccccaaacaaccaagugaugcugugugaaccgacaauaauagaaagaaacauaacagaaauaguguaucugaccaacaccaccauagagaaggaaauaugccccaaacuagcagaauacagaaauuggucaaaaccgcaaugugacauuacaggauuugcaccuuuuucuaaggacaauucgauuaggcuuuccgcugguggggacaucugggugacaagagaaccuuaugugucaugcgauccugacaaguguuaucaauuugcccuuggacagggaacaacacuaaacaacgugcauucaaauaacacaguacgugauaggaccccuuaucggacccuauugaugaaugaguuagguguuccuuuucaucuggggaccaagcaagugugcauagcaugguccagcucaaguugucacgauggaaaagcauggcugcauguuuguauaacgggggaugauaaaaaugcaacugcaagcuucauuuacaaugggaggcuuguagauaguguuguuucaugguccaaagaaauucucaggacccaggagucagaaugcguuuguaucaauggaacuuguacaguaguaaugacugauggaagugcuucaggaaaagcugauacuaaaauacuauucauugaggaggggaaaaucguucauacuagcacauugucaggaagugcucagcauguugaggagugcucuugcuauccucgauauccuggugucagaugugucugcagagacaacuggaaaggcuccaauaggcccaucguagauauaaacauaaaggaucauagcauaguuuccaguuauguguguucaggacuuguuggagacacacccagaaaaaacgacagcuccagcaguagccauuguuuggauccuaacaaugaagaagguggucauggagugaaaggcugggccuuugaugauggaaaugacguguggaugggaagaacaaucaacgagacgucacgcuugggguaugaaaccuucaaagucauugaaggcugguccaacccuaaguccaaauugcagauaaauaggcaagucauaguugacaaagguaauagguccgguuauucugguauuuucucuguugaaggcaaaagcugcaucaaucggugcuuuuauguggaguugauuaggggaagaaaagaggaaacugaagucuuguggaccucaaacaguauuguuguguuuuguggcaccucagguacauauggaacaggcucauggccugauggggcggaccucaaucucaugccuauauaa

SEQ ID NO: 55411 - RNA, 1398 nt, Artificial Sequence
  derived and/or modified CDS sequence (wt) from neuraminidase__InfluenzaA__AGJ51955
augaauccaaaucagaagauucuaugcacuucagccacugcuaucauaauaggcgcaaucgcaguacucauuggaauagcaaaccuaggauugaacauaggacugcaucuaaaaccgggcugcaauugcucacacucacaaccugaaacaaccaacacaagccaaacaauaauaaacaacuauuauaaugaaacaaacaucaccaacauccaaauggaagagagaacaagcaggaauuucaauaacuuaacuaaagggcucuguacuauaaauucauggcacauauaugggaaagacaaugcaguaagaauuggagagagcucggauguuuuagucacaagagaacccuauguuucaugcgacccagaugaaugcagguucuaugcucucagccaaggaacaacaaucagagggaaacacucaaacggaacaauacacgauaggucccaguaucgcgcccugauaagcuggccacuaucaucaccgcccacaguguacaacagcaggguggaaugcauuggguggucaaguacuaguugccaugauggcaaauccaggaugucaauauguauaucaggaccaaacaacaaugcaucugcaguaguaugguacaacagaaggccuguugcagaaauuaacacaugggcccgaaacauacuaagaacacaggaaucugaauguguaugccacaacggcguaugcccaguaguguucaccgaugggucugccacuggaccugcagacacaagaauauacuauuuuaaagaggggaaaauauugaaaugggagucucugacuggaacugcuaagcauauugaagaaugcucauguuacggggaacgaacaggaauuaccugcacaugcagggacaauuggcagggcucaaauagaccagugauucagauagacccaguagcaaugacacacacuagucaauauauaugcaguccuguucuuacagacaauccccgaccgaaugacccaaauauagguaaguguaaugacccuuauccagguaauaauaacaauggagucaagggauucucauaccuggauggggcuaacacuuggcuagggaggacaauaagcacagccucgaggucuggauacgagauguuaaaagugccaaaugcauugacagaugauagaucaaagcccauucaaggucagacaauuguauuaaacgcugacuggagugguuacaguggaucuuucauggacuauugggcugaaggggacugcuaucgagcguguuuuuauguggaguugauacguggaagacccaaggaggauaaaguguuguggaccggcgauaguauaguaucgauguguuccaguacagaauuccugggacaauggaacuggccugauggggcuaaaauagaguacuuccucuaa

SEQ ID NO: 55412 - RNA, 1398 nt, Artificial Sequence
  derived and/or modified CDS sequence (wt) from neuraminidase__InfluenzaA__AGJ72863
augaauccaaaucagaagauucuaugcacuucagccacugcuaucauaauaggcgcaaucgcaguacucauuggaauagcaaaccuaggauugaacauaggacugcaucuaaaaccgggcugcaauugcucacacucacaaccugaaacaaccaacacaagccaaacaauaauaaacaacuauuauaaugaaacaaacaucaccaacauccaaauggaagagagaacaagcaggaauuucaauaacuuaacuaaagggcucuguacuauaaauucauggcacauauaugggaaagacaaugcaguaagaauuggagagagcucggauguuuuagucacaagagaacccuauguuucaugcgacccagaugaaugcagguucuaugcucucagccaaggaacaacaaucagagggaaacacucaaacggaacaauacacgauaggucccaguaucgcgcccugauaagcuggccacuaucaucaccgcccacaguguacaacagcaggguggaaugcauuggguggucaaguacuaguugccaugauggcaaauccaggaugucaauauguauaucaggaccaaacaacaaugcaucugcaguaguaugguacaacagaaggccuguugcagaaauuaacacaugggcccgaaacauacuaagaacacaggaaucugaauguguaugccacaacggcguaugcccaguaguguucaccgaugggucugccacuggaccugcagacacaagaauauacuauuuuaaagaggggaaaauauugaaaugggagucucugacuggaacugcuaagcauauugaagaaugcucauguuacggggaacgaacaggaauuaccugcacaugcagggacaauuggcagggcucaaauagaccagugauucagauagacccaguagcaaugacacacacuagucaauauauaugcaguccuguucuuacagacaauccccgaccgaaugacccaaauauagguaaguguaaugacccuuauccagguaauaauaacaauggagucaagggauucucauaccuggauggggcuaacacuuggcuagggaggacaauaagcacagccucgaggucuggauacgagauguuaaaagugccaaaugcauugacagaugauagaucaaagcccauucaaggucagacaauuguauuaaacgcugacuggagugguuacaguggaucuuucauggacuauugggcugaaggggacugcuaucgagcguguuuuuauguggaggugauacguggaagacccaaggaggauaaaguguggugggccggcaauaguauaguaucgauguguuccaguacagaauuccugggacaauggaacuggccugauggggcuaaaauagaguacuuccucuaa

SEQ ID NO: 55413 - RNA, 1410 nt, Artificial Sequence
  derived and/or modified CDS sequence (wt) from neuraminidase__InfluenzaA__AGJ73328
augaauccaaaccaaaagauaauaaccauugguucggucuguaugacaauuggaauggcuaacuuaauauuacaaauuggaaacauaaucucaauauggauuagccacucaauucaacuugggaaucaaagucagauugaaacaugcaaucaaagcgucauuacuuaugaaaacaacacuuggguaaaucagacauauguuaacaucagcaacaccaacuuugcugcuggacagucagugguuuccgugaaauuagcgggcaauuccucucucugcccuguuaguggaugggcuauauacaguaaagacaacaguguaagaaucgguuccaagggggauguguuugucauaagggaaccauucauaucaugcucccccuuggaaugcagaaccuucuucuugacucaaggggccuugcuaaaugacaaacauuccaauggaaccauuaaagacagaagcccauaucgaacccuaaugagcuguccuauuggugaaguucccucuccauacaacucaagauuugagucggucgcuuggucagcaagugcuugucaugauggcaucaauuggcuaacaauuggaauuucuggcccagacaguggggcaguggcuguauuaaaguacaauggcauaauaacagacacuaucaagaguuggagaaacaauauauugagaacacaagagucugaaugugcauguguaaaugguucuugcuuuaccauaaugaccgauggaccaagugauggacaggccucauacaagaucuucagaauagaaaagggaaagauagucaaaucagucgaaaugaaugccccuaauuaucacuaugaggaaugcuccuguuauccugauucuagugaaaucacaugugugugcagggauaacuggcauggcucgaaucgaccgugggugucuuucaaccagaaucuggaauaucagauaggauacauaugcagugggauuuucggagacaauccacgcccuaaugauaagacaggcaguugugguccaguaucgucuaauggagcaaauggaguaaaaggauuuucauucaaauacggcaaugguguuuggauagggagaacuaaaagcauuaguucaagaaaagguuuugagaugauuugggauccaaauggauggaaugggacagacaauaacuucucaauaaagcaagauauuguaggaauaaaugaguggucaggauauagcgggaguuuuguucagcauccagaacuaacagggcuggauuguauaagaccuugcuucuggguugaacuaaucagagggcgacccaaagagaacacaaucuggacuagcgggagcagcauauccuuuugugguguaaacagugacacuguggguuggucuuggccagacggugcugaguugccauuuaccauugacaaguaa

SEQ ID NO: 55414 - RNA, 1410 nt, Artificial Sequence
  derived and/or modified CDS sequence (wt) from neuraminidase__InfluenzaA__AGJ73330
augaauccaaaccaaaagauaauaaccauugguucggucuguaugacaauuggaauggcuaacuuaauauuacaaauuggaaacauaaucucaauauggauuagccacucaauucaacuugggaaucaaagucaaauugaaacaugcaaucaaagcgucauuacuuaugaaaacaacacuuggguaaaucagacauauguuaacaucagcaacaccaacuuugcugcuggacagucagugguuuccgugaaauuagcgggcaauuccucucucugcccuguuaguggaugggcuauauacaguaaagacaacaguauaagaaucgguuccaagggggauguguuugucauaagggaaccauucauaucaugcuccccauuggaaugcagaaccuucuucuugacucaaggggccuugcuaaaugacaaacauuccaauggaaccauuaaagacaggagcccauaucgaacccuaaugagcuguccuauuggugaaguucccucuccauacaacucaagauuugagucagucgcuuggucagcaagugcuugucaugauggcaucaauuggcuaacaauuggaauuucuggcccagacaauggggcaguggcuguguuaaaguacaacggcauaauaacagacacuaucaagaguuggagaaacaauauauugagaacacaagagucugaaugugcauguguaaaugguucuugcuuuaccauaaugaccgauggaccaagugauggacaggccucauacaagaucuucagaauagaaaagggaaagauagucaaaucagucgaaaugaaugccccuaauuaucacuaugaggaaugcuccuguuauccugauucuagugaaaucacaugugugugcagggauaacuggcauggcucgaaucgaccgugggugucuuucaaccagaaucuggaauaucagauaggauacauaugcagugggauuuucggagacaauccacgcccuaaugauaagacaggcaguugugguccaguaucgucuaauggagcaaauggaguaaaaggauuuucauucaaauacggcaaugguguuuggauagggagaacuaaaagcauuagcucaagaaaagguuuugagaugauuugggauccaaacggauggacugggacagacaauaacuucucaauaaagcaagauaucguaggaauaaaugaguggucaggauauagcgggaguuuuguucagcauccagaacuaacagggcuggauuguauaagaccuugcuucuggguugaacuaaucagagggcgacccaaagagaacacaaucuggacuagcgggagcagcauauccuuuugugguguaaacagugacacuguggguuggucuuggccagacggugcugaguugccauuuaccauugacaaguaa

SEQ ID NO: 55415 - RNA, 1410 nt, Artificial Sequence
  derived and/or modified CDS sequence (wt) from neuraminidase__InfluenzaA__AGJ73332
augaauccaaaccaaaagauaauaaccauugguucggucuguaugacaauuggaauggcuaacuuaauauuacaaauuggaaacauaaucucaauauggauuagccacucaauucaacuugggaaucaaaaucaaauugaaacaugcaaucaaagcgucauuacuuaugaaaacaacacuuggguaaaucagacauauguuaacaucagcaacaccaacuuugcugcuggacagucagugguuuccgugaaauuagcgggcaauuccucucucugcccuguuaguggaugggcuauauacaguaaagacaacaguauaagaaucgguuccaagggggauguguuugucauaagggaaccauucauaucaugcucccccuuggaaugcagaaccuucuucuugacucaaggggcccugcuaaaugacaaacauuccaauggaaccauuaaagacagaagcccauaucgaacccuaaugagcuguccuauuggugaaguucccucuccauacaacucaagauuugagucagucgcuuggucagcaagugcuugucaugauggcaucaauuggcuaacaauuggaauuucuggcccagacaauggggcaguggcuguguuaaaguacaacggcauaauaacagacacuaucaagaguuggagaaacaauauauugagaacacaagagucugaaugugcauguguaaaugguucuugcuuuacuguaaugaccgauggaccaagugauggacaggccucauacaagaucuucagaauagaaaagggaaagauagucaaaucagucgaaaugaaugccccuaauuaucacuaugaggaaugcuccuguuauccugauucuagugaaaucacaugugugugcagggauaacuggcauggcucgaaucgaccgugggugucuuucaaccauaaucuggaauaucagauaggauacauaugcagugggauuuucggagacaauccacgcccuaaugauaagacaggcaguugugguccaguaucgucuaauggagcaaauggaguaaaaggauuuucauucaaauacggcaaugguguuuggauagggagaacuaaaagcauuaguucaagaaacgguuuugaaaugauuugggauccgaacggauggacugggacagacaauaacuucucaauaaagcaagauaucauaggaauaaaugaguggucaggauauagcgggaguuuuguucagcauccagaacuaacagggcuggauuguauaagaccuugcuucuggguugaacuaaucagagggcgacccaaagagaacacaaucuggacuagcgggagcagcauauccuuuugugguguaaacagugacacuguggguuggucuuggccagacggugcugaguugccauuuaccauugacaaguaa

SEQ ID NO: 55416 - RNA, 1410 nt, Artificial Sequence; identical to SEQ ID NO: 55414
  derived and/or modified CDS sequence (wt) from neuraminidase__InfluenzaA__AGJ73334

SEQ ID NO: 55417 - RNA, 1410 nt, Artificial Sequence
  derived and/or modified CDS sequence (wt) from neuraminidase__InfluenzaA__AGJ73336
augaauccaaaccaaaagauaauaaccauugguucggucuguaugacaauuggaauggcuaacuuaauauuacaaauuggaaacauaaucucaauauggauuagccacucaauucaacuugggaaucaaagucagauugaaacaugcaaucaaagcgucauuacuuaugaaaacaacacuuggguaaaucagacauauguuaacaucagcaacaccaacuuugcugcuggacagucagugguuuccgugaaauuagcgggcaauuccucucucugcccuguuaguggaugggcuauauacaguaaagacaacaguauaagaaucgguuccaagggggauguguuugucauaagggaaccauucauaucaugcucccccuuagaaugcagaaccuucuucuugacucaaggggccuuguuaaaugacaaacauuccaauggaaccauuaaagacaggagcccauaucgaacccuaaugagcuguccuauuggugaaguucccucuccauacaacucaagauuugagucagucgcuuggucagcaagugcuugucaugauggcaucaauuggcuaacaauuggaauuucuggcccagacaauggggcaguggcuguguuaaaguacaacggcauaauaacagacacuaucaagaguuggagaaacaauauauugagaacacaagagucugaaugugcauguguaaaugguucuugcuuuaccauaaugaccgauggaccaagugauggacaggccucauacaagaucuucagaauagaaaagggaaagauagucaaaucagucgaaaugaaugccccuaauuaucacuaugaggaaugcuccuguuauccugauucuagugaaaucacaugugugugcagggauaacuggcauggcucgaaucgaccgugggugucuuucaaccagaaucuggaauaucagauaggauacauaugcagugggauuuucggagacaauccacgcccuaaugauaagacaggcaguugugguccaguaucgucuaauggagcaaauggaguaaaaggauuuucauucaaauacggcaaugguguuuggauagggagaacuaaaagcauuaguucaagaaaagguuuugagaugauuugggauccaaacggauggacugggacagacaauaacuucucaauaaagcaagauaucguaggaauaaaugaguggucaggauauagcgggaguuuuguucagcauccagaacuaacagggcuggauuguauaagaccuugcuucuggguugaacuaaucagagggcgacccaaagagaacacaaucuggacuagcgggagcagcauauccuuuugugguguaaacagugacacuguggguuggucuuggccagacggugcugaguugccauuuaccauugacaaguaa

SEQ ID NO: 55418 - RNA, 1410 nt, Artificial Sequence
  derived and/or modified CDS sequence (wt) from neuraminidase__InfluenzaA__AGJ73338
augaauccaaaccaaaagauaauaaccauugguucggucuguaugacaauuggaauggcuaacuuaauauuacaaauuggaaacauaaucucaauauggauuagccacucaauucaacuugggaaucaaagucaaauugaaacaugcaaucaaagcgucauuacuuaugaaaacaacacuuggguaaaucagacauauguuaacaucagcaacaccaacuuugcugcuggacagucagugguuuccgugaaauuagcgggcaauuccucucucugcccuguuaguggaugggcuauauacaguaaagacaacaguauaagaaucgguuccaagggggauguguuugucauaagggaaccauucauaucaugcuccccauuggaaugcagaaccuucuucuugacucaaggggccuugcuaaaugacaaacauuccaaugggaccauuaaagacaggagcccauaucgaacccuaaugagcuguccuauuggugaaguucccucuccauacaacucaagauuugagucagucgcuuggucagcaagugcuugucaugauggcaucaauuggcuaacaauuggaauuucuggcccagacaauggggcaguggcuguguuaaaguacaacggcauaauaacagacacuaucaagaguuggagaaacaauauauugagaacacaagagucugaaugugcauguguaaaugguucuugcuuuaccauaaugaccgauggaccaagugauggacaggccucauacaagaucuucagaauagaaaagggaaagauagucaaaucagucgaaaugaaugccccuaauuaucacuaugaggaaugcuccuguuauccugauucuagugaaaucacaugugugugcagggauaacuggcauggcucgaaucgaccgugggugucuuucaaccagaaucuggaauaucagauaggauacauaugcagugggauuuucggagacaauccacgcccuaaugauaagacaggcaguugugguccaguaucgucuaauggagcaaauggaguaaaaggauuuucauucaaauacggcaaugguguuuggauagggagaacuaaaagcauuagcucaagaaaagguuuugagaugauuugggauccaaacggauggacugggacagacaauaacuucucaauaaagcaagauaucguaggaauaaaugaguggucaggauauagcgggaguuuuguucagcauccagaacuaacagggcuggauuguauaagaccuugcuucuggguugaacuaaucagagggcgacccaaagagaacacaaucuggacuagcgggagcagcauauccuuuugugguguaaacagugacacuguggguuggucuuggccagacggugcugaguugccauuuaccauugacaaguaa

SEQ ID NO: 55419 - RNA, 1410 nt, Artificial Sequence
  derived and/or modified CDS sequence (wt) from neuraminidase__InfluenzaA__AGJ73340
augaauccaaaccaaaagauaauaaccauugguucggucuguaugacaauuggaauggcuaacuuaauauuacaaauuggaaacauaaucucaauauggauuagccacucaauucaacuugggaaucaaagucaaauugaaacaugcaaucaaagcgucauuacuuaugaaaacaacacuuggguaaaucagacauauguuaacaucagcaacaccaacuuugcugcuggacagucagugguuuccgugaaauuagcgggcaauuccucucucugcccugcuaguggaugggcuauauacaguaaagacaacaguauaagaaucgguuccaagggggauguguuugucauaagggaaccauucauaucaugcuccccauuggaaugcagaaccuucuucuugacucaaggggccuugcuaaaugacaaacauuccaauggaaccauuaaagacaggagcccauaucgaacccuaaugagcuguccuauuggugaaguucccucuccauacaacucaagauuugagucagucgcuuggucagcaagugcuugucaugauggcaucaauuggcuaacaauuggaauuucuggcccagacaauggggcaguggcuguguuaaaguacaacggcauaauaacagacacuaucaagaguuggagaaacaauauauugagaacacaagagucugaaugugcauguguaaaugguucuugcuuuaccauaaugaccgauggaccaagugauggacaggccucauacaagaucuucagaauagaaaagggaaagauagucaaaucagucgaaaugaaugccccuaauuaucacuaugaggaaugcuccuguuauccugauucuagugaaaucacaugugugugcagggauaacuggcauggcucgaaucgaccgugggugucuuucaaccagaaucuggaauaucagauaggauacauaugcagugggauuuucggagacaauccacgcccuaaugauaagacaggcaguugugguccaguaucgucuaauggagcaaauggaguaaaaggauuuucauucaaauacggcaaugguguuuggauagggagaacuaaaagcauuagcucaagaaaagguuuugagaugauuugggauccaaacggauggacugggacagacaauaacuucucaauaaagcaagauaucguaggaauaaaugaguggucaggauauagcgggaguuuuguucagcauccagaacuaacagggcuggauuguauaagaccuugcuucuggguugaacuaaucagagggcgacccaaagagaacacaaucuggacuagcgggagcagcauauccuuuugugguguaaacagugacacuguggguuggucuuggccagacggugcugaguugccauuuaccauugacaaguaa

SEQ ID NO: 55420 - RNA, 1410 nt, Artificial Sequence
  derived and/or modified CDS sequence (wt) from neuraminidase__InfluenzaA__AGJ73342
augaauccaaaccaaaagauaauaaccauugguucggucuguaugacaauuggaauggcuaacuuaauauuacaaauuggaaacauaaucucaauauggauuagccacucaauucaacuugggaaucaaagucaaauugaaacaugcaaucaaagcgucauuacuuaugaaaacaacacuuggguaaaucagacauauguuaacaucagcaacaccaacuuugcugcuggacagucagugguuuccgugaaauuagcgggcaauuccucucucugcccuguuaguggaugggcuauauacaguaaagacaacaguauaagaaucgguuccaagggggauguguuugucauaagggaaccauucauaucaugcuccccauuggaaugcagaaccuucuucuugacucaaggggccuugcuaaaugacaaacauuccaauggaaccauuaaagacaggagcccauaucgaacccuaaugagcuguccuauuggugaaguucccucuccauacaacucaagauuugagucagucgcuuggucagcaagugcuugucaugauggcaucaauuggcuaacaauuggaauuucuggcccagacaauggggcaguggcuguguuaaaguacaacggcauaauaacagacacuaucaagaguuggagaaacaauauauugagaacacaagagucugaaugugcauguguaaaugguucuugcuuuaccauaaugaccgauggaccaagugauggacaggccucauacaagaucuucagaauagaaaagggaaagauagucaaaucagucgaaaugaaugccccuaauuaucacuaugaggaaugcuccuguuauccugauucuagugaaaucacaugugugugcagggauaacuggcauggcucgaaucgaccgugggugucuuucaaccagaaucuggaauaucagauaggauacauaugcagugggauuuucggagacaauccacgcccuaaugauaagacaggcaguugugguccaguaucgucuaauggagcaaauggaguaaaaggauuuucauucaaauacggcaaugguguuuggauagggagaacuaaaagcauuagcucaagaaaagguuuugagaugauuugggauccaaacggauggacugggacagacaauaacuucucaauaaagcaagauaucguaggaauaaaugaguggucaggauauagcgggaguuuuguucagcauccagaacuaacagggcuggauuguauaagaccuugcuucuggguugaacuaaucagagggcgacccaaagagaacacaaucuggacuagcgggagcagcauauccuuuugugguguaaacaguggcacuguggguuggucuuggccagacggugcugaguugccauuuaccauugacaaguaa

SEQ ID NO: 55421 - RNA, 1410 nt, Artificial Sequence
  derived and/or modified CDS sequence (wt) from neuraminidase__InfluenzaA__AGJ73344
augaauccaaaccaaaagauaauaaccauugguucggucuguaugacaauuggaauggcuaacuuaauauuacaaauuggaaacauaaucucaauauggauuagccacucaauucaacuugggaaucaaaaucagauugaaacaugcaaucaaagcgucauuacuuaugaaaacaacacuuggguaaaucagacauauguuaacaucagcaacaccaacuuugcugcuggacagucagugguuuccgugaaauuagcgggcaauuccucucucugcccuguuaguggaugggcuauauacaguaaagacaacaguauaagaaucgguuccaagggggauguguuugucauaagggaaccauucauaucaugcucccccuuggaaugcagaaccuucuucuugacucaaggggccuugcuaaaugacaaacauuccaauggaaccauuaaagacaggagcccauaucgaacccuaaugagcuguccuauuggugaaguucccucuccauacaacucaagauuugagucagucgcuuggucagcaagugcuugucaugauggcaucaauuggcuaacaauuggaauuucuggcccagacaauggggcaguggcuguguuaaaguacaacggcauaauaacagacacuaucaagaguuggagaaacaauauauugagaacacaagagucugaaugugcauguguaaaugguucuugcuuuaccauaaugaccgauggaccaagugauggacaggccucauacaagaucuucagaauagaaaagggaaagauagucaaaucagucgaaaugaaugccccuaauuaucacuaugaggaaugcuccuguuauccugauucuagugaaaucacaugugugugcagggauaacuggcauggcucgaaucgaccgugggugucuuucaaucagaaucuggaauaucagauaggauacauaugcagugggauuuucggagacaauccacgcccuaaugauaagacaggcaguugugguccaguaucgucuaauggagcaaauggaguaaaaggauuuucauucaaauacggcaaugguguuuggauagggagaacuaaaagcauuaguucaagaaaagguuuugagaugauuugggauccaaacggauggacugggacagacaauaacuucucaauaaagcaagauaucguaggaauaaaugaguggucaggauauagcgggaguuuuguucagcauccagaacuaacagggcuggauuguauaagaccuugcuucuggguugaacuaaucagagggcgacccaaagagaacacaaucuggacuagcgggagcagcauauccuuuugugguguaaacagugacacuguggguuggucuuggccagacggugcugaguugccauuuaccauugacaaguaa

SEQ ID NO: 55422 - RNA, 1410 nt, Artificial Sequence
  derived and/or modified CDS sequence (wt) from neuraminidase__InfluenzaA__AGJ73346
augaauccaaaccaaaagauaauaaccauugguucggucuguaugacaauuggaauggcuaacuuaauauuacaaauuggaaacauaaucucaauauggauuagccacucaauucaacuugggaaucaaaaucagauugaaaaaugcaaucaaagcgucauuacuuaugaaaacaacacuuggguaaaucagacauauguuaacaucagcaacaccaacuuugcugcuggacagucagugguuuccgugaaauuagcgggcaauuccucucucugcccuguuaguggaugggcuauauacaguaaagacaacaguauaagaaucgguuccaagggggauguguuugucauaagggaaccauucauaucaugcucccccuuggaaugcagaaccuucuucuugacucaaggggccuugcuaaaugacaaacauuccaauggaaccauuaaagacaggagcccauaucgaacccuaaugagcuguccuauuggugaaguucccucuccauacaacucaagauuugagucagucgcuuggucagcaagugcuugucaugauggcaucaauuggcuaacaauuggaauuucuggcccagacaauggggcaguggcuguguuaaaguacaacggcauaauaacagacacuaucaagaguuggagaaacaauauauugagaacacaagagucugaaugugcauguguaaaugguucuugcuuuaccauaaugaccgauggaccaagugauggacaggccucauacaagaucuucagaauagaaaagggaaagauagucaaaucagucgaaaugaaugccccuaauuaucacuaugaggaaugcuccuguuauccugauucuagugaaaucacaugugugugcagggauaacuggcauggcucgaaucgaccgugggugucuuucaaccagaaucuggaauaucagauaggauacauaugcagugggauuuucggagacaauccacgcccuaaugauaagacaggcaguugugguccaguaucgucuaauggagcaaauggaguaaaaggauuuucauucaaauacggcaaugguguuuggauagggagaacuaaaagcauuaguucaagaaaagguuuugagaugauuugggauccaaacggauggacugggacagacaauaacuucucaauaaagcaagauaucguaggaauaaaugaguggucaggauauagcgggaguuuuguucagcauccagaacuaacagggcuggauuguauaagaccuugcuucuggguugaacuaaucagagggcgacccaaagagagcacaaucuggacuagcgggagcagcauauccuuuugugguguaaacagugacacuguggguuggucuuggccagacggugcugaguugccauuuaccauugacaaguaa

SEQ ID NO: 55423 - RNA, 1410 nt, Artificial Sequence
  derived and/or modified CDS sequence (wt) from neuraminidase__InfluenzaA__AGJ73348
augaauccaaaccaaaagauaauaaccauugguucggucuguaugacaauuggaauggcuaacuuaauauuacaaauuggaaacauaaucucaauauggauuagccacucaauucaacuugggaaucaaaaucagauugaaacaugcaaucaaagcgucauuacuuaugaaaacaacacuuggguaaaucagacauauguuaacaucagcaacaccaacuuugcugcuggacagucagugauuuccgugaaauuagcgggcaauuccucucucugcccuguuaguggaugggcuauauacaguaaagacaacaguauaagaaucgguuccaagggggauguguuugucauaagggaaccauucauaucaugcucccccuuggaaugcagaaccuucuucuugacucaaggggccuugcuaaaugacaaacauuccaauggaaccauuaaagacaggagcccauaucgaacccuaaugagcuguccuauuggugaaguucccucuccauacaacucaagauuugagucagucgcuuggucagcaagugcuugucaugauggcaucaauuggcuaacaauuggaauuucuggcccagacaauggggcaguggcuguguuaaaguacaacggcauaauaacagacacuaucaagaguuggagaaacaauauauugagaacacaagagucugaaugugcauguguaaaugguucuugcuuuaccauaaugaccgauggaccaagugauggacaggccucauacaagaucuucagaauagaaaagggaaagauagucaaaucagucgaaaugaaugccccuaauuaucacuaugaggaaugcuccuguuauccugauucuagugaaaucacaugugugugcagggauaacuggcauggcucgaaucgaccgugggugucuuucaaccagaaucuggaauaucagauaggauacauaugcagugggauuuucggagacaauccacgcccuaaugauaagacaggcaguugugguccaguaucgucuaauggagcaaauggaguaaaaggauuuucauucaaauacggcaaugguguuuggauagggagaacuaaaagcauuaguucaagaaaagguuuugagaugauuugggauccaaacggauggacugggacagacaauaacuucucaauaaagcaagauaucguaggaauaaaugaguggucaggauauagcgggaguuuuguucagcauccagaacuaacagggcuggauuguauaagaccuugcuucuggguugaacuaaucagagggcgacccaaagagaacacaaucuggacuagcgggagcagcauauccuuuugugguguaaacagugacacuguggguuggucuuggccagacggugcugaguugccauuuaccauugacaaguaa

SEQ ID NO: 55424 - RNA, 1410 nt, Artificial Sequence
  derived and/or modified CDS sequence (wt) from neuraminidase__InfluenzaA__AGJ73350
augaauccaaaccaaaagauaauaaccauugguucggucuguaugacaauuggaauggcuaacuuaauauuacaaauuggaaacauaaucucaauauggauuagccacucaauucaacuugggaaucaaaaucagauugaaacaugcaaucaaagcgucauuacuuaugaaaacaacacuuggguaaaucagacauauguuaacaucagcaacaccaacuuugcugcuggacagucagugguuuccgugaaauuagcgggcaauuccucucucugcccuguuaguggaugggcuauauacaguaaagacaacaguauaagaaucgguuccaagggggauguguuugucauaagggaaccauucauaucaugcucccccuuggaaugcagaaccuucuucuugacucaaggggccuugcuaaaugacgaacauuccaauggaaccauuaaagacaggagcccauaucgaacccuaaugagcuguccuauuggugaaguucccucuccauacaacucaagauuugagucagucgcuuggucagcaagugcuugucaugauggcaucaauuggcuaacaauuggaauuucuggcccagacaauggggcaguggcuguguuaaaguacaacggcauaauaacagacacuaucaagaguuggagaaacaauauauugagaacacaagagucugaaugugcauguguaaaugguucuugcuuuaccauaaugaccgauggaccaagugauggacaggccucauacaagaucuucagaauagaaaagggaaagauagucaaaucagucguaaugaaugccccuaauuaucacuaugaggaaugcuccuguuauccugauucuagugaaaucacaugugugugcagggauaacuggcauggcucgaaucgaccgugggugucuuucaaccagaaucuggaauaucagauaggauacauaugcagugggauuuucggagacaauccacgcccuaaugauaagacaggcaguugugguccaguaucgucuaauggagcaaauggaguaaaaggauuuucauucaaauacggcaaugguguuuggauagggagaacuaaaagcauuaguucaagaaaagguuuugagaugauuugggauccaaacggauggacugggacagacaauaacuucucaauaaagcaagauaucguaggaauaaaugaguggucaggauauagcgggaguuuuguucagcauccagaacuaacagggcuggauuguauaagaccuugcuucuggguugaacuaaucagagggcgacccaaagagaacacaaucuggacuagcgggagcagcauauccuuuugugguguaaacagugacacuguggguuggucuuggccagacggugcugaguugccauuuaccauugacaaguaa

SEQ ID NO: 55425 - RNA, 1410 nt, Artificial Sequence
  derived and/or modified CDS sequence (wt) from neuraminidase__InfluenzaA__AGJ73352
augaauccaaaccaaaagauaauaaccauugguucggucuguaugacaauuggaauggcuaacuuaauauuacaaauuggaaacauaaucucaauauggauuagccacucaauucaacuugggaaucaaagucaaauugaaacaugcaaucaaagcgucauuacuuaugaaaacaacacuuggguaaaucagacauauguuaacaucagcaacaccaacuuugcugcuggacagucagugguuuccgugaaauuagugggcaauuccucucucugcccuguuaguggaugggcuauauacaguaaagacaacaguauaagaaucgguuccaagggggauguguuugucauaagggaaccauucauaucaugcuccccauuggaaugcagaaccuucuucuugacucaaggggccuugcuaaaugacaaacauuccaauggaaccauuaaagacaggagcccauaucgaacccuaaugagcuguccuauuggugaaguucccucuccauacaacucaagauuugagucagucgcuuggucagcaagugcuugucaugauggcaucaauuggcuaacaauuggaauuucuggcccagacaauggggcaguggcuguguuaaaguacaacggcauaauaacagacacuaucaagaguuggagaaacaauauauugagaacacaagagucugaaugugcauguguaaaugguucuugcuuuaccauaaugaccgauggaccaagugauggacaggccucauacaagaucuucagaauagaaaagggaaagauagucaaaucagucgaaaugaaugccccuaauuaucacuaugaggaaugcuccuguuauccugauucuagugaaaucacaugugugugcagggauaacuggcauggcucgaaucgaccgugggugucuuucaaccagaaucuggaauaucagauaggauacauaugcagugggauuuucggagacaguccacgcccuaaugauaagacaggcaguugugguccaguaucgucuaauggagcaaauggaguaaaaggauuuucauucaaauacggcaaugguguuuggauagggagaacuaaaagcauuagcucaagaaaagguuuugagaugauuugggauccaaacggauggacugggacagacaauaacuucucaauaaagcaagauaucguaggaauaaaugaguggucaggauauagcgggaguuuuguucagcauccagaacuaacagggcuggauuguauaagaccuugcuucuggguugaacuaaucagagggcgacccaaagagaacacaaucuggacuagcgggagcagcauauccuuuugugguguaaacagugacacuguggguuggucuuggccagacggugcugaguugccauuuaccauugacaaguaa

SEQ ID NO: 55426 - RNA, 1410 nt, Artificial Sequence; identical to SEQ ID NO: 52817
  derived and/or modified CDS sequence (wt) from neuraminidase__InfluenzaA__AGJ73354

SEQ ID NO: 55427 - RNA, 1410 nt, Artificial Sequence
  derived and/or modified CDS sequence (wt) from neuraminidase__InfluenzaA__AGJ73356
augaauccaaaccaaaagauaauaaccauugguucggucuguaugacaauuggaauggcuaacuuaauauuacaaauuggaaacauaaucucaauauggauuagccacucaauucaacuugggaaucaaagucaaauugaaacaugcaaucaaagcgucauuacuuaugaaaacaacacuuggguaaaucagacauauuuuaacaucagcaacaccaacuuugcugcuggacagucagugguuuccgugaaauuagcgggcaauuccucucucugcccuguuaguggaugggcuauauacaguaaagacaacaguauaagaaucgguuccaagggggauguguuugucauaagggaaccauucauaucaugcuccccauuggaaugcagaaccuucuucuugacucaaggggccuugcuaaaugacaaacauuccaauggaaccauuaaagacaggagcccauaucgaacccuaaugagcuguccuauuggugaaguucccucuccauacaacucaagauuugagucagucgcuuggucagcaagugcuugucaugauggcaucaauuggcuaacaauuggaauuucuggcccagacaauggggcaguggcuguguuaaaguacaacggcauaauaacagacacuaucaagaguuggagaaacaauauauugagaacacaagagucugaaugugcauguguaaaugguucuugcuuuaccauaaugaccgauggaccaagugauggacaggccucauacaagaucuucagaauagaaaagggaaagauagucaaaucagucgaaaugaaugccccuaauuaucacuaugaggaaugcuccuguuauccugauucuagugaaaucacaugugugugcagggauaacuggcauggcucgaaucgaccgugggugucuuucaaccagaaucuggaauaucagauaggauacauaugcagugggauuuucggagacaauccacgcccuaaugauaagacaggcaguugugguccaguaucgucuaauggagcaaauggaguaaaaggauuuucauucaaauacggcaaugguguuuggauagggagaacuaaaagcauuagcucaagaaaagguuuugagaugauuugggauccaaacggauggacugggacagacaauaacuucucaauaaagcaagauaucguaggaauaaaugaguggucaggauauagcgggaguuuuguucagcauccagaacuaacagggcuggauuguauaagaccuugcuucuggguugaacuaaucagagggcgacccaaagagaacacaaucuggacuagcgggagcagcauauccuuuugugguguaaacagugacacuguggguuggucuuggccagacggugcugaguugccauuuaccauugacaaguaa

SEQ ID NO: 55428 - RNA, 1410 nt, Artificial Sequence; identical to SEQ ID NO: 52837
  derived and/or modified CDS sequence (wt) from neuraminidase__InfluenzaA__AGJ73358

SEQ ID NO: 55429 - RNA, 1410 nt, Artificial Sequence
  derived and/or modified CDS sequence (wt) from neuraminidase__InfluenzaA__AGJ73360
augaauccaaaccaaaagauaauaaccauugguucggucuguaugacaauuggaauggcuaacuuaauauuacaaauuggaaacauaaucucaauauggauuagccacucaauucaacuugggaaucaaaaucagauugaaacaugcaaucaaagcgucauuacuuaugaaaacaacacuuggguaaaucagacauauguuaacaucagcaacaccaacuuugcugcuggacagucagugguuuccgugaaauuagcgggcaauuccucucucugcccuguuaguggaugggcuauauacaguaaagacaacaguauaagaaucgguuccaagggggauguguuugucauaagggaaccauucauaucaugcuccccauuggaaugcagaaccuucuucuugacucaaggggccuugcuaaaugacaaacauuccaauggaaccauuaaagacaggagcccauaucgaacccuaaugagcuguccuauuggugaaguucccucuccauacaacucaagauuugagucagucgcuuggucagcaagugcuugucaugauggcaucaauuggcuaacaauuggaauuucuggcccagacaauggggcaguggcuguguuaaaguacaacggcauaauaacagacacuaucaagaguuggagaaacaauauauugagaacacaagagucugaaugugcauguguaaaugguucuugcuuuaccauaaugaccgauggaccaagugauggacaggccucauacaagaucuucagaauagaaaagggaaagauagucaaaucagucgaaaugaaugccccuaauuaucacuaugaggaaugcuccuguuauccugauucuagugaaaucacaugugugugcagggauaacuggcauggcucgaaucgaccgugggugucuuucaaccagaaucuggaauaucagauaggauacauaugcagugggauuuucggagacaauccacgcccuaaugauaagacaggcaguugugguccaguaucgucuaauggagcaaauggaguaaaaggauucucauucaaauacggcaaugguguuuggauagggagaacuaaaagcauuagcucaagaaaagguuuugagaugauuugggauccaaacggauggacugggacagacaauaacuucucaauaaagcaagauaucguaggaauaaaugaguggucaggauauagcgggaguuuuguucagcauccagaacuaacagggcuggauuguauaagaccuugcuucuggguugaacuaaucagagggcgacccaaagagaacacaaucuggacuagcgggagcagcauauccuuuugugguguaaacagugacacuguggguuggucuuggccagacggugcugaguugccauuuaccauugacaaguaa

SEQ ID NO: 55430 - RNA, 1410 nt, Artificial Sequence
  derived and/or modified CDS sequence (wt) from neuraminidase__InfluenzaA__AGJ73362
augaauccaaaccaaaagauaauaaccauugguucggucuguaugacaauuggaauggcuaacuuaauauuacaaauuggaaacauaaucucaauauggauuagccacucaauucaacuugggaaucaaagucaaauugaaacaugcaaucaaagcgucauuacuuaugaaaacaacacuuggguaaaucagacauauguuaacaucagcaacaccaacuuugcugauggacagucagugguuuccgugaaauuagcgggcaauuccucucucugcccuguuaguggaugggcuauauacaguaaagacaacaguauaagaaucgguuccaagggggauguguuugucauaagggaaccauucauaucaugcuccccauuggaaugcagaaccuucuucuugacucaaggggccuugcuaaaugacaaacauuccaauggaaccauuaaagacaggagcccauaucgaacucuaaugagcuguccuauuggugaaguucccucuccauacaacucaagauuugagucagucgcuuggucagcaagugcuugucaugauggcaucaauuggcuaacaauuggaauuucuggcccagacaauggggcaguggcuguguuaaaguacaacggcauaauaacagacacuaucaagaguuggagaaacaauauauugagaacacaagagucugaaugugcauguguaaaugguucuugcuuuaccauaaugaccgauggaccaagugauggacaggccucauacaagaucuucagaauagaaaagggaaagauagucaaaucagucgaaaugaaugccccuaauuaucacuaugaggaaugcuccuguuauccugauucuagugaaaucacaugugugugcagggauaacuggcauggcucgaaucgaccgugggugucuuucaaccagaaucuggaauaucagauaggauacauaugcagugggauuuucggagacaauccacgcccuaaugauaagacaggcaguugugguccaguaucgucuaauggagcaaauggaguaaaaggauuuucauucaaauacggcaaugguguuuggauagggagaacuaaaagcauuagcucaagaaaagguuuugagaugauuugggauccaaacggauggacugggacagacaauaacuucucaauaaagcaagauaucguaggaauaaaugaguggucaggauauagcgggaguuuuguucagcauccagaacuaacagggcuggauuguauaagaccuugcuucuggguugaacuaaucagagggcgacccaaagagaacacaaucuggacuagcgggagcagcauauccuuuugugguguaaacagugacacuguggguuggucuuggccagacggugcugaguugccauuuaccauugacaaguaa

SEQ ID NO: 55431 - RNA, 1410 nt, Artificial Sequence
  derived and/or modified CDS sequence (wt) from neuraminidase__InfluenzaA__AGJ73364
augaauccaaaccaaaagauaauaaccauugguucggucuguaugacaauuggaauggcuaacuuaauauuacaaauuggaaacauaaucucaauauggauuagccacucaauucaacuugggaaucaaaaucagauugaaacaugcaaucaaagcgucauuacuuaugaaaacaacacuuggguaaaucagacauauguuaacaucagcaacaccaacuuugcugcuggacagucagugguuuccgugaaauuagcgggcaauuccucucucugcccuguuaguggaugggcuauauacaguaaagacaacaguauaagaaucgguuccaagggggauguguuugucauaagggaaccauucauaucaugcucccccuuggaaugcagaaccuucuucuugacucaaggggccuugcuaaaugacaaacauuccaauggaaccauuaaagacaggagcccauaucgaacccuaaugagcuguccuauuggugaaguucccucuccauacaacucaagauuugagucagucgcuuggucagcaagugcuugucaugauggcaucaauuggcuaacaauuggaauuucuggcccagacaauggggcaguggcuguguuaaaguacaacggcauaauaacagacacuaucaagaguuggagaaacaauauauugagaacacaagagucugaaugugcauguguaaaugguucuugcuuuaccauaaugaccgauggaccaagugauggacaggccucauacaagaucuucagaauagaaaagggaaagauagucaaaucagucgaaaugaaugccccuaauuaucacuaugaggaaugcuccuguuauccugauucuagugaaaucacaugugugugcagggauaacuggcauggcucgaaucgaccgugggugucuuucaaccagaaucuggaauaucagauaggauacauaugcagugggauuuucggagacaauccacgcccuaaugauaagacaggcaguugugguccaguaucgucuaauggagcaaauggaguaaaaggauuuucauucaaauacggcaaugguguuuggauagggagaacuaaaagcauuaguucaagaaaagguuuugagaugauuugggauccaaacggauggaaugggacagacaauaacuucucaauaaagcaagauaucguaggaauaaaugaguggucaggauauagcgggaguuuuguucagcauccagaacuaacagggcuggauuguauaagaccuugcuucuggguugaacuaaucagagggcgacccaaagagaacacaaucuggacuagcgggagcagcauauccuuuugugguguaaacagugacacuguggguuggucuuggccagacggugcugaguugccauuuaccauugacaaguaa

SEQ ID NO: 55432 - RNA, 1410 nt, Artificial Sequence; identical to SEQ ID NO: 52837
  derived and/or modified CDS sequence (wt) from neuraminidase__InfluenzaA__AGJ73366

SEQ ID NO: 55433 - RNA, 1410 nt, Artificial Sequence; identical to SEQ ID NO: 55414
  derived and/or modified CDS sequence (wt) from neuraminidase__InfluenzaA__AGJ73370

SEQ ID NO: 55434 - RNA, 1410 nt, Artificial Sequence
  derived and/or modified CDS sequence (wt) from neuraminidase__InfluenzaA__AGJ73372
augaauccaaaccaaaagauaauaaccauugguucggucuguaugacaauuggaauggcuaacuuaauauuacaaauuggaaacauaaucucaauauggauuagccacucaauucaacuugggaaucaaaaucaaauugaaacaugcaaucaaagcgucauuacuuaugaaaacaacacuuggguaaaucagacauauguuaacaucagcaacaccaacuuugcugcuggacagucagugguuuccgugaaauuagcgggcaauuccucucucugcccuguuaguggaugggcuauauacaguaaagacaacaguauaagaaucgguuccaagggggauguguuugucauaagggaaccauucauaucaugcuccccauuggaaugcagaaccuucuucuugacucaaggggccuugcuaaaugacaaacauuccaauggaaccauuaaagacaggagcccauaucgaacccuaaugagcuguccuauuggugaaguucccucuccauacaacucaagauuugagucagucgcuuggucagcaagugcuugucaugauggcaucaauuggcuaacaauuggaauuucuggcccagacaauggggcaguggcuguguuaaaguacaacggcauaauaacagacacuaucaagaguuggagaaacaauauauugagaacacaagagucugaaugugcauguguaaaugguucuugcuuuaccauaaugaccgauggaccaagugauggacaggccucauacaagaucuucagaauagaaaagggaaagauagucaaaucagucgaaaugaaugccccuaauuaucacuaugaggaaugcuccuguuauccugauucuagugaaaucacaugugugugcagggauaacuggcauggcucgaaucgaccgugggugucuuucaaccauaaucuggaauaucagauaggauacauaugcagugggauuuucggagacaauccacgcccuaaugauaagacaggcaguugugguccaguaucgucuaauggagcaaauggaguaaaaggauuuucauucaaauacggcaaugguguuuggauagggagaacuaaaagcauuagcucaagaaaagguuuugagaugauuugggauccaaacggauggacugggacagacaauaacuucucaauaaagcaagauaucguaggaauaaaugaguggucaggauauagcgggaguuuuguucagcauccagaacuaacagggcuggauuguauaagaccuugcuucuggguugaacuaaucagagggcgacccaaagagaacacaaucuggacuagcgggagcagcauauccuuuugugguguaaacagugacacuguggguuggucuuggccagacggugcugaguugccauuuaccauugacaaguaa

SEQ ID NO: 55435 - RNA, 1410 nt, Artificial Sequence; identical to SEQ ID NO: 55414
  derived and/or modified CDS sequence (wt) from neuraminidase__InfluenzaA__AGJ73374

SEQ ID NO: 55436 - RNA, 1410 nt, Artificial Sequence
  derived and/or modified CDS sequence (wt) from neuraminidase__InfluenzaA__AGJ73376
augaauccaaaccaaaagauaauaaccauugguucggucuguaugacaauuggaauggcuaacuuaauauuacaaauuggaaacauaaucucaauauggauuagccacucaauucaacuugggaaucaaagucagauugaaacaugcaaucaaagcgucauuacuuaugaaaacaacacuuggguaaaucagacauauguuaacaucagcaacaccaacuuugcugcuggacagucagugguuuccgugaaauuagcgggcaauuccucucucugcccuguuaguggaugggcuauauacaguaaagacaacaguguaagaaucgguuccaagggggauguguuugucauaagggaaccauucauaucaugcucccccuuggaaugcagaaccuucuucuugacucaaggggccuugcuaaaugacaaacauuccaauggaaccauuaaagacaggagcccauaucgaacccuaaugagcuguccuauuggugaaguucccucuccauacaacucaagauuugagucggucgcuuggucagcaagugcuugucaugauggcaucaauuggcuaacaauugggauuucuggcccagacaguggggcaguggcuguauuaaaguacaauggcauaauaacagacacuaucaagaguuggagaaacaauauauugagaacacaagagucugaaugugcauguguaaaugguucuugcuuuaccauaaugaccgauggaccaagugauggacaggccucauacaagauccucagaauagaaaagggaaagauagucaaaucagucgaaaugaaugccccuaauuaucacuaugaggaaugcuccuguuauccugauucuagugaaaucacaugugugugcagggauaacuggcauggcucgaaucgaccgugggugucuuucaaccagaaucuggaauaucagauaggauacauaugcagugggauuuucggagacaauccacgcccuaaugauaagacaggcaguugugguccaguaucgucuaauggagcaaauggaguaaaaggauuuucauucaaauacggcaaugguguuuggauagggagaacuaaaagcauuaguucaagaaaagguuuugagaugauuugggauccaaauggauggacugggacagacaauaacuucucaacaaagcaagauaucguaggaauaaaugaguggucaggauauagcgggaguuuuguucagcauccagaacuaacagggcuggauuguauaagaccuugcuucuggguugaacuaaucagagggcgacccaaagagaacacaaucuggacuagcgggagcagcauauccuuuugugguguaaacagugacacuguggguuggucuuggccagacggugcugaguugccauuuaccauugacaaguaa

SEQ ID NO: 55437 - RNA, 1410 nt, Artificial Sequence
  derived and/or modified CDS sequence (wt) from neuraminidase__InfluenzaA__AGJ73379
augaauccaaaccaaaagauaauaaccauugguucggucuguaugacaauuggaauggcuaacuuaauauuacaaauuggaaacauaaucucaauauggauuagccacucaauucaacuugggaaucaaagucagauugaaacaugcaaucaaagcgucauuacuuaugaaaacaacacuuggguaaaucagacauauguuaacaucagcaacaccaacuuugcugcuggacagucagugguuuccgugaaauuagcgggcaauuccucucucugcccuguuaguggaugggcuauauacaguaaagacaacaguguaagaaucgguuccaagggggauguguuugucauaagggaaccauucauaucaugcucccccuuggaaugcagaaccuucuucuugacucaaggggccuugcuaaaugacaaacauuccaauggaaccauuaaagacaggagcccauaucgaacccuaaugagcuguccuauuggugaaguucccucuccauacaacucaagauuugagucggucgcuuggucagcaagugcuugucaugauggcaucaauuggcuaacaauuggaauuucuggcccagacaguggggcaguggcuguauuaaaguacaauggcauaauaacagacacuaucaagaguuggagaaacaauauauugagaacacaagagucugaaugugcauguguaaaugguucuugcuuuaccauaaugaccgauggaccaagugauggacaggccucauacaagaucuucagaauagaaaagggaaagauagucaaaucagucgaaaugaaugccccuaauuaucacuaugaggaaugcuccuguuauccugauucuagugaaaucacaugugugugcagggauaacuggcauggcucgaaucgaccgugggugucuuucaaccagaaucuggaauaucagauaggauacauaugcagugggauuuucggagacaauccacgcccuaaugauaagacaggcaguugugguccaguaucgucuaauggagcaaauggaguaaaaggauuuucauucaaauacggcaaugguguuuggauagggagaacuaaaagcauuaguucaagaaaagguuuugagaugauuugggauccaaauggauggacugggacagacaauaacuucucaauaaagcaagauaucauaggaauaaaugaguggucaggauauagcgggaguuuuguucagcauccagaacuaacagggcuggauuguauaagaccuugcuucuggguugaacuaaucagagggcgacccaaagagaacacaaucuggacuagcgggagcagcauauccuuuugugguguaaacagugacacuguggguuggucuuggccagacggugcugaguugccauuuaccauugacaaguaa

SEQ ID NO: 55438 - RNA, 1410 nt, Artificial Sequence
  derived and/or modified CDS sequence (wt) from neuraminidase__InfluenzaA__AGJ73381
augaauccaaaccaaaagauaauaaccauugguucggucuguaugacaauuggaauggcuaacuuaauauuacaaauuggaaacauaaucucaauauggauuagccacucaauucaacuugggaaucaaagucagauugaaacaugcaaucaaagcgucauuacuuaugaaaacaacacuuggguaaaucagacauauguuaacaucagcaacaccaacuuugcugcuggacagucagugguuuccgugaaauuagcgggcaauuccucucucugcccuguuaguggaugggcuauauacaguaaagacaacaguguaagaaucgguuccaagggggauguguucgucauaagggaaccauucauaucaugcucccccuuggaaugcagaaccuucuucuugacucaaggggccuugcuaaaugacgaacauuccaauggaaccauuaaagacaggagcccauaucgaacccuaaugagcuguccuauuggugaaguucccucuccauacaacucaagauuugagucggucgcuuggucagcaagugcuugucaugauggcaucaauuggcuaacaauuggaauuucuggcccagacaguggggcaguggcuguauuaaaguacaauggcauaauaacagacacuaucaagaguuggagaaacaauauauugagaacacaagagucugaaugugcauguguaaaugguucuugcuuuaccauaaugaccgauggaccaagugauggacaggccucauacaagaucuucagaauagaaaagggaaagauagucaaaucagucgaaaugaaugccccuaauuaucacuaugaggaaugcuccuguuauccugauucuagugaaaucacaugugugugcagggauaacuggcauggcucgaaucgaccgugggugucuuucaaccagaaucuggaauaucagauaggauacauaugcagugggauuuucggagacaauccacgcccuaaugauaagacaggcaguugugguccaguaucgucuaauggagcaaauggaguaaaaggauuuucauucaaauacggcaaugguguuuggauagggagaacuaaaagcauuaguucaagaaaagguuuugagaugauuugggauccaaauggauggacugggacagacaauaacuucucaauaaagcaagauaucguaggaauaaaugaguggucaggauauagcgggaguuuuguucagcauccagaacuaacagggcuggauuguauaagaccuugcuucuggguugaacuaaucagagggcgacccaaagagaacacaaucuggacuagcgggagcagcauauccuuuugugguguaaacagugacacuguggguuggucuuggccagacggugcugaguugccauuuaccauugacaaguaa

SEQ ID NO: 55439 - RNA, 1410 nt, Artificial Sequence
  derived and/or modified CDS sequence (wt) from neuraminidase__InfluenzaA__AGK62992
augaauccaaaucaaaagauaauaacgauuggcucuguuucucucaccauuuccacaauauguuucuucaugcaaauugccaucuugauaacuacuguaacauugcauuucaagcaauaugaauucaacucccccccaaacaaccaagugaugcugugugaaccaacaauaauagaaagaaacauaacagagauaguguaucugaccaacaccaccauagagaaggaaauaugccccaaaccagcagaauacagaaauuggucaaagccgcaaugugacauuacaggauuugcaccuuuuucuaaggacaauucgauuaggcuuuccgcugguggggacaucugggugacaagagaaccuuaugugucaugcgauccugacaaguguuaucaauuugcccuuggacagggaacaacacuaaacaaugugcauucaaauaacacaguacgugauaggaccccuuaucggacuuuauugaugaaugaguuagguguuccuuuucaucuggggaccaagcaagugugcauagcaugguccagcucaaguugucacgauggaaaagcauggcugcauguuuguauaacgggggaugauaaaaaugcaacugcuagcuucauuuacaaugggaggcuuguagauaguguuguuucaugguccaaagaaauucucaggacccaggagucagaaugcguuuguaucaauggaacuuguacaguaguaaugacugauggaagugcuucaggaaaagcugauacuaaaauacuauucauugaggaggggaaaaucguucauacuagcacauugucaggaagugcucagcaugucgaggagugcucuugcuauccucgauauccuggugucagaugugucugcagagacaacuggaaaggcuccaauaggcccaucguagauauaaacauaaaggaucauagcauugucuccaguuauguguguucaggacuuguuggagacacacccagaaaaaacgacagcuccagcaguagccauuguuuggauccuaacaaugaagaagguggucauggagugaaaggcugggccuuugaugauggaaaugacguguggaugggaagaacaaucaacgagacgucacgcuuaggguaugaaaccuucaaagucauugaaggcugguccaacccuaaguccaaauugcagauaaauaggcaagucauaguugacagaggugauagguccgguuauucugguauuuucucuguugaagucaaaagcugcaucaaucggugcuuuuauguggaguugauaaggggaagaaaagaggaaacugaagucuuguggaccucaaacaguauuguuguguuuuguggcaccucagguacauauggaacaggcucauggccugauggggcggacaucaaucucaugccuauauaa

SEQ ID NO: 55440 - RNA, 1410 nt, Artificial Sequence
  derived and/or modified CDS sequence (wt) from neuraminidase__InfluenzaA__AGK62996
augaauccaaaucaaaagauaauaacgauuggcucuguuucucucaucauuuccacaauauguuucuucaugcaaauugccaucuugauaacuacuguaacauugcauuucaagcaauaugaauucaacucccccccaaacaaccaagugaugcugugugaaccaacaauaauagaaagaaacauaacagagauaguguaucugaccaacaccaccauagagaaggaaauaugccccaaaccagcagaauacagaaauuggucaaagccgcaaugugacauuacaggauuugcaccuuuuucuaaggacaauucgauuaggcuuuccgcugguggggacaucugggugacaagagaaccuuaugugucaugcgauccugacaaguguuaucaauuugcccuuggacagggaacaacacuaaacaaugugcauucaaauaacacaguacgugauaggaccccuuaucggacuuuauugaugaaugaguuagguguuccuuuucaucuggggaccaagcaagugugcauagcaugguccagcucaaguugucacgauggaaaagcauggcugcauguuuguauaacgggggaugauaaaaaugcaacugcuagcuucauuuacaaugggaggcuuguagauaguguuguuucaugguccaaagaaauucucaggacccaggagucagaaugcguuuguaucaauggaacuuguacaguaguaaugacugauggaagugcuucaggaaaagcugauacuaaaauacuauucauugaggagggaaaaaucguucauacuagcacauugucaggaagugcucagcaugucgaggagugcucuugcuauccucgauauccuggugucagaugugucugcagagacaacuggaaaggcuccaauaggcccaucguagauauaaacauaaaggaucauagcauugucuccaguuauguguguucagggcuuguuggagacacacccagaaaaaacgacagcuccagcaguagccauuguuuggauccuaacaaugaagaagguggucauggagugaaaggcugggccuuugaugauggaaaugacguguggaugggaagaacaaucaacgagacgucacgcuuaggguaugaaaccuucaaagucauugaaggcugguccaacccuaaguccaaauugcagauaaauaggcaagucauaguugacagaggugauagguccgguuauucugguauuuucucuguugaaagcaaaagcugcaucaaucggugcuuuuauguggaauugauuaggggaagaaaagaggaaacugaagucuuguggaccucaaacaguauuguuguguuuuguggcaccucagguacauauggaacaggcucauggccugauggggcggacaucaaucucaugccuauauaa

SEQ ID NO: 55441 - RNA, 1410 nt, Artificial Sequence
  derived and/or modified CDS sequence (wt) from neuraminidase__InfluenzaA__AGK62998
augaauccaaaucaaaagauaauaacgauuggcucuguuucucucaccauugccacaauaugcuucuucaugcaaauugccaucuugauaacuacuguaacauugcauuucaagcaaugugaauucaacucccccccaaacaaccaagugaugcugugugaaccaacaauaauagaaagaaacauaacagagauaguguaucugaccaacaccaccauagagaaggaaauaugccccaaacuagcagaauacagaaauuggucaaagccgcagugugacauuacaggauuugcaccuuuuucuaaggacaauucgauuaggcuuuccgcugguggggacaucugggugacaagggaaccuuaugugucaugcgauccugacaaguguuaucaauuugcccuugggcagggaacaacacuaaacaacgugcauucaaauaacacaguacgugauaggaccccuuaucggacccuauugaugaaugaguuagguguaccuuuucaucuggggaccaagcaagugugcauggcaugguccagcucaaguugucacgauggaaaagcauggcugcauguuuguauaacgggggaugauaaaaaugcaacugcuagcuucauuuacaaugggaggcuuguagauaguguuguuucaugguccaaagaaauccucaggacccaggagucagaaugcguuuguaucaaugggacuuguacaguaguaaugacugaugggagugcuucaggaaaagcugauacuaaaauacuauucauugaggaggggaaaaucguucauacuagcacauugucaggaagugcucagcaugucgaggagugcucuugcuauccucgauauccuggugucagaugugucugcagagacaacuggaaaggauccaauaggcccaucguagauauaaacauaaaggaucauagcauugucuccaguuauguguguucaggacuucuuggagacacacccagaaaaaacgacagcuccagcaguagccauuguuuggauccuaacaaugaagaagguggucauggagugaaaggcugggccuuugaugauggaaaugacguguggaugggaagaacgaucagcgagaagucacgcuuaggguaugaaaccuucaaagucauugaaggcugguccaacccuaaguccaaauugcagauaaauaggcaagucauaguugacagaggugauagguccgguuauucugguauuuucucuguugaaagcaaaagcugcaucaaucggugcuuuuauguggaguugauaaggggaagaaaagaggaaacugaagucuuguggaccucaaacaguauuguuguguuuuguggcaccucagguacauauggaacaggcucauggccugauggggcggacaucaaucucaugccuauauaa

SEQ ID NO: 55442 - RNA, 1410 nt, Artificial Sequence
  derived and/or modified CDS sequence (wt) from neuraminidase__InfluenzaA__AGK63000
augaauccaaaucaaaagauaauaacgauuggcucuguuucucucaccauugccacaauauguuucuucaugcaaauugccaucuugauaacuacuguaacauugcauuucaagcaaugugauuucaacucccccccaaacaaccaagugaugcugugugaaccaacaauaauagaaagaaacauaacagagauaguguaucugaccaacaccaccauagagaaggaaauaugccccaaacuagcagaauacagaaauuggucaaagccgcaaugugacauuacaggauuugcaccuuuuucuaaggacaauucgauuaggcuuuccgcugguggggacaucugggugacaagggaaccuuaugugucaugcgauccugacaaguguuaucaauuugcccuuggacagggaacaacacuaaacaacgugcauucaaauaacacaguacgugauaggaccccuuaucggacccuauugaugaaugaguuagguguaccuuuucaucuggggaccaagcaagugugcauggcaugguccagcucaaguugucacgauggaaaagcauggcugcauguuuguauaacgggggaugauaaaaaugcaacugcuagcuucauuuacaaugggaagcuuguagauaguguugucucaugguccaaagaaauccucaggacccaggagucagaaugcguuuguaucaaugggacuuguacaguaguaaugacugaugggagugcuucaggaaaagcugauacuaaaauacuauucauugaggaggggaaaaucguucauacuagcacauugucaggaagugcucagcaugucgaggagugcucuugcuauccucgauauccuggugucagaugugucugcagagacaacuggaaaggcuccaauaggcccauuguagauauaaacauaaaggaucauagcauuguuuccaguuauguguguucaggacuuguuggagacacacccagaaaaaacgacagcuccagcaguagccauuguuuggauccuaacaaugaagaagguggucauggagugaaaggcugggccuuugaugauggaaaugacguguggaugggaagaacgaucaacgagacgucacguuuaggguaugaaaccuucaaagucauugaaggcugguccaacccuaaguccaaauugcagauaaauaggcaagucauaguugacagaggugauagguccgguuauucugguauuuucucuguugaaggcaaaagcugcaucaaucggugcuuuuauguggaauugauuaggggaagaaaagaggaaacugaagucuuguggaccucaaacaguauuguuguguuuuguggcaccucagguacauauggaacaggcucauggccugauggggcggacaucaaucucaugccuauauaa

SEQ ID NO: 55443 - RNA, 1410 nt, Artificial Sequence
  derived and/or modified CDS sequence (wt) from neuraminidase__InfluenzaA__AGK63002
augaauccaaaucaaaagauaauaacgauuggcucuguuucucucaccauuuccacaauaugcuucuucaugcaaauugccaucuugaugacuacuguaacauugcauuucaagcaaugugaauucaacucccccccaaacaaccaagugaugcugugugaaccaacaauaauagaaagaaacauaacagagauaguguaucugaccaacaccaccauagagaaggaaauaugccccaaacuagcagaauacagaaauuggucaaagccgcaaugugacauuacaggauuugcaccuuuuucuaaggacaauucgauuaggcuuuccgcugguggggacaucugggugacaagagaaccuuaugugucaugcgauccugacaaguguuaucaauuugcccuuggacagggaacaacacuaaacaacgugcauucaaauaacacaguacgugauaggaccccuuaucggacccuauugaugaaugaguuagguguuccuuuucaucuggggaccaagcaagugugcauggcaugguccagcucaaguugucacgauggaaaagcauggcugcauguuuguauaacggggaaugauaaaaaugcaacugcuagcuucauuuacaaugggaggcuuguagauaguguuguuucaugguccaaagaaauccucaggacccaggagucagaaugcguuuguaucaauggaacuuguacaguaguaaugacugaugggagugcuucaggaaaagcugauacuaaaauauuauucauugaggaggggaaaaucguucauacuagcacauugucaggaagugcucagcaugucgaggagugcucuugcuauccucgauauccuggugucagaugugucugcagagacaacuggaaaggauccaauaggcccauuguagauauaaacauaaaggaucauagcauuguuuccaguuauguauguucaggacuuguuggagacacacccagaaaaaacgacagcuccagcaguagccauuguuuggauccuaacaaugaagaagguggucauggagugaaaggcugggccuuugaugauggaaaugacguguggaugggaagaacgaucaccgagacgucacgcuuaggguaugaaaccuucaaagucauugaaggcugguccaacccuaaguccaaauugcagauaaauaggcaagucauaguugacagaggugauagguccgguuauucugguauuuucucuguugaaggcaaaagcugcaucaaucggugcuuuuauguggaauugauaaggggaagaaaagaggaaacugaagucuuguggaccucaaacaguauuguuguguuuuguggcaccucagguacauauggaacaggcucauggccugauggggcggacaucaaucucaugccuauauaa

SEQ ID NO: 55444 - RNA, 1410 nt, Artificial Sequence
  derived and/or modified CDS sequence (wt) from neuraminidase__InfluenzaA__AGK63004
augaauccaaaucaaaagauaauaacaauuggcucuguuucucucaccauuuccacaauaugcuucuucaugcaaauugccaucuugauaacuacuguaacauugcauuucaagcaauaugaauucaacucccccccaaacaaccaagugaugcugugugaaccaacaauaauagaaagaaacauaacagagauaguguaucugaccaacaccaccauagagaaggaaauaugccccaaaccagcagaauacagaaauuggucaaaaccgcaaugugacauuacaggauuugcaccuuuuucuaaggacaauucgauuaggcuuuccgcugguggggacaucugggugacaagagaaccuuaugugucaugcgauccugacaaguguuaucaauuugcccuuggacagggaacaacacuaaacaaugugcauucaaauaacacaguacgugauaggaccccuuaucggacuuuauugaugaaugaguuagguguuccuuuucaucuggggaccaagcaagugugcauagcaugguccagcucaaguugucacgauggaaaagcauggcugcauguuuguauaacgggggaugauaaaaaugcaacugcuagcuucauuuacaaugggaggcuuguagauaguguuguuucaugguccaaagaaauucucaggacccaggagucagaaugcguuuguaucaauggaacuuguacaguaguaaugacugauggaagugcuucaggaaaagcugauacuaaaauacuauucauugaggagggaaaaaucguucauacuagcacauugucaggaaguucucagcaugucgaggagugcucuugcuauccucgauauccuggugucagaugugucugcagagacaacuggaaaggcuccaauaggcccaucguagauauaaacauaaaggaucauagcauugucuccaguuauguguguucaggacuuguuggagacacacccagaaaaaacgacagcuccagcaguagccauuguuuggauccuaacaaugaagaagguggucauggagugaaaggcugggccuuugaugauggaaaugacguguggaugggaagaacaaucaacgagacgucacguuuaggguaugaaaccuucaaagucauugaaggcugguccaacccuaaguccaaauugcagauaaauaggcaagucauaguugacagaggugauagguccgguuauucugguauuuucucuguugaaggcaaaagcugcaucaaucggugcuuuuauguggaauugauuaggggaagaaaagaggaaacugaagucuuguggaccucaaacaguauuguuguguuuuguggcaccucagguacauauggaacaggcucauggccugauggggcggacaucaaucucaugccuauauaa

SEQ ID NO: 55445 - RNA, 1410 nt, Artificial Sequence
  derived and/or modified CDS sequence (wt) from neuraminidase__InfluenzaA__AGK63006
augaauccaaaucaaaagauaauaacgauuggcucuguuucucucaccauugccacaauaugcuucuucaugcaaauugccauccugauaacuacuguaacauugcauuucaagcaauaugaauucaacucccccccaaacaaccaagugaugcugugugaaccaacaauaauagaaagaaacauaacagagauaguguaucugaccaacaccaccauagagaaggaaauaugccccaaaccagcagaauacagaaauuggucaaagccgcaaugugacauuacaggauuugcaccuuuuucuaaggacaauucgauuaggcuuuccgcugguggggacaucugggugacaagagaaccuuaugugucaugcgauccugacaaguguuaucaauuugcccuugggcagggaacaacacuaaacaacgugcauucaaauaacacaguacgugauaggaccccuuaucggacuuuauugaugaaugaguuagguguuccuuuucaucuggggaccaagcaagugugcauagcaugguccagcucaaguugucacgauggaaaagcauggcugcauguuuguauaacgggggaugauaaaaaugcaacugcuagcuucauuuacaaugggaggcuuguagauaguguuguuucaugguccaaagaaauccucaggacccaggagucagaaugcguuuguaucaauggaaccuguacaguaguaaugacugauggaagugcuucagcaaaagcugauacuaaaauacuauucauugaggaggggaaaaucguucauacuagcacauugucaggaagugcucagcaugucgaggagugcucuugcuauccucgauauucuggugucagaugugucugcagagacaacuggaaaggcuccaauaggcccaucguagauauaaacauaaaggaucauagcauugucuccaguuauguguguucaggacuuguuggagacacacccagaaaaaacgacagcuccagcaguagccauuguuuggauccuaacaaugaagaagguggucauggagugaaaggcugggccuuugaugauggaaaugacguguggaugggaagaacaaucaacgagacgucacgcuuaggguaugaaaccuucaaagucauugaaggcugguccaacccuaagucccaauugcagauaaauaggcaagucauaguugacagaggugauagguccgguuauucugguauuuucucuguugaaagcaaaagcugcaucaaucggugcuuuuauguggaguugauaaggggaagaaaagaggaaacugaagucuuguggaccucaaacaguauuguuguguuuuguggcaccucagguacauauggaacaggcucauggccugauggggcggacaucaaucucaugccuauauaa

SEQ ID NO: 55446 - RNA, 1410 nt, Artificial Sequence
  derived and/or modified CDS sequence (wt) from neuraminidase__InfluenzaA__AGK63008
augaauccaaaucaaaagauaauaacgauuggcucuguuucucucaccauugccacaauauguuucuucaugcaaauugccaucuugauaacuacuguaacauugcauuucaagcaaugugaauucaacucccccccaaacaaccaagugaugcugugugaaccaacaauaauagaaagaaacauaacagagauaguguaucugaccaacaccaccauagagaaggaaauaugccccaaacuagcagaauacagaaauuggucaaagccgcaaugugacauuacaggauuugcaccuuuuucuaaggacaauucgauuaggcuuuccgcugguggggacaucugggugacaagggaaccuuaugugucaugcgauccugacaaguguuaucaauuugcccuuggacagggaacaacacuaaacaacgugcauucaaauaacacaguacgugauaggaccccuuaucggacccuauugaugaaugaguuagguguaccuuuucaucuggggaccaagcaagugugcauggcaugguccagcucaaguugucacgauggaaaagcauggcugcauguuuguauaacgggggaugauaaaaaugcaacugcuagcuucauuuacaaugggaagcuuguagauaguguugucucaugguccaaagaaauccucaggacccaggagucagaaugcguuuguaucaaugggacuuguacaguaguaaugacugaugggagugcuucaggaaaagcugauacuaaaauacuauucauugaggaggggaaaaucguucauacuagcacauugucaggaagugcucagcaugucgaggagugcucuugcuacccucgauauccuggugucagaugugucugcagagacaacuggaaaggcuccaauaggcccauuguagauauaaacauaaaggaucauagcauuguuuccaguuauguguguucaggacuuguuggagacacacccagaaaaaacgacagcuccagcaguagccauuguuuggauccuaacaaugaagaagguggucauggagugaaaggcugggccuuugaugauggaaaugacguguggaugggaagaacgaucaacgagacgucacguuuaggguaugaaaccuucaaagucauugaaggcugguccaacccuaaguccaaauugcagaugaauaggcaagucauaguugacagaggugauagguccgguuauucugguauuuucucuguugaaggcaaaagcugcaucaaucggugcuuuuauguggaauugauuaggggaagaaaagaggaaacugaagucuuguggaccucaaacaguauuguuguguuuuguggcaccucagguacauauggaacaggcucauggccugauggggcggacaucaaucucaugccuauauaa

SEQ ID NO: 55447 - RNA, 1410 nt, Artificial Sequence
  derived and/or modified CDS sequence (wt) from neuraminidase__InfluenzaA__AGK63010
augaauccaaaucaaaagauaauaacaauuggcucuguuucucucaccauugccacaauauguuucuucaugcaaauugccaucuugauaacuacuguaacauugcauuucaagcaaugugaauucaacucccccccaaacaaccaagugaugcugugugaaccaacaauaauagaaagaaacauaacagagauaguguaucugaccaacaccaccauagagaaggaaauaugccccaaacuagcagaauacagaaauuggucaaagccgcaaugugacauuacaggauuugcaccuuuuucuaaggacaauucgauuaggcuuuccgcugguggggacaucugggugacaagggaaccuuaugugucaugcgauccugacaaguguuaucaauuugcccuuggacagggaacaacacuaaacaacgugcauucaaauaacacaguacgugauaggaccccuuaucggacccuauugaugaaugaguuagguguaccuuuucaucuggggaccaagcaagugugcauggcaugguccagcucaaguugucacgauggaaaagcauggcugcauguuuguauaacgggggaugauaagaaugcaacugcuagcuucauuuacaaugggaagcuuguagauaguguugucucaugguccaaagaaauccucaggacccaggagucagaaugcguuuguaucaaugggacuuguacaguaguaaugacugaugggagugcuucaggaaaagcugauacuaaaauacuauucauugaggaggggaaaaucguucauacuagcacauugucaggaagugcucagcaugucgaggagugcucuugcuacccucgauauccuggugucagaugugucugcagagacaacuggaaaggcuccaauaggcccauuguagauauaaacauaaaggaucauagcauuguuuccaguuauguguguucaggacuuguuggagacacacccagaaaaaacgacagcuccagcaguagucauuguuuggauccuaacaaugaagaagguggucauggagugaaaggcugggccuuugaugauggaaaugacguguggaugggaagaacgaucaacgagacgucacguuuaggguaugaaaccuucaaagucauugaaggcugguccgacccuaaguccaaauugcagauaaauaggcaagucauaguugacagaggugauagguccgguuauucugguauuuucucuguugaaggcaaaagcugcaucaaucggugcuuuuauguggaauugauuaggggaagaaaagaggaaacugaagucuuguggaccucaaacaguauuguuguguuuuguggcaccucagguacauauggaacaggcucauggccugauggggcggacaucaaucucaugccuauauaa

SEQ ID NO: 55448 - RNA, 1410 nt, Artificial Sequence
  derived and/or modified CDS sequence (wt) from neuraminidase__InfluenzaA__AGK63012
augaauccaaaucaaaagauaauaacgauuggcucuguuucucucaccauuuccacaauaugcuucuucaugcaaauugccaucuugauaacuacuguaacauugcauuucaagcaauaugaauucaacucccccccaaacaaccaagugaugcugugugaaccaacaauaauagaaagaaacauaacagagauaguguaucugaccaacaccaccauagagaaggaaauaugccccaaaccagcagaauacagaaauuggucaaaaccgcaaugugacauuacaggauuugcaccuuuuucuaaggacaauucgauuaggcuuuccgcugguggggacaucugggugacaagagaaccuuaugugucaugcgauccugacaaguguuaucaauuugcccuuggacagggaacaacacuaaacaaugugcauucaaauaacacaguacgugauaggaccccuuaucggacuuuauugaugaaugaguuagguguuccuuuucaucuggggaccaagcaagugugcauagcaugguccagcucaaguugucacgauggaaaagcauggcugcauguuuguauaacgggggaugauaaaaaugcaacugcuagcuucauuuacaaugggaggcuuguagauaguguuguuucaugguccaaagaaauucucaggacccaggagucagaaugcguuuguaucaauggaacuuguacaguaguaaugacugauggaagugcuucaggaaaagcugauacuaaaauacuauucauugaggagggaaaaaucguucauacuagcacauugucaggaagugcucagcaugucgaggagugcucuugcuauccucgauauccuggugucagaugugucugcagagacaacuggaaaggcuccaauaggcccaucguagauauaaacauaaaggaucauagcauugucuccaguuauguguguucaggacuuguuggagacacacccagaaaaaacgacagcuccagcaguagucauuguuuggauccuaacaaugaagaagguggucauggagugaaaggcugggccuuugaugauggaaaugacguguggaugggaagaacaaucaacgagacgucacgcuuaggguaugaaaccuucaaagucauugaaggcugguccaacccuaaguccaaauugcagauaaauaggcaagucauaguugacagagguuauagguccgguuauucugguauuuucucuguugaaggcaaaagcugcaucaaucggugcuuuuauguggacuugauuaggggaagaaaagaggaaacugaagucuuguggaccucaaacaguauuguuguguuuuguggcaccucagguacauauggaacaggcucauggccugauggggcggacaucaaucucaugccuauauaa

SEQ ID NO: 55449 - RNA, 1410 nt, Artificial Sequence
  derived and/or modified CDS sequence (wt) from neuraminidase__InfluenzaA__AGK63014
augaauccaaaucaaaagauaauaacgauuggcucuguuucucucaccauuuccacaauauguuucuucaugcaaauugccaucuugauaacuacuguaacauugcauuucaagcaauaugaauucaacucccccccaaacaaccaagugaugcugugugaaccaacaauaauagaaagaaacauaacagagauaguguaucugaccaacaccaccauagagaaggaaauaugccccaaaccagcagaauacagaaauuggucaaaaccgcaaugugacauuacaggauuugcaccuuuuucuaaggacaauucgauuaggcuuuccgcugguggggacaucugggugacaagagaaccuuaugugucaugcgauccugacaaguguuaucaauuugcccuuggacagggaacaacacuaaacaacgugcauucaaauaacacaguacgugauaggaccccuuaucggacuuuauugaugaaugaguuagguguuccuuuuccucuggggaccaagcaagugugcauagcaugguccagcucaaguugucacgauggaaaagcauggcugcauguuuguauaacgggggaugauaaaaaugcaacugcuagcuucauuuacaaugggaggcuuguagauaguguuguuucaugguccaaagaaauccacaggacccaggagucagaaugcguguguaucaauggaacuuguacaguaguaaugacugauggaagugcuucaggaaaagcugauacuaaaauacuauucauugaggaggggaaaaucguucauacuagcacauugucaggaagugcucagcaugucgaggagugcucuugcuauccucgauauccuggugucagaugugucugcagagacaacuggaaaggcuccaauaggcccaucguugauauaaacauaaaggaucauagcauugucuccaguuauguguguucuggacuuguuggagacacacccagaaaaaacgacagcuccagcaguagccauuguuuggauccuaacaaugaagaagguggucauggagugaaaggcugggccuuugaugauggaaaugacguguggaugggaagaacgaucagcgagaagucacgcuuaggguaugaaaccuucaaagucauugaaggcugguccaacccuaaguccaaauugcagauaaauaggcaagucauaguugacagagguaauagguccgguuauucugguauuuucucuguugaaggcaaaagcugcaucaaucggugcuuuuauguggaguugauaaggggaagaaaagaagaaacugaagucuuguggaccucaaacaguauuguuguguuuuguggcaccucagguacauauggaacaggcucauggccugauggggcggacaucaaucucaugccuauauaa

SEQ ID NO: 55450 - RNA, 1410 nt, Artificial Sequence
  derived and/or modified CDS sequence (wt) from neuraminidase__InfluenzaA__AGK63018
augaauccaaaucaaaagauaauaacgauuggcucuguuucucucaccauuuccacaauaugcuucuucaugcaaauugccaucuugauaacuacuguaacauugcauuucaagcaaugugaauucaacucccccccaaacaaccaagugaugcugugugaaccaacaauaauagaaagaaacauaacagagauaguguaucugaccaacaccaccauagagaaggaaauaugccccaaacuagcagaauacagaaauuggucaaagccgcaaugugacauuacaggauuugcaccuuuuucuaaggacaauucgauuaggcuuuccgcugguggggacaucugggugacaagggaaccuuaugugucaugcgauccugacaaguguuaucaauuugcccuuggacagggaacaacacuaaacaacgugcauucaaauaacacaguacgugauaggaccccuuaucggacccuauugaugaaugaguuagguguaccuuuucaucuggggaccaagcaagugugcauggcaugguccagcucaaguugucacgauggaaaagcauggcugcauguuuguauaacgggggaugauaaaaaugcaacugcuagcuucauuuacaaugggaagcuuguagauaguguugucucaugguccaaagaaauccucaggacccaggagucagaaugcguuuguaucaaugggacuuguacaguaguaaugacugaugggagugcuucaggaaaagcugauacuaaaauacuauucauugaggaggggaaaaucguucauacuagcacauugucaggaagugcucagcaugucgaggagugcucuugcuacccucgauauccuggugucagaugugucugcagagacaacuggaaaggcuccaauaggcccauuguagauauaaacauaaaggaucauagcauuguuuccaguuauguguguucaggacuuguuggagacacacccagaaaaaacgacagcuccagcaguagucauuguuuggauccuaacaaugaagaagguggucauggagugaaaggcugggccuuugaugauggaaaugacguguggaugggaagaacgaucaacgagacgucacguuuaggguaugaaaccuucaaagucauugaaggcugguccaacccuaaguccaaauugcagauaaauaggcaagucauaguugacagaggugauagguccgguuauucugguauuuucucuguugaaggcaaaagcugcaucaaucggugcuuuuauguggaauugauuaggggaagaaaagaggaaacugaagucuuguggaccucaaacaguauuguuguguuuuguggcaccucagguacauauggaacaggcucauggccugauggggcggacaucaaucucaugccuauauaa

SEQ ID NO: 55451 - RNA, 1410 nt, Artificial Sequence
  derived and/or modified CDS sequence (wt) from neuraminidase__InfluenzaA__AGK63020
augaauccaaaucaaaagauaauaacgauuggcucuguuucucucaccauuuccacaauaugcuucuucaugcaaauugccauccugauaacuacuguaacauugcauuucaagcaauaugaauucaacucccccccaaacaaccaagugaugcugugugaaccaacaauaauagaaagaaacauaacagagauaguguaucugaccaacaccaccauagagaaggaaauaugccccaaaccagcagaauacagaaauuggucaaagccgcaaugugacauuacaggauuugcaccuuuuucuaaggacaauucgauuaggcuuuccgcugguggggacaucugggugacaagagaaccuuaugugucaugcgauccugacaaguguuaucaauuugcccuuggacagggaacaacacuaaacaacgugcauucaaauaacacaguacgugauaggaccccuuaucggacucuauugaugaaugaguuagguguuccuuuucaucuggggaccaagcaagugugcauagcaugguccagcucaaguugucacgauggaaaagcauggcugcauguuuguauaacgggggaugauaaaaaugcaacugcuagcuucauuuacaaugggaggcuuguagauaguguuguuucaugguccaaagaaauucucaggacccaggagucagaaugcguuuguaucaauggaacuuguacaguaguaaugacugauggaagugcuucaggaaaagcugauacuaaaauacuauucauugaggaggggaaaaucguucauacuagcacauugucaggaagugcucagcaugucgaggagugcucuugcuauccucgauauccuggugucagaugugucugcagagacaacuggaaaggcuccaauaggcccaucguagauauaaacauaaaggaucauagcauuguuuccaguuauguguguucaggacuuguuggagacacacccagaaaaaacgacagcuccagcaguagccauuguuuggauccuaacaaugaagaagguggucauggagugaaaggcugggccuuugaugauggaaaugacguguggaugggaagaacaaucaacgagacgucacguuuaggguaugaaaccuucaaagucauugaaggcugguccaacccuaaguccaaauugcagauaaauaggcaagucauaguugacagaggugauagguccgguuauucugguauuuucucuguugaaggcaaaaguugcaucaaucggugcuuuuauguggaguugauuaggggaagaaaagaggaaacugaagucuuguggaccucaaacaguauuguuguguuuuguggcaccucagguacauauggaacaggcucauggccugauggggcggacaucaaucucaugccuauauaa

SEQ ID NO: 55452 - RNA, 1410 nt, Artificial Sequence
  derived and/or modified CDS sequence (wt) from neuraminidase__InfluenzaA__AGK63022
augaauccaaaucaaaagauaauaacgauuggcucuguuucucucaccauuuccacaauaugcuucuucaugcaaauugccaucuugauaacuacuguaacauugcauuucaagcaaugugaauucaacucccccccaaacaaccaagugaugcugugugaaccaacaauaauagaaagaaacauaacagagauaguguaucugaccaacaccaccauagagaaggaaauaugccccaaacuagcagaauacagaaauuggucaaagccgcaaugugacauuacaggauuugcaccuuuuucuaaggacaauucgauuaggcuuuccgcugguggggacaucugggugacaagggaaccuuaugugucaugcgauccugacaaguguuaucaauuugcccuuggacagggaacaacacuaaacaacgugcauucaaauaacacaguacgugauaggaccccuuaucggacccuauugaugaaugaguuagguguaccuuuucaucuggggaccaagcaagugugcauggcaugguccagcucaaguugucacgauggaaaagcauggcugcauguuuguauaacgggggaugauaaaaaugcaacugcuagcuucauuuacaaugggaagcuuguagauaguguugucucaugguccaaagaaauccucaggacccaggagucagaaugcguuuguaucaaugggacuuguacaguaguaaugacugaugggagugcuucaggaaaagcugauacuaaaauacuauucauugaggaggggaaaaucguucauacuagcacauugucaggaagugcucagcaugucgaggagugcucuugcuauccucgauauccuggugucagaugugucugcagagacaacuggaaaggcuccaauaggcccauuguagauauaaacauaaaggaucauagcauuguuuccaguuauguguguucaggacuuguuggagacacacccagaaaaaacgacagcuccagcaguagccauuguuuggauccuaacaaugaagaagguggucauggagugaaaggcugggccuuugaugauggaaaugacguguggaugggaagaacgaucaacgagacgucacguuuaggguaugaaaccuucaaagucauugaaggcugguccaacccuaaguccaaauugcagauaaauaggcaagucauaguugacagaggugauagguccgguuauucugguauuuucucuguugaaggcaaaagcugcaucaaucggugcuuuuauguggacuugauuaggggaagaaaagaggaaacugaagucuuguggaccucaaacaguauuguuguguuuuguggcaccucagguacauauggaacaggcucauggccugauggggcggacaucaaucucaugccuauauaa

SEQ ID NO: 55453 - RNA, 1410 nt, Artificial Sequence
  derived and/or modified CDS sequence (wt) from neuraminidase__InfluenzaA__AGK63024
augaauccaaaucaaaagauaauaacgauuggcucuguuucucucaccauuuccacaauaugcuucuucaugcaaauugccaucuugauaacuacuguaacauugcauuucaagcaauaugaauucaacucccccccaaacaaccaagugaugcugugugaaccaacaauaauagaaagaaacauaacagagauaguguaucugaccaacaccaccauagagaaggaaauaugccccaaaccagcagaauacagaaauuggucaaaaccgcaaugugacauuacaggauuugcaccuuuuucuaaggacaauucgauuaggcuuuccgcugguggggacaucugggugacaagagaaccuuaugugucaugcgauccugacaaguguuaucaauuugcccuuggacagggaacaacacuaaacaaugugcauucaaauaacacaguacgugauaggaccccuuaucggacuuuauugaugaaugaguuagguguuccuuuucaucuggggaccaagcaagugugcauagcaugguccagcucaaguugucacgauggaaaagcauggcugcauguuuguauaacgggggaugauaaaaaugcaacugcuagcuucauuuacaaugggaggcuuguagauaguguuguuucaugguccaaagaaauucucaggacccaggagucagaaugcguuuguaucaauggaacuuguacaguaguaaugacugauggaagugcuucaggaaaagcugauacuaaaauacuauucauugaggagggaaaaaucguucauacuagcacauugucaggaagugcucagcaugucgaggagugcucuugcuauccucgauauccuggugucagaugugucugcagagacaacuggaaaggcuccaauaggcccaucguagauauaaacauaaaggaucauagcauugucuccaguuauguguguucaggacuuguuggagacacacccagaaaaaacgacagcuccagcaguagccauuguuuggauccuaacaaugaagaagguggucauggagugaaaggcugggccuuugaugauggaaaugacguguggaugggaagaacaaucaacgagacgucacgcuuaggguaugaaaccuucaaagucauugaaggcugguccaacccuaaguccaaauugcagauaaauaggcaagucauaguugacagaggugauagguccgguuauucugguauuuucucuguugaaggcaaaagcugcaucaaucggugcuuuuauguggaauugauuaggggaagaaaagaggaaacugaagucuuguggaccucaaacaguauuguuguguuuuguggcaccucagguacauauggaacaggcucauggccugauggggcggacaucaaucucaugccuauauaa

SEQ ID NO: 55454 - RNA, 1410 nt, Artificial Sequence
  derived and/or modified CDS sequence (wt) from neuraminidase__InfluenzaA__AGK63026
augaauccaaaucaaaagauaauaacuauuggcucuguuucucucaccauuuccacaauauguuucuucaugcaaauugccaucuugauaacuacuguaacauugcauuucaagcaauaugaauucaacucccccccaaacaaccaagugaugcugugugaaccaacaauaauagaaagaaacauaacagagauaguguaucugaccaacaccaccauagagaaggaaauaugccccaaaccagcagaauacagaaauuggucaaaaccgcaaugugacauuacaggauuugcaccuuuuucuaaggacaauucgauuaggcuuuccgcugguggggacaucugggugacaagagaaccuuaugugucaugcgauccugacaaguguuaucaauuugcccuuggacagggaacaacacuaaacaaugugcauucaaauaacacaguacgugauaggaccccuuaucggacuuuauugaugaaugaguuagguguuccuuuucaucuggggaccaagcaagugugcauagcaugguccagcucaaguugucacgauggaaaagcauggcugcauguuuguauaacgggggaugauaaaaaugcaacugcuagcuucauuuacaaugggaggcuuguagauaguguuguuucaugguccaaagaaauucucaggacccaggagucagaaugcguuuguaucaauggaacuuguacaguaguaaugacugauggaagugcuucaggaaaagcugauacuaaaauacuauucauugaggagggaaaaaucguucauacuagcacauugucaggaagugcucagcaugucgaggagugcucuugcuauccucgauauccuggugucagaugugucugcagagacaacuggaaaggcuccaauaggcccaucguagauauaaacauaaaggaucauagcauugucuccaguuauguguguucaggacuuguuggagacacacccagaaaaaacgacagcuccagcaguagccauuguuuggauccuaacaaugaagaagguggucauggagugaaaggcugggccuuugaugauggaaaugacguguggaugggaagaacaaucaacgagacgucacgcuuaggguaugaaaccuucaaagucauugaaggcugguccaacccuaaguccaaauugcagauaaauaggcaagucauaguugacagaggugauagguccgguuauucugguauuuucucuguugaaggcaaaagcugcaucaaucggugcuuuuauguggaauugauuaggggaagaaaagaggaaacugaagucuuguggaccucaaacaguauuguuguguuuuguggcaccucagguacauauggaacaggcucauggccugauggggcggacaucaaucucaugccuauauaa

SEQ ID NO: 55455 - RNA, 1410 nt, Artificial Sequence
  derived and/or modified CDS sequence (wt) from neuraminidase__InfluenzaA__AGK63028
augaauccaaaucaaaagauaauaacgauuggcucuguuucucucaccauuuccacaauaugcuucuucaugcaaauugccaucuugauaacuacuguaacauugcauuucaagcaauaugaauucaacucccccccaaacaaccaagugaugcugugugaaccaacaauaauagaaagaaacaaaacagagauaguguaucugaccaacaccaccauagagaaggaaauaugccccaaaccagcagaauacagaaauuggucaaaaccgcaaugugacauuacaggauuugcaccuuuuucuaaggacaauucgauuaggcuuuccgcugguggggacaucugggugacaagagaaccuuaugugucaugcgauccugacaaguguuaucaauuugcccuuggacagggaacaacacuaaacaaugugcauucaaauaacacaguacgugauaggaccccuuaucggacuuuauugaugaaugaguuagguguuccuuuucaucuggggaccaagcaagugugcauagcaugguccagcucaaguugucacgauggaaaagcauggcugcauguuuguauaacgggggaugauaaaaaugcaacugcuagcuucauuuacaaugggaggcuuguagauaguguuguuucaugguccaaagaaauucucaggacccaggagucagaaugcguuuguaucaauggaacuuguacaguaguaaugacugauggaagugcuucaggaaaagcugauacuaaaauacuauucauugaggaggggaaagucguucauacuagcacauugucaggaagugcucagcaugucgaggagugcucuugcuauccucgauauccuggugucagaugugucugcagagacaacuggaaaggcuccaauaggcccaucguagauauaaacauaaaggaucauagcauugucuccaguuauguguguucaggacuuguuggagacacacccagaaaaaacgacagcuccagcaguagccauuguuuggauccuaacaaugaagaagguggucauggagugaaaggcugggccuuugaugauggaaaugacguguggaugggaagaacaaucaacgagacgucacgcuuaggguaugaaaccuucaaagucauugaaggcugguccaacccuaaguccaaauugcagauaaauaggcaagucauaguugacagaggugauagguccgguuauucugguauuuucucuguugaagccaaaagcugcaucauucggugcuuuuauguggaguugauuaggggaagaaaagaggaaacugaagucuuguggaccucaaacaguauuguuguguuuuguggcaccucagguacauauggaacaggcucauggccugauggggcggacaucaaucucaugccuauauaa

SEQ ID NO: 55456 - RNA, 1410 nt, Artificial Sequence
  derived and/or modified CDS sequence (wt) from neuraminidase__InfluenzaA__AGK63030
augaauccaaaucaaaagauaauaacgauuggcucuguuucucucaccauuuccacaauauguuucuucaugcaaauugccaucuugauaacuacuguaacauugcauuucaagcaaugugaauucaacucccccccaaacaaccaagugaugcugugugaaccaacaauaauagaaagaaacauaacagagauaguguaucugaccaacaccaccauagagaaggaaauaugccccaaacuagcagaauacagaaauuggucaaagccgcagugugacauuacaggauuugcaccuuuuucuaaggacaauucgauuaggcuuuccgcugguggggacaucugggugacaagggaaccuuaugugucaugcgauccugacaaguguuaucaauuugcccuuggacagggaacaacacuaaacaacgugcauucaaauaacacaguacgugauaggaccccuuaucggacccuauugaugaaugaguuagguguaccuuuucaucuggggaccaagcaagugugcauggcaugguccagcucaaguugucacgauggaaaagcauggcugcauguuuguauaacgggggaugauaaaaaugcaacugcuagcuucauuuacaaugggaagcuuguagauaguguugucucaugguccaaagaaauccucaggacccaggagucagaaugcguuuguaucaaugggacuuguacaguaguaaugacugaugggagugcuucaggaaaagcugauacuaaaauacuauucauugaggaggggaaaaucguucauacuagcacauugucaggaagugcucagcaugucgaggagugcucuugcuacccucgauauccuggugucagaugugucugcagagacaacuggaaaggcuccaauaggcccauuguagauauaaacauaaaggaucauagcauuguuuccaguuauguguguucaggacuuguuggagacacacccagaaaaaacgacagcuccagcaguagccauuguuuggauccuaacaaugaagaagguggucauggagugaaaggcugggccuuugaugauggaaaugacguguggaugggaagaacgaucaacgagacgucacguuuaggguaugaaaccuucaaagucauugaaggcugguccaacccuaaguccaaauugcagauaaauaggcaagucauaguugacagaggugauagguccgguuauucugguauuuucucuguugaaggcaaaagcugcaucaaucggugcuuuuauguggaauugauuaggggaaggaaagaggaaacugaagucuuguggaccucaaacaguauuguuguguuuuguggcaccucagguacauauggaacaggcucauggccugauggggcggacaucaaucucaugccuauauaa

SEQ ID NO: 55457 - RNA, 1410 nt, Artificial Sequence
  derived and/or modified CDS sequence (wt) from neuraminidase__InfluenzaA__AGK63032
augaauccaaaucaaaagauaauaacgauuggcucuguuucucucaccauuuccacaauauguuucuucaugcaaauugccaucuugauaacuacuguaacauugcauuucaagcaauaugaauucaacucccccccaaacaaccaagugaugcugugugaaccaacaauaauagaaagaaacauaacagagauaguguaucugaccaacaccaccauagagaaggaaauaugccccaaacuagcagaauacagaaauuggucaaagccgcaaugugacauuacaggauuugcaccuuuuucuaaggacaauucgauuaggcuuuccgcugguggggacaucugggugacaagggaaccuuaugugucaugcgauccugacaaguguuaucaauuugcccuuggacagggaacaacacuaaacaacgugcauuccaauaacacaguacgugauaggaccccuuaucggacccuauugaugaaugaguuagguguaccuuuucaucuggggaccaagcaagugugcauggcaugguccagcucaaguugucacgauggaaaagcauggcugcauguuuguauaacgggggaugauaaaaaugcaacugcuagcuucauuuacaaugggaagcuuguagauaguguugucucaugguccaaagaaauccucaggacccaggagucagaaugcguuuguaucaaugggacuuguacaguaguaaugacugaugggagugcuucaggaaaagcugauacuaaaauacuauucauugaggaggggaaaaucguucauacuagcacauugucaggaagugcucagcaugucgaggagugcucuugcuacccucgauauccuggugucagaugugucugcagagacaacuggaaaggcuccaauaggcccauuguagauauaaacauaaaggaucauagcauuguuuccaguuauguguguucaggacuuguuggagacacacccagaaaaaacgacagcuccagcaguagccauuguuuggauccuaacaaugaagaagguggucauggagugaaaggcugggccuuugaugauggaaaugacguguggaugggaagaacgaucaccgagacgucacguuuaggguaugaaaccuucaaagucauugaaggcugguccaacccuaaguccaaauugcagauaaauaggcaagucauaguugacagagguaauagguccgguuauucugguauuuucucuguugaaggcaaaagcugcaucaaucggugcuuuuauguggaauugauuaggggaagaaaagaggaaacugaagucuuguggaccucaaacaguauuguuguguuuuguggcaccucagguacauauggaacaggcucauggccugauggggcggacaucaaucucaugccuauauaa

SEQ ID NO: 55458 - RNA, 1410 nt, Artificial Sequence
  derived and/or modified CDS sequence (wt) from neuraminidase__InfluenzaA__AGK63034
augaauccaaaucaaaagauaauaacgauuggcucuguuucucucaccauuuccacaauaugcuucuucaugcaaauugccaucuugauaacuacuguaacauugcauuucaagcaaugugaauucaacucccccccaaacaaccaagugaugcugugugaaccaacaauaauagaaagaaacauaacagagauaguguaucugaccaacaccaccauagagaaggaaauaugccccaaacuagcagaauacagaaauuggucaaagccgcagugugacauuacaggauuugcaccuuuuucuaaggacaauucgauuaggcuuuccgcugguggggacaucugggugacaagggaaccuuaugugucaugcgauccugacaaguguuaucaauuugcccuuggacagggaacaacacuaaacaacgugcauucaaauaacacaguacgugauaggaccccuuaucggacccuauugaugaaugaguuagguguaccuuuucaucuggggaccaagcaagugugcauggcaugguccagcucaaguugucacgauggaaaagcauggcugcauguuuguauaacgggggaugauaagaaugcaacugcuagcuucauuuacaaugggaagcuuguagauaguguugucucaugguccaaagaaauccucaggacccaggagucagaaugcguuuguaucaaugggacuuguacaguagugaugacugaugggagugcuucaggaaaagcugauacuaaaauacuauucauugaggaggggaaaaucguucauacuagcacauugucaggaagugcucagcaugucgaggagugcucuugcuacccucgauauccuggugucagaugugucugcagagacaacuggaaaggcuccaauaggcccaucguagauauaaacauaaagguucauagcauuguuuccaguuauguguguucaggacuuguuggagacacacccagaaaaaacgacagcuccagcaguagccauuguuuggauccuaacaaugaagaagguggucauggagugaaaggcugggccuuugaugauggaaaugacguguggaugggaagaacaaucaacgagacgucacgcuuaggguaugaaaccuucaaagucauugaaggcugguccaacccuaaguccaaauugcagauaaauaggcaagucauaguugacagaggugauagguccgguuauucugguauuuucucuguugaaggcaaaagcugcaucaaucggugcuuuuauguggaauugauuaggggaagaaaaaaggaaacugaagucuuguggaccucaaacaguauuguuguguuuuguggcaccucagguacauauggaacaggcucauggccugauggggcggacaucaaucucaugccuauauaa

SEQ ID NO: 55459 - RNA, 1410 nt, Artificial Sequence
  derived and/or modified CDS sequence (wt) from neuraminidase__InfluenzaA__AGK63036
augaauccaaaucaaaagauaauaacgauuggcucuguuucucucaccauuuccacaauaugcuucuucaugcaaauugccaucuugauaacuacuguaacauugcauuucaagcaauaugaauucaacucccccccaaacaaccaagugaugcugugugaaccaacaauaauagaaagaaacauaacagagauaguguaucugaccaacaccaccauagagaaggaaauaugccccaaaccagcagaauacagaaauuggucaaagccgcaaugugacauuacaggauuugcaccuuuuucuaaggacaauucgauuaggcuuuccgcugguggggacaucugggugacaagagaaccuuaugugucaugcgauccugacaaguguuaucaauuugcccuuggacagggaacaacacuaaacaacgugcauucaaauaacacaguacgugauaggaccccuuaucggacucuauugaugaaugaguuggguguuccuuuucaucuggggaccaagcaagugugcauagcaugguccagcucaaguugucacgauggaaaagcauggcugcauguuuguauaacgggggaugauaaaaaugcaacugcuagcuucauuuacaaugggaggcuuguagauaguguuguuucaugguccaaagaaauucucaggacccaggagucagaaugcguuuguaucaauggaacuuguacaguaguaaugacugauggaagugcuucaggaaaagcugauacuaaaauacuauucauugaggaggggaaaaucguucauacuagcacauugucaggaagugcucagcaugucgaggagugcucuugcuauccucgauauccuggugucagaugugucugcagagacaacuggaaaggcuccaauaggcccaucguagauauaaacauaaaggaucauagcauuguuuccaguuauguguguucagggcuuguuggagacacacccagaaaaaacgacagcuccagcaguagccauuguuuggauccuaacaaugaagaagguggucauggagugaaaggcugggccuuugaugauggaaaugacguguggaugggaagaacaaucaacgagacgucacgcuucggguaugaaaccaucaaagucauugaaggcugguccaacccuaaguccaacuugcagauaaauaggcaagucauaguugacagagguaauagguccgguuauucugguauuuucucuguugaaggcaaaagcugcaucaaucggugcuuuuauguggaguugaucaggggaagaaaagaggaaacugaagucuuguggaccucaaacaguauuguuguguuuuguggcaccucagguacauauggaacaggcucauggccugauggggcggacaucaaucucaugccuauauaa

SEQ ID NO: 55460 - RNA, 1410 nt, Artificial Sequence
  derived and/or modified CDS sequence (wt) from neuraminidase__InfluenzaA__AGK63038
augaauccaaaucaaaagauaauaacgauuggcucuguuucucucaccauuuccacaauaugcuucuucaugcaaauugccaucuugauaacuacuguaacauugcauuucaagcaauaugaauucaacucccccccaaacaaccaagugaugcugugugaaccaacaauaauagaaagaaacauaacagagauaguguaucugaccaacaccaccauagagaaggaaauaugccccaaacuagcagaauacagaaauuggucaaagccgcaaugugacauuacaggauuugcaccuuuuucuaaggacaauucgauuaggcuuuccgcugguggggacaucugggugacaagggaaccuuaugugucaugcgauccugacaaguguuaucaauuugcccuuggacagggaacaacacuaaacaacgugcauucaaauaacacaguacgugauaggaccccuuaucggacccuauugaugaaugaguuagguguaccuuuucaucuggggaccaagcaagugugcauggcaugguccagcucaaguugucacgauggaaaagcauggcugcauguuuguauaacgggggaugauaagaaugcaacugcuagcuucauuuacaaugggaagcuuguagauaguguugucucaugguccaaagaaauccucaggacccaggagucagaaugcguuuguaucaaugggacuuguacaguagugaugacugaugggagugcuucaggaaaagcugauacuaaaauacuauucauugaggaggggaaaaucguucauacuagcacauugucaggaagugcucagcaugucgaggagugcucuugcuacccucgauauccuggugucagaugugucugcagagacaacuggaaaggcuccaauaggcccauuguagauauaaacauaaaggaucauagcauuguuuccaguuauguguguucaggacuuguuggagacacacccagaaaaaacgacagcuccagcaguagccauuguuuggauccuaacaaugaagaaggugaucauggagugaaaggcugggccuuugaugauggaaaugacguguggaugggaagaacgaucaacgagacgucacguuuaggguaugaaaccuucaaagucauugaaggcugguccaacccuaaguccaaauugcagauaaauaggcaagucauaguugacagagguaauagguccgguuauucugguauuuucucuguugaaagcaaaagcugcaucaaucggugcuuuuauguggaauugauuaggggaagaaaagaggaaacugaagucuuguggaccucaaacaguauuguuguguuuuguggcaccucagguacauauggaacaggcucauggccugauggggcggacaucaaucucaugccuauauaa

SEQ ID NO: 55461 - RNA, 1410 nt, Artificial Sequence
  derived and/or modified CDS sequence (wt) from neuraminidase__InfluenzaA__AGK63040
augaauccaaaucaaaagauaauaacgauuggcucuguuucucucaccauuuccacaauaugcuucuucaugcaaauugccaucuugauaacuacuguaacauugcauuucaagcaaugugaauucaacucccccccaaacaaccaagugaugcugugugaaccaacaauaauagaaagaaacauaacagagauaguguaucugaccaacaccaccauagagaaggaaauaugccccaaacuagcagaauacagaaauuggucaaagccgcaauguaacauuacaggauuugcaccuuuuucuaaggacaauucgauuaggcuuuccgcugguggggacaucugggugacaagggaaccuuaugugucaugcgauccugacaaguguuaucaauuugcccuuggacagggaacaacacuaaacaacgugcauucaaauaacacaguacgugauaggaccccuuaucggacccuauugaugaaugaguuagguguaccuuuucaucuggggaccaagcaagugugcauggcaugguccagcucaaguugucacgauggaaaagcauggcugcauguuuguauaacgggggaugauaaaaaugcaacugcuagcuucauuuacaaugggaagcuuguagauaguguugucucaugguccaaagaaauccucaggacccaggagucagaaugcguuuguaucaaugggacuuguacaguaguaaugacugaugggagugcuucaggaaaagcugauacuaaaauacuauucauugaggaggggaaaaucguucauacuagcacauugucaggaagugcucagcaugucgaggagugcucuugcuacccucgauauccuggugucagaugugucugcagagacaacuggaaaggcuccaauaggcccauuguagauauaaacauaaaggaucauagcauugucuccaguuauguguguucaggacuuguuggagacacacccagaaaaaacgacagcuccagcaguagccauuguuuggauccuaacaaugaagaagguggucauggagugaaaggcugggccuuugaugauggaaaugacguguggaugggaagaacgaucaacgagacgucacguuuaggguaugaaaccuucaaagucauugaaggcugguccaacccuaaguccaaauugcagauaaauaggcaagucauaguugacagaggugauagguccgguuauucugguauuuucucuguugaaggcaaaagcugcaucaaucggugcuuuuauguggaguugauaaggggaagaaaagaggaaacugaagucuuguggaccucaaacaguauuguuguguuuuguggcaccucagguacauauggaacaggcucauggccugauggggcggacaucaaucucaugccuauauaa

SEQ ID NO: 55462 - RNA, 1410 nt, Artificial Sequence
  derived and/or modified CDS sequence (wt) from neuraminidase__InfluenzaA__AGK63042
augaauccaaaucaaaagauaauaacgauuggcucuguuucucucaccauuuccacaauaugcuucuucaugcaaauugccaucuugauaacuacuguaacauugcauuucaagcaaugugaauucaacccccccccaaacaaccaagugaugcugugugaaccaacaauaauagaaagaaacauaacagagauaguguaucugaccaacaccaccauagagaaggaaauaugccccaaacuagcagaauacagaaauuggucaaagccgcagugugacauuacaggauuugcaccuuuuucuaaggacaauucgauuaggcuuuccgcugguggggacaucugggugacaagggaaccuuaugugucaugcgauccugacaaguguuaucaauuugcccuuggacagggaacaacacuaaacaacgugcauucaaauaacacaguacgugauaggaccccuuaucggacucuauugaugaaugaguuagguguaccuuuucaucuggggaccaagcaagugugcauggcaugguccagcucaaguugucacgauggaaaagcauggcugcauguuuguauaacgggggaugauaaaaaugcaacugcuagcuucauuuacaaugggaagcuuguagauaguguugucucaugguccaaagaaauccucaggacccaggagucagaaugcguuuguaucaaugggacuuguacaguaguaaugacugaugggagugcuucaggaaaagcugauacuaaaauacuauucauugaggaggggaaaaucguucauacuagcacauugucaggaagugcucagcaugucgaggagugcucuugcuauccucgauauccuggugucagaugugucugcagagacaacuggaaaggcuccaauaggcccauuguagauauaaacauaaaggaucauagcauuguuuccaguuauguguguucaggacuuguuggagacacacccagaaaaaacgacagcuccagcaguagccauuguuuggauccuaacaaugaagaagguggucauggagugaaaggcugggccuuugaugauggaaaugacguguggaugggaagaacgaucaacgagacgucacgcuuaggguaugaaaccuucaaagucauugaaggcugguccaacccuaaguccaaauugcagauaaauaggcaagucauaguugacagaggugauagguccgguuauucugguauuuucucuguugaaggcaaaagcugcaucaaucggugcuuuuauguggaauugauaaggggaagaaaagaggaaacugaagucuuguggaccucaaacaguauuguuguguuuuguggcaccucagguacauauggaacaggcucauggccugauggggcggacaucaaucucaugccuauauaa

SEQ ID NO: 55463 - RNA, 1410 nt, Artificial Sequence
  derived and/or modified CDS sequence (wt) from neuraminidase__InfluenzaA__AGK63044
augaauccaaaucaaaagauaauaacgauuggcucuguuucucucaccauuuccacaauaugcuucuucaugcaaauugccaucuugauaacuacuguaacauugcauuucaagcaaugugaauucaacucccccccaaacaaccaagugaugcugugugaaccaacaauaauagaaagaaacauaacagagauaguguaucugaccaacaccaccauagagaaggaaauaugccccaaacuagcagaauacagaaauuggucaaagccgcagugugacauuacaggauuugcaccuuuuucuaaggacaauucgauuaggcuuuccgcugguggggacaucugggugacaagggaaccuuaugugucaugcgauccugacaaguguuaucaauuugcccuuggacagggaacaacacuaaacaacgugcauucaaauaacacaguacgugauaggaccccuuaucggacccuauugaugaaugaguuagguguaccuuuucaucuggggaccaagcaagugugcauggcaugguccagcucaaguugucacgauggaaaagcauggcugcauguuuguauaacgggggaugauaaaaaugcaacugcuagcuucauuuacaaugggaagcuuguagauaguguugucucaugguccaaagaaauccucaggacccaggagucagaaugcguuuguaucaaugggacuuguacaguaguaaugacugaugggagugcuucaggaaaagcugauacuaaaauacuauucauugaggaggggaaaaucguucauacuagcacauugucaggaagugcucagcaugucgaggagugcucuugcuacccucgauauccuggugucagaugugucugcagagacaacuggaaaggcuccaauaggcccauuguagauauaaacauaaaggaucauagcauuguuuccaguuauguguguucaggacuuguuggagacacacccagaaaaaacgacagcuccagcaguagccauuguuuggauccuaacaaugaagaagguggucauggagugaaaggcugggccuuugaugauggaaaugacguguggaugggaagaacgaucaacgagacgucacguuuaggguaugaaaccuucaaagucauugaaggcugguccaacccuaaguccaaauugcagauaaauaggcaagucauaguugacagagguuauagguccgguuauucugguauuuucucuguugaaagcaaaagcugcaucaaucggugcuuuuauguggaauugcuuaggggaagaaaagaggaaacugaagucuuguggaccucaaacaguauuguuguguuuuguggcaccucagguacauauggaacaggcucauggccugauggggcggacaucaaucucaugccuauauaa

SEQ ID NO: 55464 - RNA, 1410 nt, Artificial Sequence
  derived and/or modified CDS sequence (wt) from neuraminidase__InfluenzaA__AGK63046
augaauccaaaucaaaagauaauaacgauuggcucuguuucucucaccauuuccacaauaugcuucuucaugcaaauugccaucuugauaacuacuguaacauugcauuucaagcacuaugaauucaacucccccccaaacaaccaagugaugcugugugaaccaacaauaauagaaagaaacauaacagagauaguguaucugaccaacaccaccauagagaaggaaauaugccccaaaccagcagaauacagaaauuggucaaagccgcaaugugacauuacaggauuugcaccuuuuucuaaggacaauucgauuaggcuuuccgcugguggggacaucugggugacaagagaaccuuaugugucaugcgauccugacaaguguuaucaauuugcccuuggacagggaacaacacuaaacaacgugcauucaaauaacacaguacgugauaggaccccuuaucggacucuauugaugaaugaguuggguguuccuuuucaucuggggaccaagcaagugugcauagcaugguccagcucaaguugucacgauggaaaagcauggcugcauguuuguauaacgggggaugauaaaaaugcaacugcuagcuucauuuacaaugggaggcuuguagauaguguuguuucaugguccaaagaaauucucaggacccaggagucagaaugcguuuguaucaauggaacuuguacaguaguaaugacugauggaagugcuucaggaaaagcugauacuaaaauacuauucauugaggaggggaaaaucguucauacuagcacauugucaggaagugcucagcaugucgaagagugcucuugcuauccucgauauccuggugucagaugugucugcagagacaacuggaaaggcuccaauaggcccaucguagauauaaacauaaaggaucauagcauuguuuccaguuauguguguucaggacuuguuggagacacacccagaaaaaacgacagcuccagcaguagccauuguuuggaucccaacaaugaagaagguggucauggagugaaaggcugggccuuugaugauggaaaugacguguggaugggaagaacaaucaacgagacgucacgcuuaggguaugaaaccuucaaagucauugaaggcuggucaaacccuaaguccaaauugcagauaaauaggcaagucauaguugacagaggugauagguccgguuauucugguauuuucucuguugaaggcaaaagcugcaucaaucggugcuuuuauguggacuugauuaggggaagaaaagaggaaacugaagucuuguggaccucaaacaguauuguuguguuuuguggcaccucagguacauauggaacaggcucauggccugauggggcggacaucaaucucaugccuauauaa

SEQ ID NO: 55465 - RNA, 1398 nt, Artificial Sequence
  derived and/or modified CDS sequence (wt) from neuraminidase__InfluenzaA__AGK82159
augaauccaaaucagaagauucuaugcacuucagccacugcuaucauaauaggcgcaaucgcaguacucauuggaauagcaaaccuaggauugaacauaggacugcaucuaaaaccgggcugcaauugcucacacucacaaccugaaacaaccaacacaagccaaacaauaauaaacaacuauuauaaugaaacaaacaucaccaacauccaaauggaagagagaacaagcaggaauuucaauaacuuaacuaaagggcucuguacuauaaauucauggcacauauaugggaaagacaaugcaguaagaauuggagagagcucggauguuuuagucacaagagaacccuauguuucaugcgacccagaugaaugcagguucuaugcucucagccaaggaacaacaaucagagggaaacacucaaacgaaacaauacacgauaggucccaguaucgcgcccugauaagcuggccacuaucaucaccgcccacaguguacaacagcaggguggaaugcauuggguggucaaguacuaguugccaugauggcaaauccaggaugucaauauguauaucaggaccaaacaacaaugcaucugcaguaguaugguacaacagaaggccuguugcagaaauuaacacaugggcccgaaacauacuaagaacacaggaaucugaauguguaugccacaacggcguaugcccaguaguguucaccgaugggucugccacuggaccugcagacacaagaauauacuauuuuaaagaggggaaaauauugaaaugggagucucugacuggaacugcuaagcauauugaagaaugcucauguuacggggaacgaacaggaauuaccugcacaugcagggacaauuggcagggcucaaauagaccagugauucagauagacccaguagcaaugacacacacuagucaauauauaugcaguccuguucuuacagacaauccccgaccgaaugacccaaauauagguaaguguaaugacccuuauccagguaauaauaacaauggagucaagggauucucauaccuggauggggcuaacacuuggcuagggaggacaauaagcacagccucgaggucuggauacgagauguuaaaagugccaaaugcauugacagaugauagaucaaagcccauucaaggucagacaauuguauuaaacgcugacuggagugguuacaguggaucuuucauggacuauugggcugaaggggacugcuaucgagcguguuuuuauguggaguugauacguggaagacccaaggaggauaaagugugguggaccagcaauaguauaguaucgauguguuccaguacagaauuccugggacaauggaacuggccugauggggcuaaaauagaguacuuccucuaa

SEQ ID NO: 55466 - RNA, 1398 nt, Artificial Sequence
  derived and/or modified CDS sequence (wt) from neuraminidase__InfluenzaA__AGK84858
augaauccaaaucagaagauucuaugcacuucagccacugcuaucauaauaggcgcaaucgcaguacucauuggaauagcaaaccuaggauugaacauaggacugcaucuaaaaccgggcugcaauugcucacacucacaaccugaaacaaccaacacaagccaaacaauaauaaacaacuauuauaaugaaacaaacaucaccaacauccaaauggaagagagaacaagcaggaauuucaauaacuuaacuaaagggcucuguacuauaaauucauggcacauauaugggaaagacaaugcaguaagaauuggagagagcucggauguuuuagucacaagagaacccuauguuucaugcgacccagaugaaugcagguucuaugcucucagccaaggaacaacaaucagagggaaacacucaaacggaacaauacacgauaggucccaguaucgcgcccugauaagcuggccacuaucaucaccgcccacaguguacaacagcaggguggaaugcauuggguggucaaguacuaguugccaugauggcaaauccaggaugucaauauguauaucaggaccaaacaacaaugcaucugcaguaguaugguacaacagaaggccuguugcagaaauuaacacaugggcccgaaacauacuaagaacacaggaaucugaauguguaugccacaacggcguaugcccaguaguguucaccgaugggucugccacuggaccugcagacacaagaauauacuauuuuaaagaggggaaaauauugaaaugggagucucugacuggaacugcuaagcauauugaagaaugcucauguuacggggaacgaacaggaauuaccugcacaugcagggacaauuggcagggcucaaauagaccagugauucagauagacccaguagcaaugacacacacuagucaauauauaugcaguccuguucuuacagacaauccccgaccgaaugacccaaauauagguaaguguaaugacccuuauccagguaauaauaacaauggagucaagggauucucauaccuggauggggcuaacacuuggcuagggaggacaauaagcacagccucgaggucuggauacgagauguuaaaagugccaaaugcauugacagaugauagaucaaagcccauucaaggucagacaauuguauuaaacgcugacuggagugguuacaguggaucuuucauggacuauugggcugaaggggacugcuaucgagcguguuuuuauguggaguugauacguggaagacccaaggaggauaaagugugguggaccagcaauaguauaguaucgauguguuccaguacagaauuccugggacaauggaacuggccugauggggcuaaaauagaguacuuccucuaa

SEQ ID NO: 55467 - RNA, 1398 nt, Artificial Sequence
  derived and/or modified CDS sequence (wt) from neuraminidase__InfluenzaA__AGK84861
augaauccaaaucagaagauucuaugcacuucagccacugcuaucauaauaggcgcaaucgcaguacucauuggaauagcaaaccuaggauugaacauaggacugcaucuaaaaccgagcugcaauugcucacacucacaaccugaaacaaccaacacaagccaaacaauaauaaacaacuauuauaaugaaacaaacaucaccaacauccaaauggaagagagaacaagcaggaauuucaauaacuuaacuaaagggcucuguacuauaaauucauggcacauauaugggaaagacaaugcaguaagaauuggagagagcucggauguuuuagucacaagagaacccuauguuucaugcgacccagaugaaugcagguucuaugcucucagccaaggaacaacaaucagagggaaacacucaaacggaacaauacacgauaggucccaguaucgcgcccugauaagcuggccacuaucaucaccgcccacaguguacaacagcaggguggaaugcauuggguggucaaguacuaguugccaugauggcaaauccaggaugucaauauguauaucaggaccaaacaacaaugcaucugcaguaguaugguacaacagaaggccuguugcagaaauuaacacaugggcccgaaacauacuaagaacacaggaaucugaauguguaugccacaacggcguaugcccaguaguguucaccgaugggucugccacuggaccugcagacacaagaauauacuauuuuaaagaggggaaaauauugaaaugggagucucugacuggaacugcuaagcauauugaagaaugcucauguuacggggaacgaacaggaauuaccugcacaugcagggacaauuggcagggcucaaauagaccagugguucagauagauccaguagcaaugacacacacuagucaguauauaugcaguccuguucuuacagacaauccccgaccgaaugacccaaauauagguaaguguaaugacccuuauccagguauuaauaacaauggagucaagggauucucauaccuggauggggcuaacacuuggcuagggaggacaauaagcacagccucgaggucuggauacgagauguuaaaagugccaaaugcauugacagaugauagaucgaagcccauucaaggucagacaauuguauuaaacgcugacuggagugguuacaguggaucuuucauggacuauugggcugaaggggacugcuaucgagcguguuuuuauguggaguugauacgugggagacccaaggaggauaaagugugguggaccagcaauaguauaguaucgauguguuccaguacagaauuccugggacaauggaacuggccugauggggcuaaaauagaguacuuccucuaa

SEQ ID NO: 55468 - RNA, 1398 nt, Artificial Sequence; identical to SEQ ID NO: 55466
  derived and/or modified CDS sequence (wt) from neuraminidase__InfluenzaA__AGK84864

SEQ ID NO: 55469 - RNA, 1398 nt, Artificial Sequence
  derived and/or modified CDS sequence (wt) from neuraminidase__InfluenzaA__AGL95090
augaauccaaaucagaagauucuaugcacuucagccacugcuaucauaauaggcgcaaucgcaguacucauuggaauagcaaaccuaggauugaacauaggacugcaucuaaaaccgggcugcaauugcucacacucacaaccugaaacaaccaacacaagccaaacaauaauaaacaacuauuauaaugaaacaaacaucaacaacauccaaauggaagagagaacaagcaggaauuucaauaacuuaacuaaagggcucuguacuauaaauucauggcacauauaugggaaagacaaugcaguaagaauuggagagagcucggauguuuuagucacaagagaacccuauguuucaugcgacccagaugaaugcagguucuaugcucucagccaaggaacaacaaucagagggaaacacucaaacggaacaauacacgauaggucccaguaucgcgcccugauaagcuggccacuaucaucaccgcccacaguguacaacagcaggguggaaugcauuggguggucaaguacuaguugccaugauggcaaauccaggaugucaauauguauaucaggaccaaacaacaaugcaucugcaguaguaugguacaacagaaggccuguugcagaaauuaacacaugggcccgaaacauacuaagaacacaggaaucugaauguguaugccacaacggcguaugcccaguaguguucaccgaugggucugccacuggaccugcagacacaagaauauacuauuuuaaagaggggaaaauauugaaaugggagucucugacuggaacugcuaagcauauugaagaaugcucauguuacggggaacgaacaggaauuaccugcacaugcaaggacaauuggcagggcucaaauagaccagugauucagauagacccaguagcaaugacacacacuagucaauauauaugcaguccuguucuuacagacaauccccgaccgaaugacccaaauauagguaaguguaaugacccuuauccagguaauaauaacaauggagucaagggauucucauaccuggauggggcuaacacuuggcuagggaggacaauaagcacagccucgaggucuggauacgagauguuaaaagugccaaaugcauugacagaugauagaucaaagcccauucaaggucagacaauuguauuaaacgcugacuggagugguuacaguggaucuuucauggacuauugggcugaaggggacugcuaucgagcguguuuuuauguggaguugauacguggaagacccaaggaggauaaagugugguggaccagcaauaguauaguaucgauguguuccaguacagaauuccugggacaauggaacuggccugauggggcuaaaauagaguacuuccucuaa

SEQ ID NO: 55470 - RNA, 1413 nt, Artificial Sequence
  derived and/or modified CDS sequence (wt) from neuraminidase__InfluenzaA__AGL96802
augaacccaaaucaaaagauaauaaccauuggaucaaucaguauagcaaucggaauaauuagucuaauguugcaaauaggaaauauuauuucaauaugggcuagucacucaauccaaacuggaagucaaaacaacacuggaauaugcaaccaaagaaucaucacauaugaaaacagcaccugggugaaucacacauauguuaauauuaacaacacuaauguuguugcuggagaggacaaaacuucagugacauuggccggcaauucaucucuuuguucuaucaguggaugggcuauauacacaaaagacaacagcauaagaauuggcuccaaaggagauguuuuugucauaagagaaccuuucauaucauguucucacuuggaaugcagaaccuuuuuucugacccaaggcgcucuauuaaaugacaaacauucaaaugggaccguaaaggacagaaguccuuauagggccuuaaugagcuguccucuaggugaagcuccguccccauacaauucaaaguucgaaucaguugcauggucagcaagcgcaugccaugauggcaugggcugguuaacaaucggaauuucugguccagacaauggagcuguggcuguacuaaaauacaacggaauaauaacuggaaccauaaaaaguuggaaaaagcaaauauuaagaacacaagagucugaaugugucuguaugaacgggucauguuucaccauaaugaccgauggcccgaguaauaaggccgccucguacaaaauuuucaagaucgaaaaggggaagguuacuaaaucaauagaguugaaugcacccaauuuucauuaugaggaaugcuccuguuacccagacacuggcauagugauguguguaugcagggacaacuggcaugguucaaaucgaccuugggugucuuuuaaucaaaacuuggauuaucaaauaggauacaucugcaguggaguguuuggugacaauccgcgucccgaagauggagagggcagcugcaauccagugacuguugauggagcaaacggaguaaaaggguuuucauacaaauaugauaaugguguuuggauaggaaggaccaaaaguaacagacuuagaaagggguuugagaugauuugggauccuaauggauggacaaauaccgacagugauuucucagugaaacaggauguuguagcaauaacugauuggucaggguacagcggaaguuucguccaacauccugaguuaacaggauuggacuguauaagaccuugcuucuggguugaguuagucagagggcugccuagagaaaauacaacaaucuggacuagugggagcagcauuucuuuuuguggcguuaauagugauacugcaaacuggucuuggccagacggugcugaguugccguucaccauugacaaguag

SEQ ID NO: 55471 - RNA, 1413 nt, Artificial Sequence
  derived and/or modified CDS sequence (wt) from neuraminidase__InfluenzaA__AGL96807
augaacccaaaucaaaagauaauaaccauuggaucaaucaguauagcaaucggaauaauuagucuaauguugcaaauaggaaauauuauuucaauaugggcuagucacucaauccaaacuggaagucaaaacaacacuggaauaugcaaccaaagaaucaucacauaugaaaacagcaccugggugaaucacacauauguuaauauuaacaacacuaauguuguugcuggagaggacaaaacuucagugacauuggccggcaauucaucucuuuguucuaucaguggaugggcuauauacacaaaagacaacagcauaagaauuggcuccaaaggagauguuuuugucauaagagaaccuuucauaucauguucucacuuggaaugcagaaccuuuuuucugacccaaggcgcucuauuaaaugacaaacauucaaaugggaccguaaaggacagaaguccuuauagggccuuaaugagcuguccucuaggugaagcuccguccccauacaauucaaaguucgaaucaguugcauggucagcaagcgcuugccaugauggcaugggcugguuaacaaucggaauuucugguccagacaauggagcuguggcuguacuaaaauacaacggaauaauaacuggaaccauaaaaaguuggaaaaagcaaauauuaagaacacaagagucugaaugugucuguaugaacgggucauguuucaccauaaugaccgauggcccgaguaauaaggccgccucguacaaaauuuucaagaucgaaaaggggaagguuacuaaaucaauagaguugaaugcacccaauuuucauuaugaggaauguuccuguuacccagacacuggcauagugauguguguaugcagggacaacuggcaugguucaaaucgaccuugggugucuuuuaaucaaaacuuggauuaucaaauaggauacauuugcaguggaguguucggugacaauccgcgucccgaagauggagagggcagcugcaauccagugacuguugauggagcaaacggaguaaaaggguuuucauacaaauaugauaaugguguuuggauaggaaggaccaaaaguaacagacuuagaaagggguuugagaugauuugggauccuaauggauggacaaauaccgacagugauuucucagugaaacaggauguuguagcaauaacugauuggucaggguacagcggaaguuucguccaacauccugaguuaacaggauuggacuguauaagaccuugcuucuggguugaguuagucagagggcugccuagagaaaauacaacaaucuggacuagugggagcagcauuucuuuuuguggcguuaauagugauacugcaaacuggucuuggccagacggugcugaguugccguucaccauugacaaguag

SEQ ID NO: 55472 - RNA, 1413 nt, Artificial Sequence
  derived and/or modified CDS sequence (wt) from neuraminidase__InfluenzaA__AGL96808
augaacccaaaucaaaagauaauaaccauuggaucaaucaguauagcaaucggaauaauuagucuaauguugcaaauaggaaauauuauuucaauaugggcuagucacucaauccaaacuggaagucaaaacaacacuggaauaugcaaccaaagaaucaucacauaugaaaacagcaccugggugaaucacacauauguuaauauuaacaacacuaauguuguugcuggagaggacaaaacuucagugacauuggccggcaauucaucucuuuguucuaucaguggaugggcuauauacacaaaagacaacagcauaagaauuggcuccaaaggagauguuuuugucauaagagaaccuuucauaucauguucucacuuggaaugcagaaccuuuuuucugacccaaggcgcucuauuaaaugacaaacauucaaaugggaccguaaaggacagaaguccuuauagggccuuaaugagcuguccucuaggugaagcuccguccccauacaauucaaaguucgaaucaguugcauggucagcaagcgcaugccaugauggcaugggcugguuaacaaucggaauuucugguccagacaauggagcuguggcuguacuaaaauacaacggaauaauaacuggaaccauaaaaaguuggaaaaagcaaauauuaagaacacaagagucugaaugugucuguaugaacgggucauguuucaccauaaugaccgauggcccgaguaauaaggccgccucguacaaaauuuucaagaucgaaaaggggaagguuacuaaaucaauagaguugaaugcacccaauuuucauuaugaggaauguuccuguuacccagacacuggcauagugauguguguaugcagggacaacuggcaugguucaaaucgaccuugggugucuuuuaaucaaaacuuggauuaucaaauaggauacaucugcaguggaguguuuggugacaauccgcgucccgaagauggagagggcagcugcaauccagugacuguugauggagcaaacggaguaaaaggguuuucauacaaauaugauaaugguguuuggauaggaaggaccaaaaguaacagacuuagaaagggguuugagaugauuugggauccuaauggauggacaaauaccgacaguuuuuucucagugaaacaggauguuguagcaauaacugauuggucaggguacaguggaaguuucguccaacauccugaguuaacaggauuggacuguauaagaccuugcuucuggguugaguuagucagagggcugccuagagaaaauacaacaaucuggacuagugggagcagcauuucuuuuuguggcguuaauagugauacugcaaacuggucuuggccagacggugcugaguugccguucaccauugacaaguag

SEQ ID NO: 55473 - RNA, 1413 nt, Artificial Sequence
  derived and/or modified CDS sequence (wt) from neuraminidase__InfluenzaA__AGL96809
augaacccaaaucaaaagauaauaaccauuggaucaaucaguauagcaaucggaauaauuagucuaauguugcaaauaggaaauauuauuucaauaugggcuagucacucaauccaaacugggagucaaaacaacacuggaauaugcaaccaaagaaucaucacauaugaaaacagcaccugggugaaucacacauauguuaauauuaacaacacuaauguuguugcuggagaggacaaaacuucagugacauuggccggcaauucaucucuuuguucuaucaguggaugggcuauauacacaaaagacaacagcauaagaauuggcuccaaaggagauguuuuugucauaagagaaccuuucauaucauguucucacuuggaaugcagaaccuuuuuucugacccaaggcgcucuauuaaaugacaaacauucaaaugggaccguaaaggacagaaguccuuauagggccuuaaugagcuguccucuaggugaagcuccguccccauacaauucaaaguucgaaucaguugcauggucagcaagcgcaugccaugauggcaugggcugguuaacaaucggaauuucugguccagacaauggagcuguggcuguacuaaaauacaacggaauaauaacuggaaccauaaaaaguuggaaaaagcaaauauuaagaacacaagagucugaaugugucuguaugaacgggucauguuucaccauaaugaccgauggcccgaguaauaagaccgccucguacaaaauuuucaagaucgaaaaggggaagguuacuaaaucaauagaguugaaugcacccaauuuucauuaugaggaauguuccuguuacccagacacuggcauagugauguguguaugcagggacaacuggcaugguucaaaucgaccuugggugucuuuuaaucaaaacuuggauuaucaaauaggauacaucugcaguggaguguuuggugacaauccgcgucccgaagauggagagggcagcugcaauccagugacuguugauggagcaaacggaguaaaaggguuuucauacaaauaugauaaugguguuuggauaggaaggaccaaaaguaacagacuuagaaagggguuugagaugauuugggauccuaauggauggacaaauaccgacagugauuucucagugaaacaggauguuguagcaauaacugauuggucaggguacaguggaaguuucguccaacauccugaguuaacaggauuggacuguauaagaccuugcuucuggguugaguuagucagagggcugccuagagaaaauacaacaaucuggacuagugggagcagcauuucuuuuuguggcguuaauagugauacugcaaacuggucuuggccagacggugcugaguugccguucaccauugacaaguag

SEQ ID NO: 55474 - RNA, 1413 nt, Artificial Sequence
  derived and/or modified CDS sequence (wt) from neuraminidase__InfluenzaA__AGL96818
augaacccaaaucaaaagauaauaaccauuggaucaaucaguauagcaaucggaauaaucagucuaauguugcaaauaggaaauauuauuucaauaugggcuagucacucaauccaaacuggaagucaaaacaacacuggaauaugcaaccaaagaaucaucacauaugaaaacagcaccugggugaaucacacauauguuaauauuaacaacacuaauguuguugcuggagaggacaaaacuucagugacauuggccggcaauucaucucuuuguucuaucaguggaugggcuauauacacaaaagacaacagcauaagaauuggcuccaaaggagauguuuuugucauaagagaaccuuucauaucauguucucacuuggaaugcagaaccuuuuuucugacccaaggcgcucuauuaaaugacaaacauucaaaugggaccguaaaggacagaaguccuuauagggccuuaaugagcuguccucuaggugaagcuccguccccauacaauucaaaguucgaaucaguugcauggucagcaagcgcaugccaugauggcaugggcugguuaacaaucggaauuucugguccagacaauggagcuguggcuguacuaaaauacaacggaauaauaacuggaaccauaaaaaguuggaaaaagcaaauauuaagaacacaagagucugaaugugucuguaugaacgggucauguuucaccauaaugaccgauggcccgaguaauaaggccgccucguacaaaauuuucaagaucgaaaaggggaagguuacuaaaucaauagaguugaaugcacccaauuuucauuaugaggaauguuccuguuacccagacacuggcauagugauguguguaugcagggacaauuggcaugguucaaaucgaccuugggugucuuuuaaucaaaacuuggauuaucaaauaggauacaucugcaguggaguguucggugacaauccgcgucccgaagauggagagggcagcugcaauccagugacuguugauggagcaaacggaguaaaaggguuuucauacaaauaugauaaugguguuuggauaggaaggaccaaaaguaacagacuuagaaagggguuugagaugauuugggauccuaauggauggacaaauaccgacagugauuucucagugaaacaggauguuguagcaauaacugauuggucaggguacagcggaaguuucguccaacauccugaguuaacaggauuggacuguauaagaccuugcuucuggguugaguuagucagagggcugccuagagaaaauacaacaaucuggacuagugggagcagcauuucuuuuuguggcguuaauagugauacugcaaacuggucuuggccagacggugcugaguugccguucaccauugacaaguag

SEQ ID NO: 55475 - RNA, 1413 nt, Artificial Sequence
  derived and/or modified CDS sequence (wt) from neuraminidase__InfluenzaA__AGL96820
augaacccaaaucaaaagauaauaaccacuggaucaaucaguauagcaaucggaauaauuagucuaauguugcaaauaggaaauauuauuucaauaugggcuagucacucaauccaaacuggaagucaaaacaacacuggaauaugcaaccaaagaaucaucacauaugaaaacagcaccugggugaaucacacauauguuaauauuaacaacacuaauguuguugcuggagaggacaaaacuucagugacauuggccggcaauucaucucuuuguucuaucaguggaugggcuauauacacaaaagacaacagcauaagaauuggcuccaaaggagauguuuuugucauaagagaaccuuucauaucauguucucacuuggaaugcagaaccuuuuuucugacccaaggcgcucuauuaaaugacaaacauucaaaugggaccguaaaggacagaaguccuuauagggccuuaaugagcuguccucuaggugaagcuccguccccauacaauucaaaguucgaaucaguugcauggucagcaagcgcaugccaugauggcaugggcugguuaacaaucggaauuucugguccagacaauggagcuguggcuguacuaaaauacaacggaauaauaacuggaaccauaaaaaguuggaaaaagcaaauauuaagaacacaagagucugaaugugucuguaugaacgggucauguuucaccauaaugaccgauggcccgaguaauaaggccgccucguacaaaauuuucaagaucgaaaaggggaagguuacuaaaucaauagaguugaaugcacccaauuuucauuaugaggaauguuccuguuacccagacacuggcauagugauguguguaugcagggacaacuggcaugguucaaaucgaccuugggugucuuuuaaucaaaacuuggauuaucaaauaggauacaucugcaguggaguguuuggugacaauccgcgucccgaagauggagagggcagcugcaauccagugacuguugauggagcaaacggaguaaaaggguuuucauacaaauaugauaaugguguuuggauaggaaggaccaaaaguaacagacuuagaaagggguuugagaugauuugggauccuaauggauggacaaauaccgacagugauuucucagugaaacaggauguuguagcaauaacugauuggucaggguacaguggaaguuucguccaacauccugaguuaacaggauuggacuguauaagaccuugcuucuggguugaguuagucagagggcugccuagagaaaauacaacaaucuggacuagugggagcagcauuucuuuuuguggcguuaauagugauacugcaaacuggucuuggccagacggugcugaguugccguucaccauugacaaguag

SEQ ID NO: 55476 - RNA, 1413 nt, Artificial Sequence
  derived and/or modified CDS sequence (wt) from neuraminidase__InfluenzaA__AGL96821
augaacccaaaucaaaagauaauaaccauuggaucaaucaguauagcaaucggaauaauuagucuaauguugcaaauaggaaauauuauuucaauaugggcuagucacucaauccaaacuggaagucaaaacaacacuggaauaugcaaccaaagaaucaucacauaugaaaacagcaccugggugaaucacacauauguuaauauuaacaacacuaauguuguugcuggagaggacaaaacuucagugacauuggccggcaauucaucucuuuguucuaucaguggaugggcuauauacacaaaagacaacagcauaagaauuggcuccaaaggagauguuuuugucauaagagaaccuuucauaucauguucucacuuggaaugcagaaccuuuuuucugacccaaggcgcucuauuaaaugacaaacauucaaaugggaccguaaaggacagaaguccuuauagggccuuaaugagcuguccucuaggugaagcuccguccccauacaauucaaaguucgaaucaguugcauggucagcaagcgcaugccaugauggcaugggcugguuaacaaucggaauuucugguccagacaauggagcuguggcuguacuaaaauacaacggaauaauaacuggaaccauaaaaaguuggaaaaagcaaauauuaagaacacaagagucugaaugugucuguaugaacgggucauguuucaccauaaugaccgauggcccgaguaauaaggccgccucguacaaaauuuucaagaucgaaaaggggaagguuacuaaaucaauagaguugaaugcacccaauuuucauuaugaggaaugcuccuguuacccagacacuggcauagugauguguguaugcagggacaacuggcaugguucaaaucgaccuugggugucuuuuaaucaaaacuuggauuaucaaauaggauacaucugcaguggaguguuuggugacaauccgcgucccgaagauggagagggcagcugcaauccagugucuguugauggagcaaacggaguaaaaggguuuucauacaaauaugauaaugguguuuggauaggaaggaccaaaaguaacagacuuagaaagggguuugagaugauuugggauccuaauggauggacaaauaccgacagugauuucucagugaaacaggauguuguagcaauaacugauuggucaggguacagcggaaguuucguccaacauccugaguuaacaggauuggacuguauaagaccuugcuucuggguugaguuagucagagggcugccuagagaaaauacaacaaucuggacuagugggagcagcauuucuuuuuguggcguuaauagugauacugcaaacuggucuuggccagacggugcugaguugccguucaccauugacaaguag

SEQ ID NO: 55477 - RNA, 1410 nt, Artificial Sequence
  derived and/or modified CDS sequence (wt) from neuraminidase__InfluenzaA__AGN69269
augauuacaaaccaaagaauaauaaccaucgggacagucugucugauaguuggaauaguuagucuauuauugcagauaggaaauauagucucauuauggauaagccauucaauucagacuggagaaaaaaaucacucugagauaugcaaccaaaauaccauuacauaugaaaacaacacaugggugaaccaaacuuauguaaacauuagcaauaccaacauugcugauggacagggcgugacuucaauaauacuagccggcaauuccucucuuugcccaauaagugggugggcuauauacagcaaagacaauagcauaaggauugguuccaaaggagacauuuuugucauaagagaaccauucauuucaugcucucacuuggagugcagaaccuuuuuucugacccaaggugcuuugcuaaaugacaggcauucuaauggaaccgucaaggacaggagccccuaccgaaccuuaaugagcugcccgaucggugaagcuccaucuccguauaauucaagauucgaaucaguugcuuggucagcaagugcaugccaugauggaaugggauggauaacaaucgggauuuccgguccagauaauggagcaguggcuguuuugaaauacaaugguauaauaacagauacaauaaaaaguuggagaaacaaaauacuaagaacacaagagucagaauguguuuguauaaacgguucauguuuuacuauaaugacugauggcccaagcaaugggcaagccucguacaaaauauucaaaauggagaaagggaagauuauuaagucaguugagcuggaugcaccuaauuaccacuaugaggaaugcuccuguuacccugauacaggcaaaguggugugugugugcagagacaauuggcaugcuucaaaucgaccgugggucuccuucgaucagaaucuugauuaucagauaggguacauaugcagugggguuuucggugauaacccacguucuaaugaugggaaaggcaauuguggcccagcacuuucuaauggagcaaauggagugaaaggauucucauuuagauauggcaaugguguuuggauaggaagaacuaaaaguaucagcucuagaaguggauuugagaugauuugggauccaaauggauggacggaaacugauaguaguuucucuaugaagcaggauauuauagcauuaacugauuggucaggauauaguggaaguuuuguccaacauccugaauuaacaggaaugaacugcauaaggccuuguuuuuggguagaguuaaucagaggacaacccaaggagagcacaaucuggacuaguggaagcagcauuucuuucuguggcguggacagugaaaccgcaagcuggucauggccagacggagcugaucugccauucaccauugacaaguag

SEQ ID NO: 55478 - RNA, 1410 nt, Artificial Sequence
  derived and/or modified CDS sequence (wt) from neuraminidase__InfluenzaA__AGN69280
augaauacaaaccaaagaauaauaaccaucgggacagucugucugauaguuggaauaguuagucuauuauugcagauaggaaauauagucucauuauggauaagccauucaauucagacuggagaaaaaaaucacucugagauaugcaaccaaaauaccauuacauaugaaaacaacacaugggugaaccaaacuuauguaaacauuagcaauaccaacauugcugauggacagggcgugacuucaauaauacuagccggcaauuccucucuuugcccaauaagugggugggcuauauacagcaaagacaauagcauaaggauugguuccaaaggagacauuuuugucauaagagaaccauucauuucaugcucucacuuggagugcagaaccuuuuuucugacccaaggugcuuugcuaaaugacaggcauucuaauggaaccgucaaggacaggagccccuaccgaaccuuaaugagcugcccgaucggugaagcuccaucuccguauaauucaagauucgaaucaguugcuuggucagcaagugcaugccaugauggaaugggauggcuaacaaucgggauuuccgguccagauaauggagcaguggcuguuuugaaauacaaugguauaauaacagauacaauaaaaaguuggagaaacaaaauacuaagaacacaagagucagaauguguuuguauaaacgguucauguuuuacuauaaugacugauggcccaagcaaugggcaagccucguacaaaauauucaaaauggagaaagggaagauuauuaagucaguugagcuggaugcaccuaauuaccacuaugaggaaugcuccuguuacccugauacaggcaaaguggugugugugugcagagacaauuggcaugcuucaaaucgaccgugggucucuuucgaucagaaucuugauuaucagauaggguacauaugcagugggguuuucggugauaacccgcguucuaaugaugggaaaggcaauuguggcccaguacuuucuaauggagcaaauggagugaaaggauucucauuuagauauggcaaugguguuuggauaggaagaacuaaaaguaucagcucuagaaguggauuugagaugauuugggauccaaauggauggacggaaacugauaguaguuucucuaugaagcaggauauuauagcauuaacugauuggucaggauauaguggaaguuuuguccaacauccugaauuaacaggaaugaacugcauaaggccuuguuuuuggguagaguuaaucagaggacaacccaaggagagcacaaucuggacugguggaagcagcauuucuuucuguggcguggacagugaaaccgcaagcuggucauggccagacggagcugaucugccauucaccauugacaaguag

SEQ ID NO: 55479 - RNA, 1410 nt, Artificial Sequence
  derived and/or modified CDS sequence (wt) from neuraminidase__InfluenzaA__AGN69292
augaauccaaaucagaagauaauaaccauugguucgaucuguaugacaauuggaauagccagcuugauauuacaaauuggaaacauaauaucaauauggauuagccacucaauucaaacugagaaucagaaucagccugaaauaugcaaucaaaacgucauuacuuacgaaaacaacacuugggucaaccagacguauguuaacaucagcaacacuaauuuuguugcugaacaggcaguagcuucagugaaauuagcgggcaauuccucccucuguccuguuaguggaugggcuauauacaguaaagauaauaguguaagaaucgguuccaagggggauguguuugucauaagggagccauucauuucaugcucccacuuggaaugcagaacuuucuucuuaacucaaggggcccuuuugaaugacaaacacucuaacggaacaauuaaggacagaagcccauaucgaacauugaugagcuguccuauuggugaaguuccuucuccauacaacucaagauuugagucagucgcuuggucagcaagugccugccaugauggcacaaguuggcuaacaauuggaauuucuggcccagauaauggggcaguggcugugcugaaauacaauggcauaauaacagauacuaucaagaguuggagaaaaaacauauuaagaacacaagagucugaaugugcaugcguuaaugguucuugcuuuacaguaaugacugauggaccaaguaauggacaggccucguacaaggucuuuaagauagaaaaggggaaaguagucaaaucaguugaguugaaugccccuaauuaucacuaugaggaaugcuccuguuauccugaaucuggugaaaucacauguguguguagggauaauuggcauggcucaaauaggccgugggugucuuuuaaucagaaucuggaauaucaaaugggauacauaugcagugggauuuucggagauaauccacgcccuaaugauaaaacaggcaguugugguccaguauuuucuaauggggcaaaugggguaaaaggauuuucguuuaaauacggcaaugguguuuggauaggaagaacuaaaagcauuaguucaaggauggguuuugagaugauuugggauccggacggauggaccaaaacagacgauaaauucucaguaaagcaagauaucauaggaauaaaugauuggucaggauacaguggcaguuuuguucaacauccagaauugaccggacuggacuguaugaggccuugcuuuuggguugaacuaaucagagggcgacccaaagagaacacaaucuggacuagcgggaguagcauauccuuuugugguguaaauagugacacaguggguuggucuuggccagacggugcugaguugccauucaccauugacaaguaa

SEQ ID NO: 55480 - RNA, 1410 nt, Artificial Sequence
  derived and/or modified CDS sequence (wt) from neuraminidase__InfluenzaA__AGN69316
augaauccaaaucagaagauaauaaccauugguucgaucuguaugacaauuggaauagccagcuugauauuacaaauuggaaacauaauaucaauauggauuagccacucaauucaaacugagaaucagaaucagccugaaauaugcaaucaaaacgucauuacuuacgaaaacaacacuugggucaaccagacguauguuaacaucagcaauacuaauuuuguugcugaacaggcaguagcuucagugaaauuagcgggcaauuccucccucuguccuguuaguggaugggcuauauacaguaaagauaauaguguaagaaucgguuccaagggggauguguuugucauaagggagccauucauuucaugcucccacuuggaaugcagaacuuucuucuuaacucaaggggcccuuuugaaugacaaacacucuaacggaacaauuaaggacagaagcccauaucgaacauugaugagcuguccuauuggugagguuccuucuccauacaacucaagauuugagucagucgcuuggucagcaagugccugccaugauggcacaaguuggcuaacaauuggaauuucuggcccagauaauggggcaguggcugugcugaaauacaauggcauaauaacagauacuaucaagaguuggagaaaaaacauauuaagaacacaagaaucugaaugugcaugcguuaaugguucuugcuuuacaguaaugacugauggaccaaguaauggacaggccucguacaaggucuuuaagauagagaaggggaaaguagucaaaacaguugaguugaaugcuccuaauuaucacuaugaggaaugcuccuguuauccugaaucuggugaaaucacauguguguguagggauaauuggcauggcucaaauaggccgugggugucuuuuaaucagaaucuggaauaucaaaugggauacauaugcagugggauuuucggagauaauccacgcccuaaugauaaaacaggcaguugugguccaguauuuucuaauggggcaaaugggguaaaaggauuuucguuuaaauacggcaaugguguuuggauagggaggacuaaaagcauuaguucaaggauggguuuugagaugauuugggauccggacggauggaccaaaacagacgauaaauucucaguaaagcaagauaucauaggaauaaaugauuggucaggauacaguggcaguuuuguucaacauccagaauugaccggacuggacuguaugaggccuugcuuuuggguugaacuaaucagagggcgacccaaagagaacacaaucuggacuagcgggaguagcauauccuuuugugguguaaauagugacacaguggguuggucuuggccagacggugcugaguugccauucaccauugacaaguaa

SEQ ID NO: 55481 - RNA, 1410 nt, Artificial Sequence; identical to SEQ ID NO: 55480
  derived and/or modified CDS sequence (wt) from neuraminidase__InfluenzaA__AGN69328

SEQ ID NO: 55482 - RNA, 1410 nt, Artificial Sequence
  derived and/or modified CDS sequence (wt) from neuraminidase__InfluenzaA__AGN69340
augaauccaaaucagaagauaauaaccauugguuugaucuguaugacaauuggaauagccagcuugauauuacaaauuggaaacauaauaucaauauggauuagccacucaauucaaacugagaaucaaaauaagccugaaauaugcaaucaaaacgucauuacuuacgaaaacaacacuugggucaaccagacguauguuaacgucagcaacacuaauuuuguugcugaacaggcaguagcuucagugaaauuagugggcaauuccucucucuguccuguuaguggaugggcuauauacaguaaagauaauaguguacgaaucgguuccaagggggauguguuugucauaagggagccauucauuucaugcucccacuuggaaugcagaacuuucuucuuaacucaaggggcccuucugaaugacaaacauucuaauggaacaauuaaggacagaagcccauaucgaacauugaugagcuguccuauuggugagguuccuucuccauacaacucaagguuugagucagucgcuuggucagcaagugccugccaugauggcacaaguuggcuaacaauuggaauuucuggcccagauaauggggcaguggcugugcugaaauacaauggcauaauaacagacacuaucaagaguuggagaaagaacauauuaagaacacaagagucugaaugugcaugcguuaaugguucuugcuuuacaguaaugacugauggaccaaguaaugggcaggccucguacaaggucuuuaagauagaaagggggaaaguagucaaaucaguugaguugaaugccccuaauuaucacuaugaggaaugcuccuguuauccugaaucuagugaaaucacauguguguguagagauaauuggcauggcucaaaucggccgugggugucauuuaaucagaaucuggaauaucaaaugggauacauaugcagugggguuuucggagauaauccacgcccuaaugacaaaacaggcaguugugguccaguauuuucuaauggggcaaaugggguaaaaggauuuucauuuaaauacggcaaugguguuuggauagggagaacuaaaagcacuaguucaaggauggguuuugagaugauuugggauccggauggauggaccaaaacagaugauaaauucucaguaaagcaagauaucauaggaauaacugauuggucaggauacagugggaguuuuguucaacacccggaauugaccggacuggacuguaugaggccuugcuuuuggguugaacuaaucagagggcgacccaaagagaacacaaucuggacuagcgggaguagcauauccuuuugugguguaaauagugacacaguggguuggucuuggccagacggugcugaguugccauucaccauugacaaguaa

SEQ ID NO: 55483 - RNA, 1410 nt, Artificial Sequence
  derived and/or modified CDS sequence (wt) from neuraminidase__InfluenzaA__AGO00268
augaauccaaaucagaaaauaauaaccauuggaucaaucuguaugguagucggaauaauuagccuaauauugcaaauagggaauauuaucucaauauggauuagccauucaauucaaacuggaagucaaaaccauacuggaauaugcaaccaaagcaucauuaccuauaaaaauagcaccuggguaaaucaaacauauguuaauauuagcaacacaaacguuguugcuggaaaggacacaacuucaaugauauuagccggcaauucaucucuuuguccuauccgugggugggcuauauacagcaaagauaauggcauaagaauugguuccaaaggagauguuuuugucauaagagaaccuuuuauuucauguucucacuuggaaugcaggaccuuuuuucugacccaaggcgcccuguugaaugacaagcauucaaaugggaccguuaaggacagaagcccuuauagggccuuaaugagcugcccugucggugaagcuccguccccguacaauucaagguuugaaucgguugcuuggucagcaagugcaugucaugauggcaugggcuggcuaacaaucggaauuucugguccagaugauggagcaguggcuguguuaaaauacaacggcauaauaacugaaaccauaaaaaguuggaagaagaaaauauugagaacacaagagucugaaugugucuguguaaaugguucauguuuuacuauaaugacugacggcccgagugaugggccggccucguacaaaauuuucaagauugagaaggggaagguuacuaaaucaauagaguuggaugcaccuaauucucacuacgaggaauguuccuguuacccugauaccggcaaggugaugugugugugcagagacaauuggcacgguucgaaccgaccaugggugucuuucgaucaaaaccuggauuaucaaauaggauacaucugcagugggguuuucggugacaauccgcgucccaaagauggaaaaggcagcugugguccaguguauguugauggagcaaacggaguaaagggauuuucauacagguauggugaugguguuuggauaggaaggacuaaaaguaacaguuccagacagggguuugagaugauuugggauccuaauggguggacagagacugauaguaguuucuuugugaaacaagauguaguggcaaugacugauuggucaggguacagcggaaguuucguucagcauccugagcuaacagggcugaacuguaugaggccuugcuucuggguugaauuaaucaggggacgaccuaaagaaaaaacaaucuggacuagugggagcagcaucucuuuuuguggcgugaauagugauacuguagauuggucuuggccagacggcgccgagcugccauucaccaucgacaaguag

SEQ ID NO: 55484 - RNA, 1410 nt, Artificial Sequence
  derived and/or modified CDS sequence (wt) from neuraminidase__InfluenzaA__AGO00280
augaauccaaaucagaaaauaauaaccauuggaucaaucuguaugguagucggaauaauuagccuaauauugcaaauagggaauauugucucaauauggauuagccauucaauucaaacuggaaaucaaaaccauacuggaacuugcaaccaaagcaucauuaccuauaaaaauagcaccuggguaaaucagacauaugucaauauuagcaacacuaacguuguugcugggaaggauacaacuucagugauauuagccggcaauucaucucuuugcccuauccgugggugggcuauauacagcaaagauaauggcguaagaauugguuccaaaggagauguuuuugucauaagagaacccuuuauuucauguucucacuuggaaugcaggaccuuuuuucugacccaaggcgcccuguugaaugacaagcauucaaaugggaccguuaaggacagaagcccuuauagggccuuaaugagcugcccuguuggugaagcuccguccccguacaauucaagguuugaaucgguugcuuggucagcaagugcaugucaugauggcaugggcuggcuaacaaucggaauuucugguccagaugauggagcaguggcuguguuaaaauacaacggcauaauaacugaaaccauaaaaaguuggaggaaggaaauauugagaacacaagagucugaaugugucugcguaaaugguucauguuucacuauaaugaccgacggcccgaguggugggccggccucguacaaaauuuucaagaucgagaaggggaagguuacuaaaucaauagaguuggaugcaccuaauucucacuacgaggaauguuccugcuacccugauaccagcaaggugaugugugugugcagagacaauuggcacgguucgaaccgaccaugggugucuuucgaucaaaaucuggauuaucaaaugggauacaucugcagugggguuuucggugacaauccgcgucccaaagauggaaaaggcagcugugguccaguguauguugauggagcaaacggaguaaagggauuuucauacagguaugguaaugguguuuggauaggaaggacuaaaaguaacaguuccagacagggguuugagaugauuugggauccuaauggguggacagagacugauaguaauuucuuuaugaaacaagauguaguggcaguaaccgauuggucaggguacagcggaaguuucguucaacauccugagcuaacagggcuggacuguaugaggccuugcuucuggguugaauuaaucaggggacgaccuaaagaaaauacaaucuggaccagugggagcagcauuucuuuuuguggugugaauagugauacuguagauuggucuuggccagacggugccgaguugccauucaccauugacaaguag

SEQ ID NO: 55485 - RNA, 1413 nt, Artificial Sequence
  derived and/or modified CDS sequence (wt) from neuraminidase__InfluenzaA__AGO00292
augaauccaaaucagaaaauaauaaccauuggaucaaucuguaugacaaucggaacaauuagucuaauauugcaaauagggaauauuaucucaauauggauuagccacucaauucaaacuggaagucaaaaccauacuggaauaugcaaccaaagaaucauuaccuaugaaaauaacaccuggguaaaucaaacauauguuaauauuagcaacaccaacguuguugcuggaaaggacacaacuucaaugauauuagccggcaauucaucucuuuguccuauccgugggugggcuauauacagcaaagacaacagcauaaggauugguuccaaaggagauguuuuugucauaagagaaccuuuuauaucaugcucucacuuggaaugcagaaccuuuuuucugacccaaggcgcucuauuaaaugacaagcauucaaacgggaccguuaaagacagaagcccuuauagggccuuaaugagcuguccuaucggugaagcuccgucuccguacaauucaagauuugaaucgguugcuuggucagcgagugcaugucaugauggcaugggcuggcuaacuaucggaauuucugguccagaugauggagcaguggcuguauuaaaauacaauggcauaauaacugaaaucauaaaaaguuggaggaagcaaauauuaagaacacaagagucugaaugugucuguguaaacgguucauguuuuaccauaaugaccgauggcccgagugaugggccggccucguacagaaucuucaaaaucgaaaaggggaagauuacuaaaucaauagaguuggaugcaccuaauucucauuacgaggaauguuccuguuacccagacaccggcaaagugaugugugugugcagagacaauuggcaugguucgaaucgaccaugggugucuuuuaaucaaaaccuggauuaucaaauaggauacaucugcagugggguuuucggugacaauccgcgucccaaagauggaaaaggcagcugugauccaguaaauguugauggagcagacggaguaaagggguuuucauacagguauggugaugguguuuggauaggaaggacuaaaaguaacaguuccagaaagggguuugagaugauuugggauccuaauggguggacagauaccgaugauaauuucuuagugaaacaggauguaguggcaaugacugauuggucaggguauagcggaaguuucguucaacauccugagcuaacaggauuggacuguauaaggccuugcuucuggguugaauuaaucagaggacgacccagagaaaaaacaacaaucuggacuagugggagcagcauuucuuuuuguggcgugaauagugauacuguaaauuggucuuggccagacggugccgaguugccauucacaauugacauguag

SEQ ID NO: 55486 - RNA, 1413 nt, Artificial Sequence
  derived and/or modified CDS sequence (wt) from neuraminidase__InfluenzaA__AGO00304
augaacccaaaucagaaaauaauaaccauuggaucaaucuguauggcaaucggaacaaucagucuaauacugcaaauagggaauauuaucucaauauggauuagccacucaauucaaacuggaagucaaaaccauacuggaauaugcaaccaaagaaucauuaccuaugaaaauaauaccuggguaaaucaaaccuauguuaauauuagcaacacuaacguuguugcuggaaaggacacaacuucaaugauauuagccggcaauacaucucuuuguccuauccgugggugggcuauauacagcaaggacaacaguauaagaauugguuccaaaggagauguuuuugucauaagagaaccuuuuauaucaugcucucacuuggaaugcagaaccuuuuuucugacccaaggcgcucuguuaaaugacaagcauucaaaugggaccguuaaggacagaagcccuuauagggccuuaaugagcuguccuaucggugaagcuccgucuccguacaauucaagauuugaaucgguugcuuggucagcgagugcaugucaugauggcaugggcuggcuaacaaucggaauuucugguccagaugauggagcaguggcuguauuaaaauacaacggcauaauaacugaaaucauaaaaaguuggaggaaacaaauauuaagaacacaagagucugaaugugucuguguaaacgguucauguuuuaccauaaugaccgaugguccgaguaaugggccggccucguacagaaucuucaaaaucgagaaggggaagauuacuaaaucaauagaguuggaugcaccuaauucucauuacgaggaauguuccuguuacccagacaccggcaaagugaugugugugugcagagacaauuggcaugguucgaaucgaccgugggugucuuuuaaccaaaaccuggauuaucaaauaggauacaucugcagugggguuuucggugacaauccgcgucccaaagauggaaagggcagcugugauccaguaaauguugauggagcagacggaguaaagggguuuucauacagguaugguaaugguguuuggauaggaaggacuaaaaguaacaguuccagaaaaggguuugagaugauuugggauccuaauggguggacaaauaccgaugguaauuucucagugaaacaggaugugguggcaaugacugauuggucaggguauaguggaaguuucguucaacauccugagcuaacaggauuggacuguaugagaccuugcuucuggguugaauuaaucagaggacgacccagagaaaaaacaacuaucuggacuagugggagcagcauuucuuuuuguggcgugaauagugauacuguaaauuggucuuggccagacggugccgaguugccauucaccauugacaaguag

SEQ ID NO: 55487 - RNA, 1410 nt, Artificial Sequence; identical to SEQ ID NO: 54556
  derived and/or modified CDS sequence (wt) from neuraminidase__InfluenzaA__AGO00316

SEQ ID NO: 55488 - RNA, 1410 nt, Artificial Sequence; identical to SEQ ID NO: 54000
  derived and/or modified CDS sequence (wt) from neuraminidase__InfluenzaA__AGO00328

SEQ ID NO: 55489 - RNA, 1410 nt, Artificial Sequence; identical to SEQ ID NO: 46107
  derived and/or modified CDS sequence (wt) from neuraminidase__InfluenzaA__AGO00340

SEQ ID NO: 55490 - RNA, 1365 nt, Artificial Sequence; identical to SEQ ID NO: 47731
  derived and/or modified CDS sequence (wt) from neuraminidase__InfluenzaA__AGO00352

SEQ ID NO: 55491 - RNA, 1365 nt, Artificial Sequence; identical to SEQ ID NO: 48706
  derived and/or modified CDS sequence (wt) from neuraminidase__InfluenzaA__AGO00376

SEQ ID NO: 55492 - RNA, 1365 nt, Artificial Sequence; identical to SEQ ID NO: 48706
  derived and/or modified CDS sequence (wt) from neuraminidase__InfluenzaA__AGO00388

SEQ ID NO: 55493 - RNA, 1365 nt, Artificial Sequence; identical to SEQ ID NO: 48706
  derived and/or modified CDS sequence (wt) from neuraminidase__InfluenzaA__AGO00400

SEQ ID NO: 55494 - RNA, 1365 nt, Artificial Sequence; identical to SEQ ID NO: 48706
  derived and/or modified CDS sequence (wt) from neuraminidase__InfluenzaA__AGO00412

SEQ ID NO: 55495 - RNA, 1365 nt, Artificial Sequence; identical to SEQ ID NO: 48706
  derived and/or modified CDS sequence (wt) from neuraminidase__InfluenzaA__AGO00424

SEQ ID NO: 55496 - RNA, 1365 nt, Artificial Sequence
  derived and/or modified CDS sequence (wt) from neuraminidase__InfluenzaA__AGO00436
augaauccaaaucagaaaauaauaaccauuggaucaaucugucugguagucggacuaauuagccuaauauugcaaauagggaauauaaucucaauauggauuagccauucaauucaaacuggaagucaaaaccauacuggaauaugcaaccaaaacaucauuaccuauaaaaauagcaccuggguaaaggacacaacuucagugauauuaaccggcaauucaucucuuugucccauccgugggugggcuauauacagcaaagacaauagcauaagaauugguuccaaaggagacguuuuugucauaagagagcccuuuauuucauguucucacuuggaaugcaggaccuuuuuucugacccaaggugccuuacugaaugacaagcauucaagugggacuguuaaggacagaagcccuuauagggccuuaaugagcugcccugucggugaagcuccguccccguacaauucaagauuugaaucgguugcuuggucagcaagugcaugucaugauggcaugggcuggcuaacaaucggaauuucagguccagauaauggagcaguggcuguauuaaaauacaacggcauaauaacugaaaccauaaaaaguuggaggaagaaaauauugaggacacaagagucugaaugugccuguguaaaugguucauguuuuacuauaaugacugauggcccgagugaugggcuggccucguacaaaauuuucaagaucgaaaaggggaagguuacuaaaucaauagaguugaaugcaccuaauucuaacuaugaggaauguuccuguuacccugauaccggcaaagugaugugugugugcagagacaauuggcaugguucgaaccggccaugggugucuuucgaucaaaaccuggauuaucaaauaggauacaucugcagugggguuuucggugacaacccgcgucccgaagauggaacaggcagcugugguccaguguauguugauggagcaaacggaguaaagggauuuucauauagguaugguaaugguguuuggauaggaaggaccaaaagucacaguuccagacauggguuugagaugauuugggauccuaauggauggacagagacugauaguaaguucucugugaggcaagauguuguggcaaugacugauuggucaggguauagcggaaguuucguucaacauccugagcugacagggcuagacuguaugaggccgugcuucuggguugaauuaaucaggggacgaccuaaagaaaaaacaaucuggacuagugcgagcagcauuucuuuuuguggcgugaauagugauacuguagauuggucuuggccagacggugcugaguugccauucagcauugacaaguag

SEQ ID NO: 55497 - RNA, 1365 nt, Artificial Sequence
  derived and/or modified CDS sequence (wt) from neuraminidase__InfluenzaA__AGO00448
augaauccaaaucagaaaauaauaaccauuggaucaaucugucugguagucggacuaauuagccuaauauugcaaauagggaauauaaucucaauauggauuagccauucaauucaaacuggaagucaaaaccauacuggaauaugcaaccaaaacaucauuaccuauaaaaauagcaccuggguaaaggacacaacuucagugauauuaaccggcaauucaucucuuugucccauccgugggugggcuauauacagcaaagacaauagcauaagaauugguuccaaaggagacguuuuugucauaagagagcccuuuauuucauguucucacuuggaaugcaggaccuuuuuucugacccaaggugccuuacugaaugacaagcauucaagugggacuguuaaggacagaagcccuuauagggccuuaaugagcugcccugucggugaagcuccguccccguacaauucaagauuugaaucgguugcuuggucagcaagugcaugucaugauggcaugggcuggcuaacaaucggaauuucagguccagauaauggagcaguggcuguauuaaaauacaacggcauaauaacugaaaccauaaaaaguuggaggaagaaaauauugaggacacaagagucugaaugugccuguguaaaugguucauguuuuacuauaaugacugauggcccgagugaugggcuggccucguacagaauuuucaagaucgaaaaggggaagguuacuaaaucaauagaguugaaugcaccuaauucucacuaugaggaauguuccuguuacccugauaccggcaaagugaugugugugugcagagacaauuggcaugguucgaaccggccaugggugucuuucgaucaaaaccuggauuaucaaauaggauacaucugcagugggguuuucggugacaacccgcgucccgaagauggaacaggcagcugugguccaguguauguugauggagcaaacggaguaaagggauuuucauauagguaugguaaugguguuuggauaggaaggaccaaaagucacaguuccagacauggguuugagaugauuugggauccuaauggauggacagagacugauaguaaguucucugugaggcaagauguuguggcaaugacugauuggucaggguauagcggaaguuucguucaacauccugagcugacagggcuagacuguaugaggccgugcuucuggguugaauuaaucaggggacgaccuaaagaaaaaacaaucuggacuagugcgagcagcauuucuuuuuguggcgugaauagugauacuguagauuggucuuggccagacggugcugaguugccauucagcauugacaaguag

SEQ ID NO: 55498 - RNA, 1410 nt, Artificial Sequence
  derived and/or modified CDS sequence (wt) from neuraminidase__InfluenzaA__AGQ47722
augaauacaaaucaaagaauaauaaccauugggacaaucugucuaauaguuggaauaauuagucuauuauugcagauagggaauauaaucucguuauggauaagccauucaauucagacuggagaaaaaagccauccugagauaugcaaccaaagugucauuaccuaugaaaacaacacaugggugaaccaaacuuauguaaacauuagcaauaccaauauugcugcuggacaaggugugacuccaauaauacuagccggcaauuccucucuuugcccaaucagugggugggcuauauacagcaaagacaauagcauaaggauugguuccaaaggggacauuuuugucaugagagagccauucauuucaugcucucacuuggaaugcagaaccuuuuuucugacccaaggcgcuuugcugaaugacaggcauucuaauggaaccgucaaggacaggaguccuuauagaaccuuaaugagcugccccauuggugaagcuccaucuccguacaauucaagguucgaaucaguugcuuggucagcaagugcaugccaugauggaaugggauggcuaacaaucgggauuuccgguccagauaauggagcaguggcuguuuuaaaauacaaugguauaauaacagauacaauaaaaaguuggagaaacaaaauauuaagaacacaagagucugaauguguuuguauaaacgguucguguuuuacuauaaugacugacggcccaagcaaugggcaagccucguacaaaauauucaaaauggagaaagggaagauuauuaagucaauugagcuagaugcaccuaauuaccacuaugaggaaugcuccuguuacccugauacaggcaaagugaugugugugugcagagacaauuggcaugcuucgaaucgaccaugggucucuuucgaucagaaucuugauuaucaaauaggguacauaugcagugggguuuucggugauaauccgcguuccaaugaugggaaaggcaauuguggcccaguacuuucuaauggagcaaauggaguaaagggguuuucauuuagauauggcaaugguguuuggauaggaagaacuaaaaguaucagcucuagaaguggauuugagaugguuugggauccuaauggauggacagaaacugauaguaguuucucuaugaagcaagauauuauagcauuaacugauuggucgggauacaguggaaguuuuguccaacauccugaauuaacaggaaugaacugcauaaggccuuguuucuggguugaguuaaucagagggcaacccaaggagagcacaaucuggacuaguggaagcagcauuucuuucuguggcgugaacaguggcacugcaagcuggucauggccagacggagcugaucugccauucaccauugacaaguag

SEQ ID NO: 55499 - RNA, 1413 nt, Artificial Sequence; identical to SEQ ID NO: 48465
  derived and/or modified CDS sequence (wt) from neuraminidase__InfluenzaA__AGQ47731

SEQ ID NO: 55500 - RNA, 1377 nt, Artificial Sequence
  derived and/or modified CDS sequence (wt) from neuraminidase__InfluenzaA__AGQ47743
augaauccaaaccagaaaauaauaaccauugggucaaucuguaugguagucggaauaauuagccuaauauugcaaauagggaauauaaucucaauauggauuagccauucaauucaaaccggaaaucaaaaccauaaaaauagcaccuggaugaaucaaacauauauuaauauuagcaacacuaacguuguugcugggcaggacucaacuucagugauauuaaccggcaauucaucucuuugucccauccgugggugggcuauaaacagcaaagacaauggcauaagaauugguuccaaaggagacguuuuugucauaagagagccuuuuauuucauguucucacuuggaaugcaggaccuuuuuucugacucaaggcgccuuacugaaugacaagcauucaaaugggaccguuaaggacagaagcccuuauagggccuuaaugagcugcccugucggugaagcuccguccccguacaauucaagguuugaaucgguugcuuggucagcaagugcaugucaugauggcaugggcuggcuaacaaucggaauuucugguccagauaauggagcaguggcuguauuaaaauacaacggcauaauaacugaaaccauaaaaaguuggaggaagaaaauauugagaacacaagagucugaauguaccuguguaaaugguucauguuuuaccauaaugaccgauggcccaaguaaugggcuggccucguacaaaauuuucaagaucgagaaggggaagguuacuaaaucaauagaguugaaugcaccuaauucucacuacgaggaauguuccuguuacccugauaccggcaaagugaugugugugugcagagacaauuggcacgguucgaaccgaccaugggugucuuucgaucaaaaccuagauuaucaaauaggauacaucugcagugggguuuucggugacaacccgcgucccaaagauggaacaggcaguuguggcccagugucugcugauggagcaaacggaguaaagggauuuucauauagguaugguaaugguguuuggauaggaaggacuaaaaguaacaguuccagacauggguuugagaugauuugggauccuaauggauggacagagacugauaguagguucucugugagacaagauguuguggcaaugacugaucggucaggguacagcggaaguuucguucaacauccugagcuaacagggcuagacuguaugaggccuugcuucuggguugaauuaaucaggggacgaccugaggaggaaacaaucuggacuagugggagcaucauuucuuuuuguggcgugaauagugauacuguagauuggucuuggccagacggugcugaguugccguucaccauugacaaguag

SEQ ID NO: 55501 - RNA, 1413 nt, Artificial Sequence
  derived and/or modified CDS sequence (wt) from neuraminidase__InfluenzaA__AGQ47755
augaacccaaaucagaaaauaauaaccauuggaucaaucuguauggcaaucggaacaaucagucuaauacugcaaauagggaauauuaucucaauauggauuagccacucaauucaaacuggaagucaaaaccauacuggaauaugcaaccgaagaaucguuaccuaugaaaauaauaccuggguaaaucaaacauauguuaauauuagcaacacuaacguuguugcugaaaaggacacaacuucaaugauauuagccggcaauucaucucuuuguccuauccgugggugggcuauauacagcaaggacaacagcauaagaauugguuccaaaggagauguuuuugucauaagagaaccuuuuauaucaugcucucacuuggaaugcagaaccuuuuuucugacccaaggcgcucuauuaaaugacaagcauucaaaugggaccguuaaggacagaagcccuuauagggccuuaaugagcuguccuaucggugaagcuccgucuccguacaauucaagauuugaaucgguugcuuggucagcgagugcaugucaugauggcaugggcuggcuaacaaucggaauuucugguccagaugauggagcaguggcuguauuaaaauacaacggcauaauaacugaaaucauaaaaaguuggaggaagcaaauauuaagaacacaagagucugaaugugucuguguaaacgguucauguuuuaccauaaugaccgaugguccgaguaaugggccggccucguacagaaucuucaaaaucaagaaggggaagauuacuaaaucaauagaguuggaugcaccuaauucucauuacgaggaauguuccuguuacccagacaccggcaaagugaugugugugugcagagacaauuggcaugguucgaaucgaccaugggugucuuuuaaucaaaaccuggauuaucaaauaggauacaucugcagugggguuuucggugacaauccgcgucccaaagauggaaaaggcagcugugauccaguaaauguugauggagcagacggaguaaagggguuuucauacagguaugguaaugguguuuggauaggaaggacuaaaaguaccaguuccagaaagggguuugagaugauuugggauccuaauggguggacagauaccgaugguaauuucuuagugaaacaggauguaguggcaaugacugauuggucaggguauagcggaaguuucguucaacauccugagcuaacaggauuggacuguaugaggccuugcuucuggguugaauuaaucagaggacgacccagagaaaaaacaacaaucuggacuagugggagcagcauuucuuuuuguggcgugaauagugauacuguaaauuggucuuggccagacggugccgaguugccauucaccauugacaaguag

SEQ ID NO: 55502 - RNA, 1410 nt, Artificial Sequence
  derived and/or modified CDS sequence (wt) from neuraminidase__InfluenzaA__AGQ47767
augaauccaaaucagaaaauaauaaccauuggaucaaucuguaugguagucggaauaauuagccuaauauugcaaauagggaauauugucucaauauggauuagccauucaauucaaacuggaaaucaaaaccauacuggaacuugcgaccaaagcaucauuaccuauaaaaauagcaccuggguaaaucaaacauaugucaauauuagcaacacuaacguuguugcugggaaggauacaacuucagugauauuagccggcaauucaucucuuugcccuauccgugggugggcuauauacagcaaagauaauggcguaagaauugguuccaaaggagauguuuuugucauaagagaacccuuuauuucauguucucacuuggaaugcaggaccuuuuuucugacccaaggcgcccuguugaaugacaagcauucaaaugggaccguuaaggacagaagcccuuauagggccuuaaugagcugcccuguuggugaagcuccguccccguacaacucaagguuugaaucgguugcuuggucagcaagugcaugucaugauggcaugggcuggcuaacaaucggaauuucugguccagaugauggagcaguggcuguguuaaaauacaacggcauaauaacugaaaccauaaaaaguuggaggaaggaaauauugagaacacaagagucugaaugugucugcguaaaugguucauguuucacuauaaugaccgacggcccgaguggugggccggccucguacaaaauuuucaagaucgagaaggggaagguuacuaaaucaauagaguuggaugcaccuaauucucacuacgaggaauguuccuguuacccugauaccagcaaagugaugugugugugcagagacaauuggcacgguucgaaccgaccaugggugucuuucgaucaaaaucuggauuaucaaaugggauacaucugcagugggguuuucggugacaauccgcgucccaaagauggaaaaggcagcugugguccaguguauguugauggagcaaacggaguaaagggauuuucauacaaguaugguaaugguguuuggauagggaggacuaaaaguaacaguuccagacagggguucgagaugauuugggauccuaauggguggacagagacugauaguaauuucuuuacgaaacaagauguaguggcaguaaccgauuggucaggguacagcggaaguuucguucaacauccugagcuaacagggcuggacuguaugaggccuugcuucuggguugaauuaaucaggggacgaccuaaagaaaauacaaucuggaccagugggagcagcauuucuuuuuguggugugaauagugauacuguagauuggucuuggccagacggugccgaguugccauucaccauugacaaguag

SEQ ID NO: 55503 - RNA, 1410 nt, Artificial Sequence
  derived and/or modified CDS sequence (wt) from neuraminidase__InfluenzaA__AGQ47779
augaauccaaaucagaaaauaauaaccauuggaucaaucuguaugguagucggaauaauuagccuaauauugcaaauagggaauauugucucaauauggauuagccauucaauucaaacuggaaaucaaaaccauacuggaacuugcaaccaaagcaucauuaccuauaaaaauagcaccuggguaaaucagacauaugucaauauuagcaacacuaacguuguugcugggaaggauacaacuucagugauauuagccggcaauucaucucuuugcccuauccgugggugggcuauauacagcaaagauaauggcguaagaauuggcuccaaaggagauguuuuugucauaagagaacccuuuauuucauguucucacuuggaaugcaggaccuuuuuucugacccaaggcgcccuguugaaugacaagcauucaaaugggaccguuaaggacagaagcccuuauagggccuuaaugagcugcccuguuggugaagcuccguccccguacaauucaagguuugaaucgguugcuuggucagcaagugcaugucaugauggcaugggcuggcuaacaaucggaauuucugguccagaugauggagcaguggcuguguuaaaauacaacggcauaauaacugaaaccauaaaaaguuggaggaaggaaauauugagaacacaagagucugaaugugucugcguaaaugguucauguuucacuauaaugaccgacggcccgaguggugggccggccucguacaaaauuuucaagaucgagaaggggaagguuacuaaaucaauagaguuggaugcaccuaauucucacuacgaggaauguuccuguuacccugauaccagcaaggugaugugugugugcagagacaauuggcacgguucgaaccgaccaugggugucuuucgaucaaaaucuggauuaucaaaugggauacaucugcagugggguuuucggugacaauccgcgucccaaagauggaaaaggcagcugugguccaguguauguugauggagcaaacggaguaaagggauuuucauacagguaugguaaugguguuuggauaggaaggacuaaaaguaacaguuccagacagggguuugagaugauuugggauccuaauggguggacagagacugauaguaauuucuuuaugaaacaagauguaguggcaguaaccgauuggucaggguacagcggaaguuucguucaacauccugagcuaacagggcuggacuguaugaggccuugcuucuggguugaauuaaucaggggacgaccuaaagaaaauacaaucuggaccagugggagcagcauuucuuuuuguggugugaauagugauacuguagauuggucuuggccagacggugccgaguugccauucaccauugacaaguag

SEQ ID NO: 55504 - RNA, 1413 nt, Artificial Sequence
  derived and/or modified CDS sequence (wt) from neuraminidase__InfluenzaA__AGQ47791
augaauccaaaucagaaaauaauaaccauuggaucaaucuguauggcaaucggaauaauuagucuaauauugcaaauagggaauauuaucucaauauggguuagccacucaauucaaacuggaagucaaaaccauacuggaauaugcaaccaaagaaucauuaccuaugaaaauaacaccuggguaaaucaaacacauguuaauauuagcaacacuaacguuguugcuggaaaggacacaacuucaaugauauuagccggcaauucaucucuuuguccuauccgugggugggcuauauacagcaaagacaacagcauaagaauugguuccaaaggagauguuuuugucauaagagaaccuuuuauaucauguucucacuuggaaugcagaaccuuuuuucugacccaaggcgcucuauuaaaugacaagcauucaaaugggaccguuaaggacagaagcccuuauagggccuuaaugagcuguccuauaggugaagcuccgucuccguacaauucaagguuugaaucgguugcuuggucagcaagugcaugucaugauggcaugggcuggcuaacaaucggaauuucugguccagaugauggagcaguggcuguacuaaaauacaacggcauaauaacugaaaccauaaaaaguuggaagaagcaaauauuaagaacacaagagucugaaugugucuguguaaacgguucauguuuuaccauaaugaccgauggcccgagugaugggccggccucguacagaaucuucaaaaucgagaaggggaagauuacuaaaucaauagaguuggaugcaccuaauucucauuacgaggaauguuccuguuacccagacaccggcacagugaugugugugugcagagacaauuggcaugguucgaaucgaccuugggugucuuuuaaucaaaaccuggauuaucaaauaggauacaucugcagugggguuuucggugacaauccgcgucccaaagauggaaaaggcagcugugauccaguaaauguugauggagcagacggaguaaagggguuuucauacagguaugguaaugguguuuggauaggaaggacuaaaaguaacagcuccagaaagggguuugagaugauuugggauccuaauggguggacagauaccgaugguaauuucuuagugaaacaggauguaguggcaaugacugauuggucaggguacagcggaaguuucguucaacauccugagcuaacaggauuggacuguaugaggccuugcuucuggguugaauuaaucagaggacgacccagagaaaaaacaacaaucuggacuagugggagcagcauuucuuuuuguggcgugaauagugauacuguaaauuggucuuggccagacggugccgaguugccauucaccauugacaaguag

SEQ ID NO: 55505 - RNA, 1410 nt, Artificial Sequence
  derived and/or modified CDS sequence (wt) from neuraminidase__InfluenzaA__AGQ47803
augaauccaaaucagaaaauaauaaccauuggaucaaucuguaugguagucggaauaauuagccuaauauugcaaauagggaauauuaucucaauauggauuagccauucaauucaaacuggaagucaaaaccauacuggaauaugcaaccaaagcaucauuaccuauaaaaauagcaccuggguaaaucaaacauauguuaauauuagcaacacuaacguuguugcuggaaaaggcacaacuucagugauauuagccggcaauucaucucuuuguccuauccgugggugggcuauauacagcaaagauaacggcauaagaauugguuccaaaggagauguuuuugucauaagagagccuuuuauuucauguucucacuuggaaugcaggacuuuuuuucugacccaaggcgcccuguugaaugacaagcauucaaaugggaccguuaaggacagaagcccuuauagggccuugaugagcugcccugucggugaagcuccguccccguacaauucaagguuugaaucgguugcuuggucagcaugugcaugucaugauggcaugggcuggcuaacaaucggaauuucugguccagaugaugaagcaguggcuguguuaaaauacaacggcauaauaacugaaaccauaaaaaguuggaggaagaaaauauugagaacacaagagucugaaugugucuguguaaaugguucauguuuuacuauaaugaccgacggcccgagugaugggccggccucguacaaaauuuucaagaucgagaaggggaagguuacuaaaucaauagaguuggaugcaccuaauucucacuacgaggaauguuccuguuacccugauaccggcaaggugaugugugugugcagagacaauuggcacgguucgaaccgaccaugggugucuuucgaucaaaaucuggauuaucaaauaggauacaucugcagugggguuuucggugacaauccgcgucccaaagauggaaaaggcagcugugguccgguguauguugauggagcaaacggaguaaagggauuuucauacagguaugguaaugguguuuggauaggaaggacuaaaagugacaguuccagacagggguuugagaugauuugggauccuaauggguggacagagacugauaguaauuucuuugugaaacaagauauaguggcuaugacugauuggucaggguacagcggaaguuucguucaacauccugagcuaacagggcuggacuguaugaggccuugcuucuggguugaauuaaucaggggacgaccuaaagaaaaaacaaucuggacuagugggagcagcauuucuuuuuguggcgugaauagugauacuguagacuggucuuggccagacggugccgaauugccauucaccauugacaaguag

SEQ ID NO: 55506 - RNA, 1368 nt, Artificial Sequence
  derived and/or modified CDS sequence (wt) from neuraminidase__InfluenzaA__AGQ47814
augaauccaaaucagaaaauaauaaccauuggaucaaucuguauggcaaucggaauaauuagucuaauauugcaaauagggaauauuaucucaauauggguuagccacucaauucaaacuggaagucaaaaccauacuggaauaugcaaccaaagaaucauuaccuaugaaaauaacaccuggguaaaggacacaacuucaaugacauuagccggcaauucaucucuuuguccuauccgugggugggcuauauacagcaaagacaacagcauaagaauugguuccaaaggagauguuuuugucauaagagaaccuuuuauaucauguucucacuuggaaugcagaaccuuuuuucugacucaaggcgcucuauuaaaugacaagcauucaaaugggaccguuaaggacagaagcccuuauagggccuuaaugagcuguccuauaggugaagcuccgucuccguacaauucaagguuugaaucgguugcuuggucagcaagugcaugucaugauggcaugggcuggcuaacaaucggaauuucugguccagaugauggagcaguggcuguacuaaaauacaacggcauaauaacugaaaccauaaaaaguuggaagaagcaaauauuaagaacacaagagucugaaugugucuguguaaacgguucauguuuuaccauaaugaccgauggcccgagugaugggccggccucguacagaaucuucaaaaucgagaaggggaagauuacuaaaucaauagaguuggaugcaccuaauucucauuacgaggaauguuccuguuacccagacaccggcacagugaugugugugugcagagacaauuggcaugguucgaaucgaccuugggugucuuuuaaucaaaaccuggauuaucaaauaggauacaucugcagugggguuuucggugacaauccgcgucccaaagauggaaaaggcagcugugauccaguaaauguugauggagcagacggaguaaagggguuuucauacagguaugguaaugguguuuggauaggaaggacuaaaaguaacagcuccagaaagggguuugagaugauuugggauccuaauggguggacagauaccgaugguaauuucuuagugaaacaggauguaguggcaaugacugauuggucaggguacagcggaaguuucguucaacauccugagcuaacaggauuggacuguaugaggccuugcuucuggguugaauuaaucagaggacgacccagagaaaaaacaacaaucuggacuagugggagcagcauuucuuuuuguggcgugaauagugauacuguaaauuggucuuggccagacggugccgaguugccauucaccauugacaaguag

SEQ ID NO: 55507 - RNA, 1413 nt, Artificial Sequence; identical to SEQ ID NO: 48469
  derived and/or modified CDS sequence (wt) from neuraminidase__InfluenzaA__AGQ47826

SEQ ID NO: 55508 - RNA, 1410 nt, Artificial Sequence
  derived and/or modified CDS sequence (wt) from neuraminidase__InfluenzaA__AGQ47838
augaauccaaaucaaaagauaauaacaauuggcucugucucucucaccauugcaacaauaugcuuccucaugcagauugccauccugguaacuacuguaacauugcauuucaagcaauaugagugcgacucccccgcgaacaaccaaguaaugccgugugaaccaauaauaauagaaaggaacauaacagagauaguguauuugacuaacaccaccauagagaaagagauaugccccaaauuagugggauacaggaauuggucaaagccgcaauguaaaauuacaggauuugcaccuuuuucuaaggacaauucaauucggcuuucugcugguggggauauuugggugacgagagaaccuuaugugucaugcgauccuggcaaguguuaucaauuugcacucgggcaggggaccacacuagacaacaaacauucaaaugacacaauacaugauagaaccccucaucgaacccuauugaugaaugaguuggguguuccauuucauuugggaaccaagcaaguguguauagcaugguccagcucaaguugucacgauggaaaagcauggcugcauguuugugucacuggguaugauaaaaaugcaacugcuagcuucauuuacgaugggaggcuuguagacaguauugguucauggucucaaaauauucucaggacccaggagucggaaugcguuuguaucaaugggacuuguacaguaguaaugacugauggaagugcuucagggagagcugauacuaaaauacuauucauugaagaggggaaaauuguucauauuagcccauugucaggaagugcucagcauguagaggaguguuccuguuauccucgauauccuggugucagauguaucugcagagacaacuggaaaggcucuaauaggcccgucguagauauaaaugugaaagauuauagcauugauuccaguuaugugugcucagggcuuguuggcgacacacccagaaacaacgacagaucuagcaguagcuauugccggaauccuaacaaugagaaagggaaucacggagugaaaggcugggccuuugacgauggaaaugacguguggaugggaagaacgaucagcgaggauucacgcucagguuaugaaaccuucaaagucauuggugguugguccacaccuaauuccaaauugcagauaaauaggcaagucauaguugacagcgauaauaggucagguuauucugguauuuucucuguugagggcaaaagcugcaucaauaggugcuuuuauguggaguugauaaggggaagggaacaggaaacuagaguaugguggaccucaaacaguauuguuguguuuuguggcacuucagguaccuaugggacaggcucauggccugauggggcggacaucaaucucaugccuauauaa

SEQ ID NO: 55509 - RNA, 1362 nt, Artificial Sequence
  derived and/or modified CDS sequence (wt) from neuraminidase__InfluenzaA__AGQ47850
augaauccaaaucagaaaauaauaaccauugggucaaucuguaugguagucggaauaauuagccuaauauugcaaauagggaauauaaucucaauauggauuagccauucaauucaagcugggaguagcaccugggugaaucaaacauauguuaauauuagcaacacuaacguugucgcuggaccggacgcaacuucagugauauuaaccggcaauucaucucuuugucccauccgugggugggcuauauacagcaaagacaauggcauaagaauugguuccaaaggagacauuuuugucauaagagagccuuuuauuucauguucucacuuggaaugcagggccuuuuuucugacucaaggcgccuuacugaaugacaagcauucaaaugggaccguuaaggacagaagcccuuauagggccuuaaugagcugcccugucggugaagcuccguccccguacaauucaagguuugaaucgguugcuuggucagcaagugcaugucaugauggcaugggcuggcuaacaaucggaauuucugguccagauaauggggcaguggcuguauuaaaauacaacggcauaauaacugaaaccauaaaaaguuggaggaagaaaauauugagaacacaagagucugaaugugccuguguaaaugguucauguuuuacuauaaugaccgauggcccaagugaugggccggccucguacaaaauuuucaagaucgagaaggggaagguuacuaaaucaauagaguuggaugcaccuaacucucacuacgaggaguguuccuguuacccugauaccggcaaagugaugugugugugcagagacaauuggcacgguucgaaccgaccaugggugucuuucgaucaaaaccuggauuaucaaauaggauacaucugcagugggguuuucggugacaguccgcgucccaaagauggaacaggcagcugugguccagugucuguugauggagcaaacggagugaagggauuuucauauagguaugguaaugguguuuggauaggaaggacuaaaaguaaaaguuccagacauggguuugagaugauuugggauccuaauggauggacagaaacugauaguagguucucugugagacaagauguuguggcaaugacugauuggucaggguacagcggaaguuucguucaacauccugagcuaacagggcuagacuguaugaggccuugcuucuggguugaauuaaucagggggcaaccuaaagagaaaacaaucuggacuagugggagcagcauuucuuuuuguggcgugaauagugauacuguagacuggucuuggccagacggugcugaguugccauucaccauugacaaguag

SEQ ID NO: 55510 - RNA, 1410 nt, Artificial Sequence
  derived and/or modified CDS sequence (wt) from neuraminidase__InfluenzaA__AGQ47873
augaauacaaaucaaagaacaauaaccauugggacaaucugucuaauaguuggaauaauuagucuauuauugcagauaggaaauauaaucuuguuauggaugagccauucaauucagacuggagaaaaaagccauccuaagguaugcaaccaaagugucauuaccuaugaaaacaacacaugggugaaccagacuuauguaaacauuagcaauaccaauauugcugcuggacagggugugacuccaauaauacuagccggcaauuccucucuuugcccaaucagugggugggcuauauacagcaaagacaauagcauaaggauugguuccaaaggagacauuuuugucaugagagagccauucauuucaugcucucacuuggaaugcagaaccuuuuuucugacccaaggcgcuuugcugaaugacaggcauucuaauggaaccgucaaggacaggaguccuuauagaaccuuaaugagcugccccaucggugaagcuccaucuccguacaauucaagguucgaaucaguugcuuggucagcaagugcaugccaugauggaaugggauggcuaacaaucgggauuuccgguccagauaauggagcaguggcuguuuuaaaauacaaugguauaauaacagauacaauaaaaaguuggagaaacaaaauauuaagaacacaagagucugaauguguuuguauaaacgguucguguuuuacuauaaugacugacggcccaagcaaugggcaagccucguacaaauuauucaaaauggagaaagggaagauuauuaagucaauugagcuggaugcaccuaauuaccacuaugaggaaugcuccuguuacccugauacaggcaaaguggugugugugugcagagacaauuggcaugcuucgaaucgaccaugggucucuuucgaucagaaucuugauuaucaaauaggguacauaugcagugggguuuucggugauaauccgcguucuaaugaugggaaaggcaauuguggcccaguacuuucuaauggagcaaauggagugaagggguuuucauuuagauauggcaaugguguuuggauaggaagaacuaaaaguaucagcucuagaaguggauuugagaugauuugggauccuaauggauggacagaaacugauaguaguuucucuaugaagcaagauauuauagcauuaacugauuggucgggauacaguggaaguuuuguccaacauccugaauuaacaggaaugaacugcauaaggccuuguuucuggguagaguuaaucagagggcaacccaaggagagcacaaucuggacuaguggaagcagcauuucuuucuguggcgugaacaguggcacugcaagcuggucauggccagacggagcugaucugccauucaccauugacaaguag

SEQ ID NO: 55511 - RNA, 1410 nt, Artificial Sequence; identical to SEQ ID NO: 49226
  derived and/or modified CDS sequence (wt) from neuraminidase__InfluenzaA__AGQ47885

SEQ ID NO: 55512 - RNA, 1410 nt, Artificial Sequence; identical to SEQ ID NO: 53992
  derived and/or modified CDS sequence (wt) from neuraminidase__InfluenzaA__AGQ47897

SEQ ID NO: 55513 - RNA, 1410 nt, Artificial Sequence; identical to SEQ ID NO: 46119
  derived and/or modified CDS sequence (wt) from neuraminidase__InfluenzaA__AGQ47909

SEQ ID NO: 55514 - RNA, 1410 nt, Artificial Sequence
  derived and/or modified CDS sequence (wt) from neuraminidase__InfluenzaA__AGQ47921
augaauccaaaucaaaagauaauaacaauuggcucugucucucucaccauugcaacaguaugcuuccucaugcagacugccauccugguaaccacuguaacauugcauuuuaagcaauaugagugcgacuccccugcgagcaaccaaguaaugccgugugaaccaauaauaauagaaaggaacauaacagagauaguguauuugaauaacaccaccauagagaaagagauaugccccaaaguaguggaauacagaaauuggucaaagccgcaaugucaaauuacaggauuugcaccuuuuucuaaggacaauucaauccggcuuucugcugguggggacauuugggugacgagagaaccuuaugugucaugcgaucauggcaaguguuaucaauuugcacucgggcaggggaccacacuagacaacaaacauucaaaugacacaauacaugauagaaucccucaucgaacccuauuaaugaaugaguuggguguuccauuucauuuaggaaccaggcaaguguguauagcaugguccagcucaaguugucacgauggaaaagcauggcugcauguuuguaucacuggggaugacaaaaaugcaacugcuagcuucauuuaugacgggaggcuuguggacaguauugguucauggucucaaaauauccucagaacccaggagucggaaugcguuuguaucaaugggacuugcacaguaguaaugacugauggaagugcuucaggaagagccgauaccagaauacuauucauugaagaggggaaaauuguccauauuagcccauugucaggaagugcucagcauguagaagaguguuccuguuauccuagauauccuggcgucagauguaucugcagagacaacuggaaaggcucuaauaggcccgucguagacauaaauauggaagauuauagcauugauuccaguuaugugugcucagggcuuguuggcgacacaccuagaaacgacgacagaucuagcaauagcaauugcaggaauccuaacaaugagagagggaaucaaggagugaaaggcugggccuuugacaauggagaugacguguggaugggaagaacgaucagcaaggauuuacgcucagguuaugaaacuuucaaagucauuggugguugguccacaccuaauuccaaaucgcagaucaauagacaagucauaguugacagcgauaaucggucagguuacucugguauuuucucuguugagggcaaaagcugcaucaauaggugcuuuuauguggaguugauaaggggaaggaaacaggaggcuagagugugguggaccucaaacaguauuguuguguuuuguggcacuucagguaccuauggaacaggcucauggccugauggggcgaacaucaauuucaugccuauauaa

SEQ ID NO: 55515 - RNA, 1365 nt, Artificial Sequence
  derived and/or modified CDS sequence (wt) from neuraminidase__InfluenzaA__AGQ47933
augaauccaaaucagaaaauaauaaccauuggaucaaucuguaugguagucggacuaauuagccuaauauugcaaauagggaauauaaucucaauauggauuagccauucaauucaaacuggaagucaaaaccauacuggaauaugcaaccaaaacaucauuaccuauaaaaauagcaccuggguaaaggacacaacuucagugauauuaaccggcaauucaucucuuugucccauccgugggugggcuauauacagcaaagacaauagcauaagaauugguuccaaaggagacguuuuugucauaagagagcccuuuauuucauguucucacuuggaaugcaggaccuuuuuucugacccaaggugccuuacugaaugacaggcauucaaaugggacuguuaaggacagaagcccuuauagggccuuaaugagcugcccugucggugaagcuccguccccguacaauucaagauuugaaucgguugcuuggucagcaagugcaugucaugauggcaugggcuggcuaacaaucggaauuucagguccagauaauggagcaguggcuguauuaaaauacaacggcauaauaacugaaaccauaaaaaguuggaggaagaaaauauugaggacacaagagucugaaugugccuguguaaaugguucauguuuuacuauaaugacugauggcccgagugaugggcuggccucguacaaaauuuucaagaucgaaaaggggaagguuacuaaaucaauagaguugaaugcaccuaauucucacuaugaggaauguuccuguuacccugauaccggcaaagugaugugugugugcagagacaauuggcaugguucgaaccggccaugggugucuuucgaucaaaaccuggauuaucaaauaggauacaucugcagugggguuuucggugacaacccgcgucccaaagauggaacaggcagcugugguccaguguauguugauggagcaaacggaguaaagggauuuucauauagguaugguaaugguguuuggauaggaagaaccaaaagucacaguuccagacauggguuugagaugauuugggauccuaauggauggacagagacugauaguaaguucucugugaggcaagauguuguggcaaugacugauuggucaggguauagcggaaguuucguucaacauccugagcuaacagggcuagacuguauaaggccgugcuucuggguugaauuaaucaggggacgaccuaaagaaaaaacaaucuggacuagugcgagcagcauuucuuuuuguggcgugaauagugauacuguaaauuggucuuggccagacggugcugaguugccauucaccauugacaaguag

SEQ ID NO: 55516 - RNA, 1365 nt, Artificial Sequence; identical to SEQ ID NO: 47731
  derived and/or modified CDS sequence (wt) from neuraminidase__InfluenzaA__AGQ47945

SEQ ID NO: 55517 - RNA, 1365 nt, Artificial Sequence; identical to SEQ ID NO: 47731
  derived and/or modified CDS sequence (wt) from neuraminidase__InfluenzaA__AGQ47957

SEQ ID NO: 55518 - RNA, 1365 nt, Artificial Sequence; identical to SEQ ID NO: 48706
  derived and/or modified CDS sequence (wt) from neuraminidase__InfluenzaA__AGQ47969

SEQ ID NO: 55519 - RNA, 1365 nt, Artificial Sequence; identical to SEQ ID NO: 48706
  derived and/or modified CDS sequence (wt) from neuraminidase__InfluenzaA__AGQ47981

SEQ ID NO: 55520 - RNA, 1365 nt, Artificial Sequence
  derived and/or modified CDS sequence (wt) from neuraminidase__InfluenzaA__AGQ48005
augaauccaaaucagaaaauaauaaccauuggaucaaucugucugguagucggacuaauuagccuaauauuacaaauagggaauauaaucucaauauggauuagccauucaauucaaacuggaagucaaaaccauacuggaauaugcaaccaaaacaucauuaccuauaaaaauagcaccuggguaaaggacacaacuucagugauauuaaccggcaauucaucucuuugucccauccgugggugggcuauauacagcaaagacaauagcauaagaauugguuccaaaggagacguuuuugucauaagagagcccuuuauuucauguucucacuuggaaugcaggaccuuuuuucugacccaaggugccuuacugaaugacaagcauucaagugggacuguuaaggacagaagcccuuauagggccuuaaugagcugcccugucggugaagcuccguccccguacaauucaagauuugaaucgguugcuuggucagcaagugcaugucaugauggcaugggcuggcuaacaaucggaauuucagguccagauaauggagcaguggcuguauuaaaauacaacggcauaauaacugaaaccauaaaaaguuggaggaagaaaauauugaggacacaagagucugaaugugccuguguaaaugguucauguuuuacuauaaugacugauggcccgagugaugggcuggccucguacaaaauuuucaagaucgaaaaggggaagguuacuaaaucaauagaguugaaugcaccuaauucucacuaugaggaauguuccuguuacccugauaccggcaaagugaugugugugugcagagacaauuggcaugguucgaaccggccaugggugucuuucgaucaaaaccuggauuaucaaauaggauacaucugcagugggguuuucggugacaacccgcgucccgaagauggaacaggcagcugugguccaguguauguugauggagcaaacggaguaaagggauuuucauauagguauaguaaugguguuuggauaggaaggaccaaaagucacaguuccagacauggguuugagaugauuugggauccuaauggauggacagagacugauaguaaguucucugugaggcaagauguuguggcaaugacugauuggucaggguauagcggaaguuucguucaacauccugagcugacagggcuagacuguaugaggccgugcuucuggguugaauuaaucaggggacgaccuaaagaaaaaacaaucuggacuagugcgagcagcauuucuuuuuguggcgugaauagugauacuguagauuggucuuggccagacggugcugaguugccauucagcauugacaaguag

SEQ ID NO: 55521 - RNA, 1365 nt, Artificial Sequence; identical to SEQ ID NO: 55520
  derived and/or modified CDS sequence (wt) from neuraminidase__InfluenzaA__AGQ48017

SEQ ID NO: 55522 - RNA, 1365 nt, Artificial Sequence; identical to SEQ ID NO: 48706
  derived and/or modified CDS sequence (wt) from neuraminidase__InfluenzaA__AGQ48029

SEQ ID NO: 55523 - RNA, 1365 nt, Artificial Sequence
  derived and/or modified CDS sequence (wt) from neuraminidase__InfluenzaA__AGQ48041
augaauccaaaucagaaaauaauaaccauuggaucaaucugucugguagucggacuaauuagccuaauauuacaaauagggaauauaaucucaauauggauuagccauucaauucaaacuggaagucaaaaccauacuggaauaugcaaccaaaacaucauuaccuauaaaaauagcaccuggauaaaggacacaacuucagugauauuaaccggcaauucaucucuuugucccauccgugggugggcuauauacagcaaagacaauagcauaagaauugguuccaaaggagacguuuuugucauaagagagcccuuuauuucauguucucacuuggaaugcaggaccuuuuuucugacccaaggugccuuacugaaugacaagcauucaagugggacuguuaaggacagaagcccuuauagggccuuaaugagcugcccugucggugaagcuccguccccguacaauucaagauuugaaucgguugcuuggucagcaagugcaugucaugauggcaugggcuggcuaacaaucggaauuucagguccagauaauggagcaguggcuguauuaaaauacaacggcauaauaacugaaaccauaaaaaguuggaggaagaaaauauugaggacacaagagucugaaugugccuguguaaaugguucauguuuuacuauaaugacugauggcccgagugaugggcuggccucguacaaaauuuucaagaucgaaaaggggaagguuacuaaaucaauagaguugaaugcaccuaauucucacuaugaggaauguuccuguuacccugauaccggcaaagugaugugugugugcagagacaauuggcaugguucgaaccggccaugggugucuuucgaucaaaaccuggauuaucaaauaggauacaucugcagugggguuuucggugacaacccgcgucccgaagauggaacaggcagcugugguccaguguauguugauggagcaaacggaguaaagggauuuucauauagguaugguaaugguguuuggauaggaaggaccaaaagucacaguuccagacauggguuugagaugauuugggauccuaauggauggacagagacugauaguaaguucucugugaggcaagauguuguggcaaugacugauuggucaggguauagcggaaguuucguucaacauccugagcugacagggcuagacuguaugaggccgugcuucuggguugaauuaaucaggggacgaccuaaagaaaaaacaaucuggacuagugcgagcagcauuucuuuuuguggcgugaauagugauacuguagauuggucuuggccagacggugcugaguugccauucagcauugacaaguag

SEQ ID NO: 55524 - RNA, 1365 nt, Artificial Sequence
  derived and/or modified CDS sequence (wt) from neuraminidase__InfluenzaA__AGQ48053
augaauccaaaucagaaaauaauaaccauuggaucaaucugucugguagucggacuaauuagccuaauauuacaaauagggaauauaaucucaauauggauuagccauucaauucaaacuggaagucaaaaccauacuggaauaugcaaccaaaacaucauuaccuauaaaaauagcaccuggauaaaggacacaacuucagugauauuaaccggcaauucaucucuuugucccauccgugggugggcuauauacagcaaagacaauagcauaagaauugguuccaaaggagacguuuuugucauaagagagcccuuuauuucauguucucacuuggaaugcaggaccuuuuuucugacccaaggugccuuacugaaugacaagcauucaagugggacuguuaaggacagaagcccuuauagggccuuaaugagcugcccugucggugaagcuccguccccguacaauucaagauuugaaucgguugcuuggucagcaagugcaugucaugauggcaugggcuggcuaacaaucggaauuucagguccagauaauggagcaguggcuguauuaaaauacaacggcauaauaacugaaaccauaaaaaguuggaggaagaaaauauugaggacacaagagucugaaugugccuguguaaaugguucauguuuuacuauaaugacugauggcccgagugaugggcuggccucguacaaaauuuucaagaucgaaaaggggaagguuacuaaaucaauagaguugaaugcaccuaauucucacuaugaggaauguuccuguuacccugauaccggcaaagugaugugugugugcagagacaauuggcaugguucgaaccggccaugggugucuuucgaucaaaaccuggauuaucaaauaggauacaucugcagugggguuuucggugacaacccgcgucccgaagauggaacaggcagcugugguccaguguauguugauggagcaaacggaguaaagggauuuucauauagguaugguaaugguguuuggauaggaaggaccaaaagucacaguuccagacauggguuugagaugauuugggauccuaauggauggacagagacugauaguaaguucucugugaggcaagauguuguggcaauggcugauuggucaggguauagcggaaguuucguucaacauccugagcugacagggcuagacuguaugaggccgugcuucuggguugaauuaaucaggggacgaccuaaagaaaaaacaaucuggacuagugcgagcagcauuucuuuuuguggcgugaauagugauacuguagauuggucuuggccagacggugcugaguugccauucagcauugacaaguag

SEQ ID NO: 55525 - RNA, 1410 nt, Artificial Sequence
  derived and/or modified CDS sequence (wt) from neuraminidase__InfluenzaA__AGQ81707
augaauccaaaucagaagauaauaaccauugggucaaucuguaugguaauugggauagccaguuugauguuacaaauugggaauaugaucucaauauggguuagucauucaauucagacagggaaucaauaccagccugaaccauguaaucaaaguaucaucacuuaugaaaacaacaccuggguaaaucagacguaugucaacauuagcaauacaaauuuucuuacugagcaggcugugacuucgguggcauuagcgggcaauucaucucuuugcccuauuagugggugggcuauauacaguaaggauaacgguauaagaauuggauccaagggggauguauuuguuauaagagagccauucaucucaugcucccacuuggaaugcagaaccuucuuuuuaacucagggagcucuguugaaugacaagcauucuaauggaaccgucaaagauagaagcccuuacagaaccuuaaugaguugucccgugggugaggcuccuucuccauauaacucaagguuugagucaguugcuuggucagcaagugcuugucaugauggcaucaguugguugacaauuggaauuucugguccggacaauggggcuguggcuguguugaaauacaauggcauaauaacagacacuaucaagaguuggaggaacaacauuuugagaacccaagaaucugaaugugcauguguaaauggcucuugcuuuacuguaaugacugauggaccaaguaaugggcaggcuucauauaaaaucuucaagauagaaaaaggaaaaguagucaaaucaguugaauugaaugcuccuaauuaucacuacgaggaaugcuccuguuauccugaugcaggcaaaaucauguguguaugcagggauaacuggcauggcucaaaucggccgugggugucuuucaaccaaaaucuggaauaucaaauaggauauauaugcaguggaguuuucggggacaauccacgccccaaugauggaacaggcaguugcgguccgguguccucuaauggggcauauggaguaaaaggguuuucauucaaauacgguaaugguguuuggaucggaagaacaaaaagcacuaguuccagaagugguuuugagaugauuugggauccgaauggguggacugaaacggauaguagcuucucaguaaagcaagacaucguagcaauaacugacuggucaggauacagugggaguuuuguccagcauccagaauuaacaggauuagauugcaugagaccuuguuucuggguugagcuaaucagagggcggcccaaagaaaauacaauuuggacuagugggagcagcauauccuuuugugguguagauagugacacuguggguuggucuuggccagacggugcugaguugccauucaccauugacaaguag

SEQ ID NO: 55526 - RNA, 1410 nt, Artificial Sequence
  derived and/or modified CDS sequence (wt) from neuraminidase__InfluenzaA__AGQ81715
augaauccaaaucagaagauaauagcaauugguuccgucucucuaacuauugcgacaauaugccuucucaugcagauugccaucuuaguuacgacuaugacacuacauuucaagcauaaugaaugcaccaacuccucgaauaaucaagcaguaccauguggaccaaucauaauagaaaggaacguaacagagauagugcaucuaaauagcacuaccuuagagaaggaaauuuguccuaaagcagcaggauacagggauuggucaaaaccacaaugucaaaucacaggguucgcuccuuucuccaaggacaauucaauuaggcucuccgcaaguggagauauuugggugacaagggaaccuuauguaucgugcggucuugguaaauguuaucaguuugcacuugggcaggggacuaccuuggacaacagacacucaaacggcacaucacaugauagaacuccuuauaggacacuuuuaaugaaugaguuggguguuccguuucauuuggcgaccaaacaagugugcauagcaugguccagcucaagcugucaugaugggaaagcaugguuacauguuuguguuacuggggaugacagaaaugcaacugccaguaucauuuaugaugguauacuugucgacaguauugguucauggucuaaaaacauccucagaacucaggagucagaauguguuugcaucaaugggaccuguacgguaguaaugacggaugggagugcgucaggaaaagcugacacuagaauacuauuuauuagagaggggaaaaucguacacauuagcccuuugucaggaagugcucagcauguggaggaaugcuccuguuacccccaauauccagaaguuagguguguuugcagagacaauuggaggggaucuaauagacccguucuauauauaaauauggcagauuauaguauugauuccgguuaugugugcucgggacuuguuggugacacaccaagaaaugacgauauaucuagcagcagcaauugcaaggauccuaauaacgagagaggggccccaggagugaaagggugggccuuugacagugggaaugacauuuggaugggaagaacgauugaaaaggauucgcgcucagguuaugagacuuucagggucauuggugguuggaacacugcuaauuccaagucacagacaaguagacaagucauaguugacagugguaauucgucuggguauuccggcauuuucuccauugaaggcaaaagcugcaucaacagguguuuuuauguagagcugauaagagggagaccaaaggagacuagaguaugguggacuucaaauaguaucauuguauucuguggaacuucagguacuuauggaacaggcucauggccugauggggcgaauauuaauuucauggcuauauaa

SEQ ID NO: 55527 - RNA, 1410 nt, Artificial Sequence
  derived and/or modified CDS sequence (wt) from neuraminidase__InfluenzaA__AGQ81717
augaauccaaaucagaagauaauagcaauugguuccgucucucuaacuauugcgacaauaugccuucucaugcagauugccaucuuaguuacgacuaugacaccacauuucaagcaugaugaaugcaccaacuccucgaauaaucaagcagugccauguggaccaaucauaauagaaaggaacguaacagagauagugcauauaaauagcacuaucuuagagaaggaaauuuguccuaaagcagcaggauacaggaauuggucaaaaccacaaugucaaaucauaggguucgcuccuuucuccaaggauaauucaauuaggcucuccgcaaguggcgauauuugggugacaagagaaccuuauguaucgugcggucuugguaaauguuaucaguuugcacuuggacaggggacuaccuuggacaacagacauucaaacggcacaucacaugauaggacuccucauaggacacuuuuaaugaaugaguuggguguuccguuucauuuggcgaccaaacaagugugcauagcauggucuagcucaagcugucaugaugggaaagcaugguuacauguuugugucacuggggaugauagaaaugcaacugccaguaucauuuaugaugguaugcuuguugacaguauugguucauggucuaaaaacauccucagaacucaggagucagaauguguuugcaucaauggaaccuguacgguaguaaugacagauggaagugcgucaggaaaagcugauacuagaauacuauuuauuagagaggggaaaaucguacacauuagcccuuugucaggaagugcucagcauguggaggaaugcuccuguuacccccaauauccagaaguuagguguguuugcagagacaauuggaggggaucuaauagacccguucuauauauaaauauggcagauuauaguauugauuccgguuaugugugcucgggacuuguuggugacacaccaagaaaugacgauauaucuagcagcagcaauugcaaggauccuaauaaugagagaggggccccaggagugaaagggugggccuuugacaguggaaaugacauuuggaugggaagaacgauugaaaaggauucgcgcucagguuaugagacuuucagggucauuggugguuggaacacugcuaauuccaagucacagacaaguagacaagucauaguugacagugauaauucgucuggguauucuggcauuuucuccguugaaggcaaaagcugcaucaacagguguuuuuauguagagcugauaagagggagaccaaaggagacuagagugugguggacuucaaauaguaucauuguauucuguggaacuucagguacuuauggaacaggcucauggccugauggggcaaauaucaauuucauggcuauauaa

SEQ ID NO: 55528 - RNA, 1410 nt, Artificial Sequence
  derived and/or modified CDS sequence (wt) from neuraminidase__InfluenzaA__AGQ81718
augaauccaaaucagaagauaauagcaauugguuccgucucucuaacuauugcgacaauaugccuucucaugcagauugccaucuuaguuacgacuaugacacuacauuucaagcauaaugaaugcaccaacuccucgaauaaucaagcaguaccauguggaccaaucauaauagaaaggaacuuaacagagauagugcaucugaauagcaccaucuuagagaaggaaauuuguccuaaagcagcaggauacaggaauuggucaaaaccacaaugucaaaucacaggguucgcuccuuucuccaaggacaauucaauuaggcucuccgcaaguggagauauuugggugacaagagaaccuuauguaucgugcggucuugguaaauguuaucaguuugcacuugggcaggggacuaccuuggacaacagacacucaaacggcacaucacaugauaggacuccucauagaacacuuuuaaugaaugaguuggguguuccguuucaucugucgaccaaacaagugugcauagcaugguccagcucaagcugucaugaugggaaagcaugguugcauguuuguguuacuggggaugauagaaaugcaacugccagcaucauuuaugaugguauacuuguugacaguauuguuucauggucuaaaaacauccucagaacucaggagucagaauguguuugcaucaauggaacuuguacgguaguaaugacggauggaagugcgucaggaaaagcugacacuagaauacuauuuauuagagaggggaaaaucguacacauuagcccuuugucaggaagugcucagcauguggaggaaugcuccuguuacccccgauauccagaaguuagauguguuugcagagacaauuggaggggaucuaauagaccaguucuauauauaaauauggcagauuauaguauugauuccgguuaugugugcucgggacuuguuggugacacaccgagaaaugacgauacaucuagcagcagcaauugcagggauccuaauaacgagagaggggccccaggagugaaagggugggccuuugacaguggaaaugacauuuggaugggaagaacgauugaaaaggacucgcguucagguuaugagacuuucagggucauuggugguuggaacacugcuaauuccaagucacagacaaguagacaagucauaguugacagugauaauucgucuggguauucugguguuuucuccguugaaggcaaaagcugcaucaacagguguuuuuauguagaguugauaagaggaagaccaaaggagacuagaguaugguggacuucaaauaguaucauuguauuuuguggaacuucagguacuuauggaacaggcucauggccugauggggcaaauaucaauuucauggcuauauaa

SEQ ID NO: 55529 - RNA, 1410 nt, Artificial Sequence
  derived and/or modified CDS sequence (wt) from neuraminidase__InfluenzaA__AGQ81719
augaauccaaaucagaagauaauagcaauugguuccgucucucuaacuauugcgacaauaugccuucucaugcagauugccaucuuaguuacgacuaugacacuacauuucaagcauaaugaaugcaccaacuccucgaauaaucaagcaguaccauguggaccaaucauaauagaaaggaacguaacagagauagugcaucuaaauagcacuaccuuagagaaggaaauuuguacuaaagcagcaggauacagggauuggucaaaaccacaaugucaaaucacaggguucgcuccuuucuccaaggacaauucaauuaggcucucugcaaguggagauauuugggugacaagggaaccuuauguaucgugcggucuugguaaauguuaucaguuugcacuugggcaggggacuaccuuggacaacagacacucaaauggcacaacacaugauagaacuccucauaggacacuuuuaaugaaugaguuggguguuccguuucauuuggcgaccaaacaagugugcauagcaugguccagcucaagcugucaugaugggaaagcaugguuacauguuuguguuacuggggaugacagaaaugcaacugccaguaucauuuaugaugguauacuugucgacaguauugguucauggucuaaaaacauccucagaacucaggagucagaauguguuugcaucaaugggaccuguacgguaguaaugacggaugggagugcgucaggaaaagcugacacuagaauacuauuuauuagagaggggaaaaucguacacauuagcccuuugucaggaagugcucagcauguggaggaaugcuccuguuacccccaauauccagaaguuagauguguuugcagagacaauuggaggggaucuaauagacccguucuauauauaaauauggcagauuauaguauugauuccgguuaugugugcucgggacuuguuggugacacaccaagaaaugacgauauaucuagcaacagcaauugcaaggauccuaauaacgagaguggggccccaggagugaaagggugggccuuugacagugggaaugacauuuggaugggaagaacgauugaaaaggauucgcgcucagguuaugagacuuucagggucauuggugguuggaacacugcuaauuccaagucacagacaaguagacaagucauaguugacagugauaauucgucuggguauuccggcauuuucuccauugaaggcaaaagcugcaucaacagguguuuuuauguagagcugauaagagggagaccaaaggagacuagaguaugguggacuucaaauaguaucauuguauucuguggaacuucagguacuuauggaacaggcucauggccugauggggcgaauauuaauuucauggcuauauaa

SEQ ID NO: 55530 - RNA, 1410 nt, Artificial Sequence
  derived and/or modified CDS sequence (wt) from neuraminidase__InfluenzaA__AGQ81722
augaauccaaaucagaagauaauagcaauugguuccgucucucuaacuauugcgacaauaugccuucucaugcagauugccaucuuaguuacgacuaugacaccacauuucaagcaugaugaaugcaccaacuccucgaauaaucaagcagugccauguggaccaaucauaauagaaaggaacguaacagagauagugcauauaaauagcacuaucuuagagaagggaauuuguccuaaagcagcaggauacaggaauuggucaaaaccacaaugucaaaucauaggguucgcuccuuucuccaaggauaauucaauuaggcucuccgcaaguggcgauauuugggugacaagagaaccuuauguaucgugcggucuugguaaauguuaucaguuugcacuuggacaggggacuaccuuggacaacagacauucaaacggcacaucacaugauaggacuccucauaggacacuuuuaaugaaugaguuggguguuccguuucauuuggcgaccaaacaagugugcauagcauggucuagcucaagcugucaugaugggaaagcaugguuacauguuugugucacuggggaugauagaaaugcaacugccaguaucauuuaugaugguaugcuuguugacaguauugguucauggucuaaaaacauccucagaacucaggagucagaauguguuugcaucaauggaaccuguacgguaguaaugacagauggaagugcgucaggaaaagcugauacuagaauacuauuuauuagagaggggaaaaucguacacauuagcccuuugucaggaagugcucagcauguggaggaaugcuccuguuacccccaauauccagaaguuagguguguuugcagagacaauuggaggggaucuaauagacccguucuauauauaaauauggcagauuauaguauugauuccgguuaugugugcucgggacuuguuggugacacaccaagaaaugacgauacaucuagcagcagcaauugcaaggauccuaauaaugagagaggggccccaggagugaaagggugggccuuugacaguggaaaugacauuuggaugggaagaacgauugaaaaggauucgcgcucagguuaugagacuuucagggucauuggugguuggaacacugcuaauuccaagucacagacaaguagacaagucauaguugacagugauaauucgucuggguauucuggcauuuucuccguugaaggcaaaagcugcaucaacagguguuuuuauguagagcugauaagagggagaccaaaggagacuagagugugguggacuucaaauaguaucauuguauucuguggaacuucagguacuuauggaacaggcucauggccugauggggcaaauaucaauuucauggcuauauaa

SEQ ID NO: 55531 - RNA, 1410 nt, Artificial Sequence
  derived and/or modified CDS sequence (wt) from neuraminidase__InfluenzaA__AGQ81724
augaauccaaaucagaagauaauagcaauugguuccgucucucuaacuauugcgacaauaugccuucucaugcagauugccaucuuaguuacgacuaugacacuacauuucaagcauaaugaaugcuccaacuccucgaauaaucaagcaguaccauguggaccaaucauaauagaaaggaacguaacagagauagugcaucuaaauagcacuaccuuagagaaggaaauuuguccuaaagcagcaggauacagggauuggucaaaaccacaaugucaaaucacaggguucgcuccuuucuccaaggacaauucaauuaggcucuccgcaaguggagauauuugggugacaagagaaccuuauguaucgugcggucuugguaaauguuaucaguuugcacuugggcaggggacuaccuuggacaacagacacucaaacggcacaucacaugauaggacuccucauaggacacuuuuaaugaaugaguuggguguuccguuucaucuggcgaccaaacaagugugcauagcaugguccagcucaagcugucaugaugggaaagcaugguuacauguuuguguuacuggggaugacagaaaugcaacugccaguaucauuuaugaugguauacuuguugacaguauugguucauggucuaaaaacauccucagaacucaggagucagaauguguuugcaucaaugggaccuguacgguaguaaugacggauggaagugcgucaggaaaagcugacacuagaauacuauuuauuagagaggggaaaaucguacacauuagcccuuugucaggaagugcucagcauguggaggaaugcucuuguuacccccaauauccagaaguuagguguguuugcagagacaauuggaggggaucuaauagacccguucuauauauaaacauggaagauuauaguauugauucugguuaugugugcucgggacuuguuggugacacaccaagaaaugacgauauaucuagcagcagcaauugcaaggauccuaauaacgagagaggggccccaggagugaaagggugggccuuugacaguggaaaugaccuuuggaugggaagaacgauugaaaaggauucgcgcucagguuaugagacuuucagggucauuggugguuggaacacugcuaauuccaagucacagacaaguagacaagucauaguugacagugauaauucgucuggguauucuggcauuuucuccguugaaggcaaaagcugcaucaacagguguuuuuauguagagcugauaagagggagaccaaaggagacuagaguaugguggacuucaaauaguaucauuguauucuguggaacuucagguacuuauggaacaggcucauggccugauggggcgaauaucaauuucauggcuauauaa

SEQ ID NO: 55532 - RNA, 1410 nt, Artificial Sequence
  derived and/or modified CDS sequence (wt) from neuraminidase__InfluenzaA__AGQ81726
augaauccaaaucagaagauaauagcaauugguucugucucucuaacuauugcgacaauaugccuucucaugcagauugccaucuuaguuacgacuaugacacuacauuucaagcauaaugaaugcuccaacuccucgaauaaucaagcaguaccauguggaccaaucauaauagaaaggaacauaacagagauagugcaucuaaauagcacuaccuuagagaaggaaauuuguccuaaagcagcaggauacagggauuggucaaaaccacaaugucaaaucacaggguucgcuccuuucuccaaggacaauucaauuaggcucuccgcaaguggagauauuugggugacaagagaaccuuauguaucgugcggucuugguaaauguuaucaguuugcacuugggcaggggacuaccuuggacaacagacacucaaacggcacaucacaugauaggacuccucauaggacacuuuuaaugaaugaguuggguguuccguuucauuuggcgaccaaacaagugugcauagcaugguccagcucaagcugucaugaugggaaagcaugguuacauguuuguguuacuggggaugacagaaaugcaacugccaguaucauuuaugaugguauacuuguugacaguauugguucauggucuaaaaacauccucagaacucaggagucagaaugugucugcaucaaaaggaccuguacgguaguaaugacggauggaagugcgucaggaaaagcugacacuagaauacuauuuauuagagaggggaaaaucguacacauuagcccuuugucaggaagugcucagcauguggaggaaugcuccuguuacccccaauauccagaaguuagguguguuugcagagacaauuggaggggaucuaauagacccguucuauauauaaauauggcagauuauaguauugauucugguuaugugugcucgggacuuguuggugacacaccaagaaaugacgauauaucuagcagcagcaauugcaaggauccuaauaacgagagaggggccccaggagugaaagggugggccuuugacaguggaaaugaccuuuggaugggaagaacgauugaaaaggaaucgcgcucagguuaugagacuuucagggucauuggugguuggaacacugcuaauuccaagucacagacaaguagacaagucauaguugacagugauaauucgucuggguauucuggcauuuucuccguugaaggcaaaagcugcaucaacagguguuuuuauguagagcugauaagagggagaccaaaggagacuagaguaugguggacuucaaauaguaucauuguauucuguggaacuucagguacuuauggaacaggcucauggccugauggggcgaauaucaauuucauggcuauauaa

SEQ ID NO: 55533 - RNA, 1410 nt, Artificial Sequence
  derived and/or modified CDS sequence (wt) from neuraminidase__InfluenzaA__AGQ81727
augaauccaaaucagaagauaauagcaauugguucugucucucuaacuauugcgacaauaugccuucucaugcagguugccaucuuaguuacgacuaugacacuacauuucaagcauaaugaaugcuccaacuccucgaauaaucaagcaguaccauguggaccaaucauaauagaaaggaacauaacagagauagugcaucuaaauagcacuaccuuagagaaggaaauuuguccuaaagcagcaggauacagggauuggucaaaaccacaaugucaaaucacaggguucgcuccuuucuccaaggacaauucaauuaggcucuccgcaaguggagauauuugggugacaagagaaccuuauguaucgugcggucuugguaaauguuaucaguuugcacuugggcaggggacuaccuuggacaacagacacucaaacggcacaucacaugauaggacuccucauaggacacuuuuaaugaaugaguuggguguuccguuucauuuggcgaccaaacaagugugcauagcaugguccagcucaagcugucaugaugggagagcaugguuacauguuuguguuacuggggaugacagaaaugcaacugccaguaucauuuaugaugguauacuuguugacaguauugguucauggucuaaaaacauccucagaacucaggagucagaauguguuugcaucaaugggaccuguacgguaguaaugacggauggaagugcgucaggaaaagcugacacuagaauacuauuuauuagagaggggaaaaucguacacauuagcccuuugucaggaagugcucagcauguggaggaaugcuccuguuacccccaauauccagaaguuagguguguuugcagagacaauuggaggggaucuaauagacccguucuauauauaaauauggcagauuauaguauugauucugguuaugugugcucgggacuuguuggugacacaccaagaaaugacgauauaucuagcagcagcaauugcaaggauccuaauaacgagagaggggccccaggagugaaagggugggccuuugacaguggaaaugaccuuuggaugggaagaacgauugaaaaggaaucgcgcucagguuaugagacuuucagggucauuggugguuggaacacugcuaauuccaagucacagacaaguagacaagucauaguugacagugauaauucgucuggguauucuggcauuuucuccguugaaggcaaaagcugcaucaacagguguuuuuauguagagcugauaagagggaggccaaaggagacuagaguaugguggacuucaaauaguaucauuguauucuguggaacuucagguacuuauggaacaggcucauggccugauggggcgaauaucaauuucaugccuauauaa

SEQ ID NO: 55534 - RNA, 1410 nt, Artificial Sequence
  derived and/or modified CDS sequence (wt) from neuraminidase__InfluenzaA__AGQ81728
augaauccaaaucagaagauaguagcaauuggcucuguuucccuaacuauugcgacaaugugccuccucaugcagaucgcccucuuugcuacaacuaugacacuacauuucaagcagacgggaagcacaaacuccucugacaaucaagcagugccauguggaccaaucauaauagaaaggaacauaacagaaauagugcauuugaauagcaccacuuuagaaaaggaaacuuguccuaaaucagcaggguacaggaauuggucuaaaccacaaugucaaaucacaggauucgcuccuuucuccaaggacaauucaauuaggcucuccgcagguggagauauuugggugacaagagaaccuuaugugucaugcggucuugguaaauguuaucaauuugcacuugggcaggggaccaccuuggacaacaaacacucaaacggcacaacauaugauagaacuccucauagaacccuuuuaaugaaugaguuggguguuccguuucauuuggcaaccaaacaaguguguauagcaugguccagcucaagcugccaugaugggaaagcaugguuacauguuugugucacuggggaugauaaaaaugcaacugcuaguaucauuuaugaugggauacuuguugacagcauugcuucauggucuaaaaacauccucagaacucaggagucagaaugcguuuguaucaauggaaccuguacgguaguaaugacggauggaagugcaucaggaagggcugacaccagaauacuauuuauuagagaggggaaaaucguacacaucagcccauugucaggaagugcucagcauguugaggaaugcuccuguuacccccgauauccagaaguuagauguguuugcagagacaauuggaagggauccaauagacccguucuauauauaaauauggcagauuauaguauugauuccaguuauguguguucagggauuguuggcgacacaccaagaaaugaugauagaucuagcagcagcaacugcagagauccuaauaacgaaauaggagccccaggagugaaagggugggccuucgacagugggaaugauauuuggaugggaagaacgaucgaaaaggauucgcgcucagguuaugagacuuucagggucauuggugguuggagcacagcuaauuccaagucacagauaaauagacaagucauaguugaccgugauaacucgucuggguauucugguauuuucucuguugaaggcaaaagcugcaucaacagguguuuuuauguagaguugauaagaggaagaccaaaagagaauagagugugguggacuucaaauagcaucauuguauuuuguggaacuucagguacuuauggaacaggcucauggccugauggggcgaauaucaaucucaugccgauauaa

SEQ ID NO: 55535 - RNA, 1410 nt, Artificial Sequence
  derived and/or modified CDS sequence (wt) from neuraminidase__InfluenzaA__AGQ81729
augaauccaaaucagaagauaauagcaauugguuccgucucucuaacuauugcgacaauaugccuucucaugcagauugccaucuuaguugcgacuaugacacuacauuccaagcauggugaaugcaccaacuccucgaauaaucaagcagugccauguggaccaaucauaauagaaaggaacguaacagagauagugcaucuaaauagcacuaccuuagagaaggaaauuuguccuaaagcagcaggauacagggauuggucaaaaccacaaugucaaaucacaggguucgcuccuuucuccaaggauaauucaauuaggcucuccgcaaguggcgauauuugggugacaagagaaccuuauguaucgugcggucuugguaaauguuaucaguuugcacuuggacaggggacuaccuuggacaacagacauucaaacggcacaucacaugauaggacuccucauaggacacuuuuaaugaaugaguuggguauuccguuucauuuggcgaccaaacaagugugcauagcauggucuagcucaagcugucaugaugggaaagcaugguuacauguuugugucacuggggaugauaggaaugcaacugccaguaucauuuaugaugguaugcuuguugacaguauugguucauggucuaaaaacauccucagaacucaggagucagaauguguuugcaucaauggaaccuguacgguaguaaugacagauggaagugcgucaggaaaagcugauacuagaauacuauucauuagagaggggaaaaucguacacauuagcccuuuguuaggaagugcucagcauguggaggaaugcuccuguuacccccaauauccagaaguuagguguguuugcagagacaauuggaggggaucuaauagacccguucuauauauaaauauggcagauuauaguguugauuccgguuaugugugcucgggacuuguuggugacacaccaagaaaugacgauacaucuagcagcagcaauugcaaggauccuaauaaugagagaggggccccaggagugaaagggugggccuuugacaguggaaaugacauuuggaugggaagaacgauugaaaaggauucgcgcucagguuaugagacuuucagggucauuggugguuggaacaccgcuaauuccaagucacagacaaguagacaagucauaguugacagugauaauucgucuggguauucuggcauuuucuccguugaaggcaaaagcugcaucaacagguguuuuuauguagagcugauaagagggagaccaaaggagacuagagugugguggacuucaaauaguaucauuguauucuguggaacuucagguacuuacggaacaggcucauggccugauggggcaaauaucaauuucaugccuauauaa

SEQ ID NO: 55536 - RNA, 1410 nt, Artificial Sequence
  derived and/or modified CDS sequence (wt) from neuraminidase__InfluenzaA__AGQ81730
augaauccaaaucagaagauaauagcaauugguuccgucucucuaacuauugcgacaauaugucuucucaugcagauugccaucuuaguuacgacuaugacacuacauuucaagcauaaugaaugcaucaacuccucgaauaaucaaucagugccauguggaccaaucauaauagaaaggaacguaacagagauagugcaucuaaauagcacuaccuuagagaaggaaauuuguccuaaagcagcaggauacagggauuggucaaaaccacaaugucaaaucacaggguucgcuccuuucuccaaggacaauucaauuaggcucuccgcaaguggagauauuugggugacaagagaaccuuauguaucgugcggucuugguaaauguuaucaguuugcacuugggcaggggacuaccuuggacaacagacauucaaacggcacaucacaugauaggacuccucauaggacacuuuuaaugaaugaguuggguguuccguuucauuuggcgagcaaacaagugugcauagcauggucuagcucaagcugucaugaugggaaagcaugguuacauguuugugucacuggggaugauagaaaugcaacugccaguaucauuuaugaugguaugcuuguugacaguauugguucauggucuaaaaacauccucagaacucaggagucagaguguguuugcaucaauggaaccuguacgguaguaaugacagauggaagugcgucaggagaagcugacacuagaauacuauuuauuagagaggggaaaaucguacacauuagcccuuugucaggaagugcucagcauguggaggaaugcuccuguuacccccaauauccagaaguuagguguguuugcagagacaauuggaggggaucuaauagacccguucuauauauaaauauggcagauuauaguauugauuccgguuaugugugcucgggacuuguuggugacacaccaagaaaugacgauauaucuagcagcagcaauugcaaggauccuaauaaugagagaggggccccaggagugaaagggugggccuuugacaguggaaaugacauuuggaugggaagaacgauugaaaaggauucacgcucagguuaugagacuuucagggucauuggugguuggaacacugcuaauuccaagucacagacaaguagacaagucauaguugacagugauaauucgucuggguauucuggcauuuucuccguugaaggcaaaagcugcaucaacagguguuuuuauguagagcugauaagagggagaccaaaggagacuagagugugguggacuucaaauaguaucauuguguucuguggaacuucagguacuuauggaacaggcucauggccugauggggcaaauaucaauuucauggcuauauaa

SEQ ID NO: 55537 - RNA, 1410 nt, Artificial Sequence
  derived and/or modified CDS sequence (wt) from neuraminidase__InfluenzaA__AGQ81731
augaauccaaaucagaagauaauagcaauugguucugucucucuaacuauugcgacaauaugccuucucaugcagauugccaucuuaguuacgacuaugacacuacauuucaagcauaaugaaugcuccaacuccucgaauaaucaagcaguaccauguggaccaaucauaauagaaaggaacauaacagagauagugcaucuaaauagcacuaccuuagagaaggaaauuuguccuaaaacagcaggauacagggauuggucaaaaccacaaugucaaaucacaggguucgcuccuuucuccaaggacaauucaauuaggcucuccgcaaguggagauauuugggugacaagagaaccuuauguaucgugcgguuuugguaaauguuaucaguuugcacuugggcaggggacuaccuuggacaacagacacucaaacggcacaucacaugauaggacuccucauaggacacuuuuaaugaaugaguuggguguuccguuucauuuggcgaccaaacaagugugcauagcaugguccagcucaagcugucaugaugggaaagcaugguuacauguuuguguuacuggggaugacagaaaugcaacugccaguaucauuuaugaugguauacuuguugacaguauugguucauggucuaaaaacauccucagaacucaggagucagaauguguuugcaucaaugggaccuguacgguaguaaugacggauggaagugcgucaggaaaagcugacacuagaauacuauuuauuagagaggggaaaaucguacacauuagcccuuugucaggaagugcucagcauguggaggaaugcuccuguuacccccaauauccagaaguuagguguguuugcagagacaauuggaggggaucuaauagacccguucuauauauaaauaugacagauuauaguauugauucugguuaugugugcucgggacuuguuggugacacaccaagaaaugacgauauaucuagcagcagcaauugcaaggauccuaauaacgagagaggggccccaggagugaaagggugggccuuugacaguggaaaugaccuuuggaugggaagaacgauugaaaaggaaucgcgcucagguuaugagacuuucagggucauuggugguuggaacacugcuaauuccaagucacagacaaguagacaagucauaguugacagugauaauucgucuggguauucuggcauuuucuccguugaaggcaaaagcugcaucaacagguguuuuuauguagagcugauaagagggagaccaaaggagacuagaguaugguggacuucaaauaguaucauuguauucuguggaacuucagguacuuauggaacaggcucauggccugauggggcgaauaucaauuucauggcuauauaa

SEQ ID NO: 55538 - RNA, 1410 nt, Artificial Sequence
  derived and/or modified CDS sequence (wt) from neuraminidase__InfluenzaA__AGQ81732
augaauccaaaucagaagauaauagcaauugguucugucucucuaacuauugcgacaauaugccuucucaugcagguugccaucuuaguuacgacuaugacacuacauuucaagcauaaugaaugcuccaacuccucgaauaaucaagcaguaccauguggaccaaucauaauagaaaggaacauaacagagauagugcaucuaaauagcacuaccuuagagaaggaaauuuguccuaaagcagcaggauacagggauuggucaaaaccacaaugucaaaucacaggguucgcuccuuucuccaaggacaauucaauuaggcucuccgcaaguggagauauuugggugacaagagaaccuuauguaucgugcggucuugguaaauguuaucaguuugcacuugggcaggggacuaccuuggacaacagacacucaaacggcacaucacaugauaggacuccucauaggacacuuuuaaugaaugaguuggguguuccguuucauuuggcgaccaaacaagugugcauagcaugguccagcucaagcugucaugaugggaaagcaugguuacauguuuguguuacuggggaugacagaaaugcaacugccaguaucauuuaugaugguauacuuguugacaguauugguucauggucuaaaaacauccucagaacucaggagucagaauguguuugcaucaaugggaccuguacgguaguaaugacggauggaagugcgucaggaaaagcugacacuagaauacuauuuauuagagaggggaaaaucguacacauuagcccuuugucaggaagugcucagcauguggaggaaugcuccuguuacccccaauauccagaaguuagguguguuugcagagacaauuggaggggaucuaauagacccguucuauauauaaauauggcagauuauaguauugauucugguuaugugugcucgggacuuguuggugacacaccaagaaaugacgauauaucuagcagcagcaauugcaaggauccuaauaacgagagaggggccccaggagugaaagggugggccuuugacaguggaaaugaccuuuggaugggaagaacgauugaaaaggaaucgcgcucagguuaugagacuuucagggucauuggugguuggaacacugcuaauuccaagucacagacaaguagacaagucauaguugacagugauaauucgucuggguauucuggcauuuucuccguugaaggcaaaagcugcaucaacagguguuuuuauguagagcugauaagagggagaccaaaggagacuagaguaugguggacuucaaauaguaucauuguauucuguggaacuucagguacuuauggaacaggcucauggccugauggggcgaauaucaauuucaugccuauauaa

SEQ ID NO: 55539 - RNA, 1410 nt, Artificial Sequence
  derived and/or modified CDS sequence (wt) from neuraminidase__InfluenzaA__AGQ81733
augaauccaaaucagaagauaauagcaauugguuccgucucucuaacuauugcgacaauaugccuucucaugcagauugccaucuuaguuacgacuaugacacuacauuucaagcauaaugaaugcuccaacuccucgaauagucaagcaguaccauguggaccaaucauaauagaaaggaacguaacagagauagugcaucuaaauagcacuaccuuagagaaggaaauuuguccuaaagcagcagaauacagggauuggucaaaaccacaaugucaaaucacaggguucgcuccuuucuccaaggacaauucaauuaggcucuccgcaaguggagauauuugggugacaagagaaccuuauguaucgugcggucuugguaaauguuaucaguuugcacuugggcaggggacuaccuuggacaacagacacucaaacggcacaucacaugauaggacuccucauaggacacuuuuaaugaaugaguuagguguuccguuucauuuggcgaccaaacaagugugcauagcaugguccagcucaagcugucaugaugggaaagcaugguuacauguuuguguuacuggggaugacagaaaugcaacugccaguaucauuuaugaugguauacuuguugacaguauugguucauggucuaaaaacauccucagaacucaggagucagaauguguuugcaucaaugggaccuguacgguaguaaugacggauggaagugcgucaggaaaagcugacacuagaauacuauuuauuagagaggggaaaaucguacacauuagcccuuugucaggaagugcucagcauguggaggaaugcucuuguuacccccaauauccagaaguuagguguguuugcagagacaauuggaggggaucuaauagacccguccuauauauaaacauggcagauuauaguauugauucugguuaugugugcucgggacuuguuggugacacaccaagaaaugacgauauaucuagcagcagcaauugcaaggauccuaauaacgagagaggggccccaggagugaaagggugggccuuugacaguggaaaugaccuuuggaugggaagaacgauugaaaaggauucgcgcucagguuaugagacuuucagggucauuggugguuggaacacugcuaauuccaagucacagacaaguagacaagucauaguugacagugauaauucgucuggguauucuggcauuuucuccguugaaggcaaaagcugcaucaacagguguuuuuauguagagcugauaagagggagaccaaaggagacuagaguaugguggacuucaaauaguaucauuguauucuguggaacuucagguacuuauggaacaggcucauggccugauggggcgaauaucaauuucaugccuauauaa

SEQ ID NO: 55540 - RNA, 1410 nt, Artificial Sequence
  derived and/or modified CDS sequence (wt) from neuraminidase__InfluenzaA__AGQ81734
augaauccaaaucagaagauaauagcaauugguucugucucucuaacuauugcgacaauaugccuucucaugcagauugccaucuuaguuacgacuaugacacuacauuucaagcauaaugaauacuccaacuccucgaauaaucaagcaguaccauguggaccaaucauaauagaaaggaacauaacagagauagugcaucuaaauagcacuaccuuagagaaggaaauuuguccuaaagcagcaggauacagggauuggucaaaaccacaaugucaaaucacaggguucgcuccuuucuccaaggacaauucaauuaggcucuccgcaaguggagauauuugggugacaagagaaccuuauguaucgugcggucuugguaaauguuaucaguuugcacuugggcaggggacuaccuuggacaacagacacucaaacggcacaucacaugauaggacuccucauaggacacuuuuaaugaaugaguuggguguuccguuucauuuggcgaccaaacaagugugcauagcaugguccagcucaagcugucaugaugggaaagcaugguuacauguuuguguuacuggggaugacagaaaugcaacugccaguaucauuuaugaugguauacuuguugacaguauugguucauggucuaaaaacauccucagaacucaggagucaaaaugugucugcaucaaaaggaccuguacgguaguaaagacggauggaagugcgucaggaaaagcugacacuagaauacuauuuauuagagaggggaaaaucguacacauuagcccuuugucaggaagugcucagcauguggaggaaugcuccuguuacccccaauauccagaaguuagguguguuugcagagacaauuggaggggaucuaauagacccguucuauauauaaauauggcagauuauaguauugauucugguuaugugugcucgggacuuguuggugacacaccaagaaaugacgauauaucuagcagcagcaauugcaaggauccuaauaacgagagaggggccccaggagugaaagggugggccuuugacaguggaaaugaccuuuggaugggaagaacgauugaaaaggaaucgcgcucagguuaugagacuuucagggucauuggugguuggaacacugcuaauuccaagucacagacaaguagacaagucauaguugacagugauaauucgucuggguauucuggcauuuucuccguugaaggcaaaagcugcaucaacagguguuuuuauguagagcugauaagagggagaccaaaggagacuagaguaugguggacuucaaauaguaucauuguauucuguggaacuucagguacuuauggaacaggcucauggccugauggggcgaauaucaauuucauggcuauauaa

SEQ ID NO: 55541 - RNA, 1410 nt, Artificial Sequence
  derived and/or modified CDS sequence (wt) from neuraminidase__InfluenzaA__AGQ81735
augaauccaaaucagaagauaauagcaauugguuccgucucucuaacuauugcgacaauaugccuucucaugcagauugccaucuuaguuacgacuaugacacuacauuucaagcauaaugaaugcuccaacuccucgaauagucaagcaguaccauguggaccaaucauaauagaaaggaacguaacagagauagugcaucuaaauagcacuaccuuagagaaggaaauuuguccuaaagcagcagaauacagggauuggucaaaaccacaaugucaaaucacaggguucgcuccuuucuccaaggacaauucaauuaggcucuccgcaaguggagauauuugggugacaagagaaccuuauguaucgugcggucuugguaaauguuaucaguuugcacuugggcaggggacuaccuuggacaacagacacucaaacggcacaucacaugauaggacuccucauaggacacuuuuaaugaaugaguuggguguuccguuucauuuggcgaccaaacaagugugcauagcaugguccagcucaagcugucaugaugggaaagcaugguuacauguuuguguuacuggggaugacagaaaugcaacugccaguaucauuuaugaugguauacuuguugacaguauugguucauggucuaaaaacauccucagaacucaggagucagaauguguuugcaucaaugggaccuguacgguaguaaugacggauggaagugcgucaggaaaagcugacacuagaauacuauuuauuagagaggggaaaaucguacacauuagcccuuugucaggaagugcucagcauguggaggaaugcucuuguuacccccaauauccagaaguuagguguguuugcagagacaauuggaggggaucuaauagacccguccuauauauaaacauggcagauuauaguauugauucugguuaugugugcucgggacuuguuggugacacaccaagaaaugacgauauaucuagcagcagcaauugcaaggauccuaauaacgagagaggggccccaggagugaaagggugggccuuugacaguggaaaugaccuuuggaugggaagaacgauugaaaaggauucgcgcucagguuaugagacuuucagggucauuggugguuggaacacugcuaauuccaagucacagacaaguagacaagucauaguugacagugauaauucgucuggguauucuggcauuuucuccguugaaggcaaaagcugcaucaacagguguuuuuauguagagcugauaagagggagaccaaaggagacuagaguaugguggacuucaaauaguaucauuguauucuguggaacuucagguacuuauggaacaggcucauggccugauggggcgaauaucaauuucaugccuauauaa

SEQ ID NO: 55542 - RNA, 1410 nt, Artificial Sequence
  derived and/or modified CDS sequence (wt) from neuraminidase__InfluenzaA__AGQ81736
augaauccaaaucagaagauaauagcaauugguuccgucucucuaacuauugcgacaauaugccuucucaugcagauugccaucuuaguugcaacuaugacacuacauuccaagcauggugaaugcaccgacuccucgaauaaucaagcagugccauguggaccaaucauaauagaaaggaacguaacagagauagugcaucuaaauagcacuaccuuagagaaggaaauuuguccuaaagcagcaggauacaaggauuggucaaaaccacaaugucaaaucacaggguucgcuccuuucuccaaggauaauucaauuaggcucuccgcaaguggcgauauuugggugacaagagaaccuuauguaucgugcggucuugguaaauguuaucaguuugcacuuggacaggggacuaccuuggacaacagacauucaaacggcacaucacaugauaggacuccucauaggacacuuuuaaugaaugaguuggguguuccguuucauuuggcgaccaaacaagugugcauagcauggucuagcucaagcugucaugaugggaaagcaugguuacauguuugugucacuggggaugauaggaaugcaacugccaguaucauuuaugaugguaugcuuguugacaguauugguucauggucuaaaaacauccucagaacucaggagucagaauguguuugcaucaauggaaccuguacuguaguaaugacagauggaagugcgucaggaaaagcugauacuagaauacuauucauuagagaggggaaaaucgcacacauuagcccuuugucaggaagugcucagcauguggaggaaugcuccuguuacccccaauauccagaaguuagguguguaugcagagacaauuggaggggaucuaauagacccguucuauauauaaauauggcagauuauaguguugauuccgguuaugugugcucgggacuuguuggugacacaccaagaaaugacgauacaucuagcagcagcaauugcaaggauccuaauaaugagagaggggccccaggagugaaagggugggccuuugacaguggaaaugacauuuggaugggaagaacgauugaaaaggauucgcgcucagguuaugagacuuucagggucauuggugguuggaacaccgcuaauuccaagucacagacaaguagacaagucauaguugacagugauaauucgucuggguauucuggcauuuucuccguugaaggcaaaagcugcaucaacagguguuuuuauguagagcugauaagagggagaccaaaggagacuagagugugguggacuucaaauaguaucauuguauucuguggaacuucagguacuuauggaacaggcucauggccugauggggcaaauaucaauuucaugccuauauaa

SEQ ID NO: 55543 - RNA, 1410 nt, Artificial Sequence
  derived and/or modified CDS sequence (wt) from neuraminidase__InfluenzaA__AGQ81737
augaauccaaaucagaagauaauagcaauugguucugucucucuaacuauugcgacaauaugccuucucaugcagauugccaucuuaguuacgacuaugacacuacauuucaagcauaaugaaugcuccaacuccucgaauaaucaagcaguaccauguggaccaaucauaauagaaaggaacauaacagagauagugcaucuaaauagcacuaccuuagagaaggaaauuuguccuaaagcagcaggauacagggauuggucaaaaccacaaugucaaaucacaggguucgcuccuuucuccaaggacaauucaauuaggcucuccgcaaguggagauauuugggugacaagagaaccuuauguaucgugcggucuugguaaauguuaucaguuugcacuugggcaggggacuaccuuggacaacagacacucaaacggcacaucacaugauaggacuccucauaggacacuuuuaaugaaugaguuggguguuccguuucauuuggcgaccaaacaagugugcauagcaugguccagcucaagcugucaugaugggaaagcaugguuacauguuuguguuacuggggaugacagaaaugcaacugccaguaucauuuaugaugguauacuuguugacaguauugguucauggucuaaaaacauccucagaacucaggagucagaauguguuugcaucaaugggaccuguacgguaguaaugacggauggaagugcgucaggaaaagcugacacuagaauacuauuuauuagagaggggaaaaucguacacauuagcccuuugucaggaagugcucagcauguggaggaaugcuccuguuacccccaauauccagaaguuagguguguuugcagagacaauuggaggggaucuaauagacccguucuauauauaaauauggcagauuauaguauugauucugguuaugugugcucgggacuuguuggugacacaccaagaaaugacgauauaucuagcagcagcaauugcaaggauccuaauaacgagagaggggccccaggagugaaagggugggccuuugacaguggaaaugaccuuuggaugggaagaacgauugaaaaggaaucgcgcucagguuaugagacuuucagggucauuggugguuggaacacugcuaauuccaagucacagacaaguagacaagucauaguugacagugauaauucgucuggguauucuggcauuuucuccguugaaggcaaaagcugcaucaacagguguuuuuauguagagcugauaagagggagaccaaaggagacuagaguaugguggacuucaaauaguaucauuguauucuguggaacuucagguacuuauggaacaggcucauggccugauggggcgaauaucaauuucauggcuauauaa

SEQ ID NO: 55544 - RNA, 1410 nt, Artificial Sequence
  derived and/or modified CDS sequence (wt) from neuraminidase__InfluenzaA__AGQ81738
augaauccaaaucagaagauaauagcaauugguucugucucucuaacuauugcgacaauaugccuucucaugcagguugccaucuuaguuacgacuaugacacuacauuucaagcauaaugaaugcuccaacuccucgaauaaucaagcaguaccauguggaccaaucauaauagaaaggaacauaacagagauagugcaucuaaauagcacuaccuuagagaaggaaauuuguccuaaagcagcaggauacagggauuggucaaaaccacaaugucaaaucacaggguucgcuccuuucuccaaggacaauucaauuaggcucuccgcaaguggagauauuugggugacaagagaaccuuauguaucgugcggucuugguaaauguuaucaguuugcacuugggcaggggacuaccuuggacaacagacacucaaacggcacaucacaugauaggacuccucauaggacacuuuuaaugaaugaguuggguguuccguuucauuuggcgaccaaacaagugugcauagcaugguccagcucaagcugucaugaugggaaagcaugguuacauguuuguguuacuggggaugacagaaaugcaacugccaguaucauuuaugaugguauacuuguugacaguauugguucauggucuaaaaacauccucagaacucaggagucagaauguguuugcaucaaugggaccuguacgguaguaaugacggauggaagugcgucaggaaaagcugacacuagaauacuauuuauuagagaggggaaaaucauacacauuagcccuuugucaggaagugcucagcauguggaggaaugcuccuguuacccccaauauccagaaguuagguguguuugcagagacaauuggaggggaucuaauagacccguucuauauauaaauauggcagauuauaguauugauucugguuaugugugcucgggacuuguuggugacacaccaagaaaugacgauauaucuagcagcagcaauugcaaggauccuaauaacgagagaggggccccaggagugaaagggugggccuuugacaguggaaaugaccuuuggaugggaagaacgauugaaaaggaaucgcgcucagguuaugagacuuucagggucauuggugguuggaacacugcuaauuccaagucacagacaaguagacaagucauaguugacagugauaauucgucuggguauucuggcauuuucuccguugaaggcaaaagcugcaucaacagguguuuuuauguagagcugauaagagggagaccaaaggagacuagaguaugguggacuucaaauaguaucauuguauucuguggaacuucagguacuuauggaacaggcucauggccugauggggcgaauaucaauuucaugccuauauaa

SEQ ID NO: 55545 - RNA, 1410 nt, Artificial Sequence
  derived and/or modified CDS sequence (wt) from neuraminidase__InfluenzaA__AGQ81739
augaauccaaaucagaagauaauagcaauugguuccgucucucuaacuauugcgacaauaugccuucucaugcagauugccaucuuaguuacgacuaugacacuacauuucaagcaugaugaaugcaccaacuccucgaauaaucaagcagugccaugugaaccaaucauaauagaaaggaacguaacagagauagugcauauaaauagcacuaucuuagagaaggaaauuuguccuaaagcagcaggauacaggaauuggucaaaaccacaaugucaaaucacaggguucgcuccuuucuccaaagauaauucaauuaggcucuccgcaaguggcgauauuugggugacaagagaaccuuauguaucgugcggucuugguaaauguuaucaguuugcacuuggacaggggacuaccuuggacaacagacauucaaacggcacauuaaaugauaggacuccucauaggacacuuuuaaugaaugaguuggguguuccguuucauuuggcgaccaaacaagugugcauagcauggucuagcucaagcugucaugaugggaaagcaugguuacauguuugugucacuggggaugauagaaaugcaacugccaguaucauuuaugaugauaugcuuguugacaguauugguucauggucuaaaaacauccucagaacucaggagucagaauguguuugcaucaauggaaccuguacgguaguaaugacagauggaagugcgucaggaaaagcugauacuagaauacuauuuauuagagaagggaaaaucguacacauuagcccuuugucaggaagugcucagcauguggaggaaugcuccuguuacccccaauacccagaaguuagguguguuugcagagacaauuggaggggaucuaauagacccguucuauauauaaauauggcagauuauaguauugauuccgguuaugugugcucgggacuuguuggugacacaccaagaaaugacgauauaucuagcagcagcaauugcaaggauccuaauaaugagagaggggccccaggagugaaagggugggccuuugacaguggaaaugacauuuggaugggaagaacgauugaaaaggauucgcgcucagguuaugagacuuucagggucauuggugguuggaacacugcuaauuccaagucacagacaaguagacaagucauaguugacagugauaauucgucuggguauucuggcauuuucuccguugaaggcaaaagcugcaucaacagguguuuuuauguagagcugauaagagggagaccaaaggagacuagagugugguggacuucaaauaguaucauuguauucuguggaacuucagguacuuauggaacaggcucauggccugauggggcaaauaucaauuucauggcuauauaa

SEQ ID NO: 55546 - RNA, 1410 nt, Artificial Sequence
  derived and/or modified CDS sequence (wt) from neuraminidase__InfluenzaA__AGQ81740
augaauccaaaucagaagauaguagcaauugguucugucucucuaacuauugcgacaauaugccuucucaugcagauugccaucuuaguuacgacuaugacacuacacuucaagcauggugaaugcaccaacuccucgaauaaucaagcagugccauguggaccaaucauaauagaaaggaacauaacagagauagugcaucuaaauagcacuaccuuagagaaggaaauuuguccuaaagcagcaggauacagggauuggucaaaaccacaaugucaaaucacaggguucgcuccuuucuccaaggauaauucaauuaggcucuccgcaaguggcgauauuugggugacaagagaaccuuauguaucguguggucuugguaaauguuaucaguuugcacuuggacaggggacuaccuuggacaacagacauucaaacggcacaucacaugauaggacuccucauaggacacuuuuaaugaaugaguuagguguuccguuucauuuggcgaccaaacaagugugcauagcauggucuagcucaagcugucaugaugggaaagcaugguuacauguuugugucaccggggacgauagaaaugcaacugccaguaucauuuauaaugguauacuuguugacaguauugguucauggucuaaaaacauccucagaacucaggagucagaauguguuugcaucaauggaaccuguacgguaguaaugacagauggaagugcgucaggaaaagcugauacuagaauacuauuuauuagagaggggaaaaucguacacauuagcccuuugucaggaagugcucagcauguggaggaaugcuccuguuacccccaauauccagaaguuagguguguuugcagagacaauuggaggggaucuaaucgacccguucuauauauaaauauggcggauuauaguguugauuccgguuaugugugcucgggacuuguuggugacacaccuagaaaugacgauacaucuagcagcagcaauugcaaggauccuaauaaugagagaggggccccaggagugaaagggugggccuuugacaguggaaaugacauuuggaugggaagaacgauugaaaaggauuugcgcucagguuaugagacuuucagggucauuggugguuggaacacugcuaauuccaagucacagacaaguagacaagucauaguugauagugacaauucgucuggguauucuggcauuuucuccguugaaggcaaaagcugcaucaacagguguuuuuauguagaguugauaagagggagaccaaaggagacuagagugugguggacuucaaauaguaucauuguauucuguggaacuucagguacuuauggaacaggcucauggccugauggggcaaauaucaauuucaugccuauauaa

SEQ ID NO: 55547 - RNA, 1410 nt, Artificial Sequence
  derived and/or modified CDS sequence (wt) from neuraminidase__InfluenzaA__AGQ81741
augaauccaaaucagaagauaguagcaauugguuccgucucucuaaccauugcgacaauaugccuucucaugcagauugccaucuuaguuacgacuaugacacuacacuucaagcauggugaaugcaccaacuccucgaauaaucaagcagugccauguggaccaaucauaauagaaaggaacauaacagagauagugcaucuaaauagcacuaccuuagauaaggaaauuuguccuaaagcagcaggauacagggauuggucaaaaccacaaugucaaaucacaggguucgcuccuuucuccaaggauaauucaauuaggcucucugcaaguggcgauauuugggugacaagagaaccuuauguaucgugcggucuugguaaauguuaucaguuugcacuuggacaggggacuaccuuggacaacaggcauucaaacggcacaucacaugauaggacuccucauaggacacuuuuaaugaaugaguuagguguuccguuucauuuggcgaccaaacaagugugcauagcauggucuagcucaagcugucaugaugggaaagcaugguuacauguuugugucacuggggaugauagaaaugcaacugccaguaucauuuaugaugguaugcuuguugacaguauugguucauggucuaaaaacauccucagaacucaggagucagaauguguuugcaucaauggaaccuguacgguaguaaugacagauggaagugcgucaggaaaagcugauacuagaauacuauuuauuagagaggggaaaaucguacacauuagcccuuugucaggaagugcucagcauguggaggaaugcuccuguuacccccaauauccagaaguuagguguguuugcagagacaauuggaggggaucuaaucgacccguucuauauauaaauauggcggauuauaguguugauucagguuaugugugcucgggacuuguuggugacacaccuagaaaugacgauacaucuagcagcagcaauugcaaggauccuaauaaugagagaggggccccaggagugaaagggugggccuuugacaguggaaaugacauuuggaugggaagaacgauugaaaaggauuugcgcucagguuaugagacuuucagggucauuggugguuggaacacugcuaauuccaagucacagacaaguagacaagucauaguugacagugacaauucgucuggguauucuggcauuuucuccguugaaggcaaaagcugcaucaacagguguuuuuauguagaguugauaagagggagaccaaaggagacuagagugugguggacuucaaauaguaucauuguauucuguggaacuucagguacuuauggaacaggcucauggccugauggggcaaauaucaauuucaugccuauauaa

SEQ ID NO: 55548 - RNA, 1410 nt, Artificial Sequence
  derived and/or modified CDS sequence (wt) from neuraminidase__InfluenzaA__AGQ81742
augaauccaaaucagaagauaguagcaauugguucugucucucuaacuauugcgacaauaugccuucucaugcagauugccaucuuaguuacgacuaugacacuacacuucaagcauggugaaugcaccaacuccucgaauaaucaagcagugccauguggaccaaucauaauagaaaggaacauaacagagauagugcaucuaaauagcacuaccuuagagaaggaaauuuguccuaaagcagcagaauacagggauuggucaaaaccacaaugucaaaucacaggguucgcuccuuucuccaaggauaauucaauuaggcucuccgcaaguggcgauauuugggugacaagagaaccuuauguaucguguggucuugguaaauguuaucaguuugcacuuggacaggggacuaccuuggacaacagacauucaaacggcacaucacaugauaggacuccucauaggacacuuuuaaugaaugaguuagguguuccguuucauuuggcgaccaaacaagugugcauagcauggucuagcucaagcugucaugaugggaaagcaugguuacauguuugugucacuggggacgauagaaaugcaacugccaguaucauuuaugaugguaugcuuguugacaguauugguucauggucuaaaaacauccucagaacucaggagucagaauguguuugcaucaauggaaccuguacgguaguaaugacagauggaagugcgucaggaaaagcugauacuagaauacuauuuauuagagaggggaaaaucguacacauuagcccuuugucaggaagugcucagcauguggaggaaugcuccuguuacccccaauauccagaaguuagguguguuugcagagacaauuggaggggaucuaaucgacccguucuauauauaaauauggcggauuauaguguugauuccgguuaugugugcucgggacuuguuggugacacaccuagaaaugacgauacaucuagcagcagcaauugcaaggauccuaauaaugagagaggggccccaggagugaaagggugggccuuugacaguggaaaugacauauggaugggaagaacgauugaaaaggauuugcgcucagguuaugagacuuucagggucauuggugguuggaacacugcuaauuccaagucacagacaaguagacaagucauaguugacagugacaauucgucuggguauucuggcauuuucuccguugaaggcaaaagcugcaucaacagguguuuuuauguagaguugauaagagggagaccaaaggagacuagagugugguggacuucaaauaguaucauuguauucuguggaacuucagguacuuauggaacaggcucauggccugauggggcaaauaucaauuucaugccuauauaa

SEQ ID NO: 55549 - RNA, 1410 nt, Artificial Sequence
  derived and/or modified CDS sequence (wt) from neuraminidase__InfluenzaA__AGQ81744
augaauccaaaucagaagauaauagcaauugguuccgucucucuaacuauugcgacaauaugccugcucaugcagauugccauauuaguuacgacuaugacacuacauuucaggcacgaugaaugcaccaacuccucaaacaaucaagcagugccauguggaccaaucauaauagaaaggaacguaacagagauagugcaucuaaauagcacuaccuuagaaaaggaaauuuguccuaaagcagcagaauacagggauuggucaaaaccacaaugucaaaucacaggguucguuccuuucuccaaggauaauucaauuaggcucuccgcagguggcgauauuugggugacaagagaaccuuauguaucgugcggucuugguaaauguuaucaguuugcacuuggacaggggacuaccuuggacaacagacauucaaacggcacaucacaugauaggacuccucauaggacacuuuuaaugaaugaguuggguguuccauuucauuuggcgaccaaacaggugugcauagcauggucuagcucaagcugucaugaugggaaagcaugguuacauguuuguguuacuggggaugauagaaaugcaacugccaguauuauuuaugaugguaugcuuguugacaguauugguucauggucuaaaaacauccucagaacccaggagucagaauguguuugcaucaauggaaccuguacgguaguaaugacagauggaagcgcgucaggaaaagcugauacuagaauacuauuuauuagagagggaaaaauuguacacauuagcccuuugucaggaagugcucagcauguggaggaaugcuccuguuauccccaauauccagaaguuagguguguuugcagagacaauuggaggggaucuaauagacccguucuauauauaaauguggcagauuauaguguugauuccgguuaugugugcucgggacuuguuggugacacaccaagaaaugacgauauaucuagcagcagcaauugcaaggauccuaauaaugagagaggggccccaggagugaaagggugggccuuugacaguggaaaugacauuuggaugggaagaacgauugaaaaggauucgcgcucagguuaugagacuuucagggucauugguggcuggaacacugcuaauuccaagucacagacaaguagacaagucauaguugacagugauaauccgucuggguauucuggcauuuucuccguugaaggcaaaagcugcaucaacagguguuuuuauguagagcugauaagagggagaccaaaggagacuagagugugguggacuucaaauaguaucauuguauuuuguggaacuucagguacuuauggaacaggcucauggccugauggggcaaauauuaauuucaugccuauauaa

SEQ ID NO: 55550 - RNA, 1410 nt, Artificial Sequence
  derived and/or modified CDS sequence (wt) from neuraminidase__InfluenzaA__AGQ81746
augaauccaaaucagaagauaauagcaauugguuccgucucucuaacuauugcgacaauaugccuucucaugcagauugccaucuuaguuacgacuaugacacuacauuucaagcauaaugaaugcuccaacuccucgaauagucaagcaguaccauguggaccaaucauaauagaaaggaacguaacagagauagugcaucuaaauagcacuaccuuagagaaggaaauuuguccuaaagcagcagaauacagggguuggucaaaaccacaaugucaaaucacaggguucgcuccuuucuccaaggacaauucaauuaggcucuccgcaaguggagauauuugggugacaagagaaccuuauguaucgugcgaucuugguaaauguuaucaguuugcacuugggcaggggacuaccuuggacaacagacacucaaacggcacaucacaugauaggacuccucauaggacacuuuuaaugaaugaguuggguguuccguuucauuuggcgaccaaacaagugugcauagcaugguccagcucaagcugucaugauggaaaagcaugguuacauguuuguguuacuggggaugacagaaaugcaacugccaguaucauuuaugaugguauacuuguugacaguauugguucauggucuaaaaacauccucagaacucaggagucagaauguguuugcaucaaugggaccuguacgguaguaaugacggauggaagugcgucaggaaaagcugacacuagaauacuauuuauuagagaggggaaaaucguacacauuagcccuuugucuggaagugcucagcauguggaggaaugcucuuguuacccccaauauccagaaguuagguguguuugcagagacaauuggaggggaucuaauagacccguccuauauauaaacauggcagauuauaguauugauucugguuaugugugcucggggcuuguuggugacacaccaagaaaugacgauauaucuagcagcagcaauugcaaggauccuaauaacgagagaggggccccaggagugaaagggugggccuuugacaguggaaaugaccuuuggaugggaagaacgauugaaaaggauucgcgcucagguuaugagacuuucagggucauuggugguuggaacacugcuaauuccaagucacagacaaguagacaagucauaguugacagugauaauucgucuggguauucuggcauuuucuccguugaaggcaaaagcugcaucaacagguguuuuuauguagagcugauaagagggagaccaaaggagacuagaguaugguggacuucaaauaguaucauuguguucuguggaacuucagguacuuauggaacaggcucauggccugauggggcgaauaucaauuucaugccuauauaa

SEQ ID NO: 55551 - RNA, 1410 nt, Artificial Sequence
  derived and/or modified CDS sequence (wt) from neuraminidase__InfluenzaA__AGQ81747
augaauccaaaucagaagauaguagcaauugguucugucucucuaacuauugcgacaauaugccuucucaugcagauugccaucuuaguuacgacuaugacacuacacuucaagcauggugaaugcaccaacuccucgaauaaucaagcagugccauguggaccaaucauaauagaaaggaacauaacagagauagugcaucuaaauagcacuaccuuagagaaggaaauuuguccuaaagcagcaggauacagggauuggucaaaaccacaaugucaaaucacaggguucgcuccuuucuccaaggauaauucaauuaggcucuccgcaaguggcgauauuugggugacaagagaaccuuauguaucguguggucuugguaaauguuaucaguuugcacuuggacaggggacuaccuuggacaacagacauucaaacggcacaucacaugauaggacuccucauaggacacuuuuaaugaaugaguuagguguuccguuucauuuggcgaccaaacaagugugcauagcauggucuagcucaagcugucaugaugggaaagcaugguuacauguuugugucacuggggacgauagaaaugcaacugccaguaucauuuaugaugguaugcuuguugacaguauugguucauggucuaaaaacauccucagaacucaggagucagaauguguuugcaucaauggaaccuguacgguaguaaugacagauggaagugcgucaggaaaagcugauacuagaauacuauuuauuagagaggggaaaaucguacacauuagcccuuugucaggaagugcucagcauguggaggaaugcuccuguuacccccaauauccagaaguuagguguguuugcagagacaauuggaggggaucuaaucgacccguucuauauauaaauauggcggauuauaguguugauuccgguuaugugugcucgggacuuguuggugacacaccuagaaaugacgauacaucuagcagcagcaauugcaaggauccuaauaaugagagaggggccccaggagugaaagggugggccuuugacaguggaaaugacauuuggaugggaagaacgauugaaaaggauuugcgcucagguuaugagacuuucagggucauuggugguuggaacacugcuaauuccaagucacagacaaguagacaagucauaguugacagugacaauucgucuggguauucuggcauuuucuccguugaaggcaaaagcugcaucaacagguguuuuuauguagaguugauaagagggagaccaaaggagacuagagugugguggacuucaaauaguaucauuguauucuguggaacuucagguacuuauggaacaggcucauggccugauggggcaaauaucaauuucaugccuauauaa

SEQ ID NO: 55552 - RNA, 1401 nt, Artificial Sequence
  derived and/or modified CDS sequence (wt) from neuraminidase__InfluenzaA__AGQ81749
augaauccaaaucagaagauaauagcaauuggcucgguuucucuaaccacugcgauaauauguuuucucaugcagauugccaucuuaacaacgaccaugacacuacauuucaagcagaaugaaugcagcaacccaucaaauaaucaaguggugccaugugaaccgaucauaauagagaggaacacagugcauuugaauaguacuaccauagagaaggaaauuuguucuaaaguagcagaauacaagaauuggucaaaaccacaaugucaaauuacaggguucgcuccuuucucaaaggacaacucaauuaggcuuucugcagguggggauaucugggugacaagagaaccuuauguaucaugcagucuuggcaaauguuaucaauuugcacuugggcagggaaccacccugaaaaacaagcacucaaauggcacuacacaugauagaauuccucacagaacucuuuuaaugaaugaguuaggugucccauuucauuugggaaccaaacaagugugcauagcauggucuaguucaagcugcuaugaugggaaggcaugguuacauauuuguguuacuggggaugauaaaaaugcuacugcuaguaucauuuaugaugggaugcuugcugacaguauugguucaugguccaaaaacauccucagaacucaggagucagaaugcguuugcaucaauggaacuugugcaguaguaaugacugauggaagugcaucaggaaaggcugacacuagaauauuauucauaagagaggggagaauuauaaauauuagcccauugucaggaagcgcucagcacguugaggaauguuccuguuacccccgguauccugaaguuagguguguuugcagagacaauuggaagggcuccaauaggcccguucuauauauaaauauggcagauuauaguguugaguccaguuaugugugcucaggacuuguaggcgacacaccaagaaaugaugauagcuccagcagcagcaacugcagagacccuaauaacgagagaggggccccaggagugaaagggugggccuuugacgaugggaaugauguuuggaugggacgaacaaucaaaaaagauucacgcucagguuaugagacuuuuagggucaucaaugguuggaccacggccaauuccaagucacagauaaauaggcaaguuauaguugacagugacaacuggucuggguauucugguaucuuuucaguugaagguaaaaacugcaucaacagauguuuuuauguggaauugauaagaggaagaccacaggagcccaaagugugguggacuucaaauagcaucauugcauucuguggaaccucagguaccuauggaacaggcucauggccugauggagcgaauaucaacuucaugccuauauaa

SEQ ID NO: 55553 - RNA, 1401 nt, Artificial Sequence
  derived and/or modified CDS sequence (wt) from neuraminidase__InfluenzaA__AGQ81750
augaauccaaaucagaagauaauagcaauuggcucgguuucucuaaccacugcgauaauauguuuucucaugcagauugccaucuuaacaacgaccaugacacuacauuucaagcagaaugaaugcagcaacccaucaaauaaucaaguggugccaugugaaccgaucauaauagagaggaacacagugcauuugaauaguacuaccauagagaaggaaauuuguucuaaaguagcagaauacaagaauuggucaaaaccacaaugucaaauuacaggguucgcuccuuucucaaaggacaacucaauuaggcuuucugcagguggggauaucugggugacaagagaaccuuauguaucaugcagucuuggcaaauguuaucaauuugcacuugggcagggaaccacccugaaaaacaagcacucaaauggcacuacacaugauagaauuccucacagaacucuuuuaaugaaugaguuaggugucccauuucauuugggaaccaaacaagugugcauagcauggucuaguucaagcugcuaugaugggaaggcaugguuacauauuuguguuacuggggaugauaaaaaugcuacugcuaguaucauuuaugaugggaugcuugcugacaguauugguucaugguccaaaaacauccucagaacucaggagucagaaugcguuugcaucaauggaacuugugcaguaguaaugacugauggaagugcaucaggaaaggcugacacuagaauauuauucauaagagaggggagaauuauaaauauuagcccauugucaggaagcgcucagcacguugaggaauguuccuguuacccccgguauccugaaguuagguguguuugcagagacaauuggaagggcuccaauaggcccguucuauauauaaauauggcagauuauaguguugaguccaguuaugugugcucaggacuuguaggcgacacaccaagaaaugaugauagcuccagcagcagcaacugcagagacccuaauaacgagagaggggccccaggagugaaagggugggccuuugacgaugggaaugauguuuggaugggacgaacaaucaaaaaagauucacgcucagguuaugagacuuuuagggucaucaaugguuggaccacggccaacuccaagucacagauaaauaggcaaguuauaguugacagugacaacuggucuggguauucugguaucuuuucaguugaagguaaaaacugcaucaacagauguuuuuauguggaauugauaagaggaagaccacaggagcccaaagugugguggacuucaaauagcaucauugcauucuguggaaccucagguacauauggaacaggcucauggccugauggagcgaauaucaacuucaugccuauauaa

SEQ ID NO: 55554 - RNA, 1410 nt, Artificial Sequence
  derived and/or modified CDS sequence (wt) from neuraminidase__InfluenzaA__AGQ81751
augaauccaaaucagaagauaauagcaauugguucugucucucuaacuauugcgacaauaugccuucucaugcagauugccaucuuaguuacgacuaugacacuauauuucaagcauaaugaaugcuccaacuccucgaauaaucaagcaguaccauguggaccaaucauaauagaaaggaacauaacagagauagugcaucuaaauagcacuaccuuagagaaggaaauuuguccuaaagcagcaggauacagggauuggucaaaaccacaaugucaaaucacaggguucgcuccuuucuccaaggacaauucaauuaggcucuccgcaaguggagauauuugggugacaagagaaccuuauguaucgugcggucuugguaaauguuaucaguuugcacuugggcaggggacuaccuuggacaacagacacucaaacggcacaucacaugauaggacuccucauaggacacuuuuaaugaaugaauuggguguuccguuucauuuggcgaccaaacaagugugcauagcuugguccagcucaagcugucaugaugggaaagcaugguuacauguuuguguuacuggggaugacagaaaugcaacugccaguaucauuuaugaugguauacuuguugacaguauugguucauggucuaaaaauauccucagaacucaggagucagaauguguuugcaucaaugggacuuguacgguaguaaugacagauggaagugcgucaggaaaagcugacacuagaauacuauuuauuagagaggggaaaaucguacacauuagcccuuugucaggaagugcucagcauguggaggaaugcuccuguuacccccaauauccagaagucagguguguuugcagagacaauuggaggggaucuaauagaccaguucuauauauaaauauggcagauuauaguauugauucugguuaugugugcucgggacuuguuggugacacaccaagaaaugacgauauaucuaguagcagcaauugcaaggauccuaauaacgagagaggugccccaggagugaaagggugggccuuugacaguggaaaugaccuuuggaugggaagaacgauugaaaaggaaucgcgcucagguuaugagacuuucagggucauuggugguuggaacacugcuaauuccaagucacagacaaguagacaagucauaguugacagugauaauucgucuggguauucuggcauuuucuccguugaaggcaaaagcugcaucaacagguguuuuuauguagaguugauaagagggagaccaaaggagacuagaguaugguggacuucaaauaguaucauuguauucuguggaacuucagguacuuauggaacaggcucauggccugauggggcgaauaucaauuucaugccuauauaa

SEQ ID NO: 55555 - RNA, 1410 nt, Artificial Sequence
  derived and/or modified CDS sequence (wt) from neuraminidase__InfluenzaA__AGQ81753
augaauccaaaucagaagauaguagcaauugguucugucucucuaacuauugcgacaauaugccuucugaugcagauugccaucuuaguuacgacuaugacacuacacuucaagcauggugaaugcaccaacuccucgaauaaucaagcagugccauguggaccaaucauaauagaaaggaacauaacagggauagugcaucuaaauagcacuaccuuagagaaggaaauuuguccuaaagcagcaggauacagggauuggucaaaaccacagugucaaaucacaggguucgcuccuuucuccaaggauaauucaauuaggcucuccgcaaguggcgauauuugggugacaagagaaccuuauguaucgugcggucuugguaaauguuaucaguuugcacuuggacaggggacuaccuuggacaacagacauucaaacggcacaucacaugauaggacuccucauaggacacuuuuaaugaaugaguuagguguuccguuucauuuggcgaccaaacaagugugcauagcauggucuagcucaagcugucaugaugggaaagcaugguuacauauuugugucacuggggaugauagaaaugcaacugccaguaucauuuaugaugguaugcuuguugacaguauugguucauggucuaaaaacauucucagaacucaggagucagaauguguuugcaucaauggaaccugcacgguaguaaugacagauggaagugcgucaggaaaagcugauacuagaauacuauuuauuagagaggggaaaaucguacacauuagcccuuugucaggaagugcucagcauguggaggaaugcuccuguuacccccaauauccagaaguuagauguguuugcagagacaauuggaggggaucuaaucgacccguucuauauauaaauauggcggauuauaguguugauuccgguuaugugugcucgggacuuguuggugacacaccuagaaaugacgauacaucuagcagcagcaauugcaaggauccuaacaaugagagaggggccccaggagugaaagggugggccuuugacaguggaaaugacauuuggaugggaagaacgauugaaaaggauuugcgcucagguuaugagacuuucagggucauuggugguuggaacacugcuaauuccaagucacagacaaauagacaagucauaguugacagugacaauucgucuggguauucuggcauuuucuccguugaaggcaaaagcugcaucaacagguguuuuuauguagaguugauaagagggagaccaaaggagacuagagugugguggacuucaaauaguaucauuguauucuguggaacuucagguacuuauggaacaggcucauggccugauggggcaaauauaaauuucaugccuauauaa

SEQ ID NO: 55556 - RNA, 1410 nt, Artificial Sequence; identical to SEQ ID NO: 55555
  derived and/or modified CDS sequence (wt) from neuraminidase__InfluenzaA__AGQ81754

SEQ ID NO: 55557 - RNA, 1410 nt, Artificial Sequence
  derived and/or modified CDS sequence (wt) from neuraminidase__InfluenzaA__AGQ81756
augaauccaaaucagaagauaauagcaauugguuccaucucucuaacuauugccacaauaugccuucucauacagauugccaucuuaguuacgacuaugacacuacauuucaagcauggugaaugcaccaacuccucgaacaaucaagcagugccauguggaccaaucauaauagaaaggaacguaacagagauagugcaucuaaauagcacuaccuuagagaaggaaauuugucccaaagcagcaggauacagggauuggucaaaaccacaaugucaaaucacaggguucgcuccuuucuccaaggacaauucaauuaggcucuccgcaaguggcgacauuugggugacaagagaaccuuauguaucgugcggucuugguaaauguuaucaguuugcacuuggacaggggaccacccuggacaacagacauucaaacggcacaucacaugauaggacuccucauaggacacuuuuaaugaaugaguuggguguuccauuucauuuggcgaccaaacaagugugcauagcauggucuagcucaagcugucaugaugggaaagcauggcuacauguuugugucacuggggaugauagaaaugcaacugccagcaucauuuaugauggucugcuuguugacaguauugguucauggucuaaaaacauccucagaacucaggagucagaauguguuugcaucaauggaaccuguacgguaguaaugacggauggaagugcgucaggaaaagcugauacuagaauacuauuuauuagagaggggaaaaucauacacauuagcccuuugucaggaagugcucagcauguggaggaaugcuccuguuacccccaauauccagaaguuagguguguuugcagagacaauuggaggggaucuaauagacccguucuauauauaaauauggcagauuauaguguugauuccgguuaugugugcucgggacuuguuggugacacaccaagaaaugacgauacaucuagcagcagcaauugcaaggauccuaacaaugagagaggggccccaggagugaaagggugggccuuugacaguggaaaugacauuuggaugggaagaacgauugaaaaggauucgcgcucagguuaugagacuuucagggucauuggugguuggaacacugcuaacuccaagucacagacuaguagacaagucauaguugacagugauaauucgucuggguauucuggcauuuuuuccguugaaggcaaaagcugcaucaacagguguuuuuauguagagcugauaagagggagaccaaaggagacuagagugugguggacuucaaauaguaucauuguauucuguggaacuucagguaccuauggaacaggcucauggccugauggggcaaauaucaauuucaugccuauauaa

SEQ ID NO: 55558 - RNA, 1410 nt, Artificial Sequence
  derived and/or modified CDS sequence (wt) from neuraminidase__InfluenzaA__AGQ81757
augaauccaaaucagaagauaauagcaauugguuccgucucucuaacuauugccacaauaugccuucucauacagauugccaucuuaguuacgacuaugacacuacauuucaagcauggugaaugcaccaacuccucgaacaaucaagcagugccauguggaccaaucauaauagaaaggaacguaacagagauagugcaucuaaauagcacuaccuuagagaaggaaauuugucccaaagcagcaggauacagggauuggucaaaaccacaaugucaaaucacaggguucgcuccuuucuccaaggacaauucaauuaggcucuccgcaaguggcgacauuugggugacaagagaaccuuauguaucgugcggucuugguaaauguuaucaguuugcacuuggacaggggaccacccuggacaacagacauucaaacggcacaucacaugauaggacuccucauaggacacuuuuaaugaaugaguuggguguuccauuucauuuggcgaccaaacaagugugcauagcauggucuagcucaagcugucaugaugggaaagcauggcuacauguuugugucacuggggaugauagaaaugcaacugccagcaucauuuaugauggucugcuuguugacaguauugguucauggucuaaaaacauccucagaacucaggagucagaauguguuugcaucaauggaaccuguacgguaguaaugacggauggaagugcgucaggaaaagcugauacuagaauacuauuuauuagagaggggaaaaucauacacauuagcccuuugucaggaagugcucagcauguggaggaaugcuccuguuacccccaauauccagaaguuagguguguuugcagagacaauuggaggggaucuaauagacccguucuauauauaaauauggcagauuauaguguugauuccgguuaugugugcucgggacuuguuggugacacaccaagaaaugacgauacaucuagcagcagcaauugcaaggauccuaacaaugagagaggggccccaggagugaaagggugggccuuugacaguggaaaugacauuuggaugggaagaacgauugaaaaggauucgcgcucagguuaugagacuuucagggucauuggugguuggaacacugcuaacuccaagucacagacuaguagacaagucauaguugacagugauaauucgucuggguauucuggcauuuuuuccguugaaggcaaaagcugcaucaacagguguuuuuauguagagcugauaagagggagaccaaaggagacuagagugugguggacuucaaauaguaucauuguauucuguggaacuucagguaccuauggaacaggcucauggccugauggggcaaauaucaauuucaugccuauauaa

SEQ ID NO: 55559 - RNA, 1401 nt, Artificial Sequence
  derived and/or modified CDS sequence (wt) from neuraminidase__InfluenzaA__AGQ81758
augaauccaaaucagaagauaauagcaauuggcucuguuucucuaaucauugcgauaauaugucuccucaugcagauugccaucuuaacaacgacuaugacacuacauuucaggcagaaugaaugcaguaacccaucgaauaaucaaguggugccaugugaaccgaccauaauagagaggaacacagugcauuugaauaguacuaccauagagagggaaauuuguccuaaaguagcagaauacaagaauuggucaaaaccacaaugucaaauuacaggguucgcuccuuucucaaaggacaacucaauuaggcuuucugcagguggggauaucugggugacaagagaaccuuauguuucaugcagucucggcaaauguuaucaauuugcacuugggcagggaaccacccugaaaaacaagcacucaaauggcacuacacaugauagaaccccucacagaacucuuuuaaugaaugaguuaggugucccauuucauuugggaaccaaacaagugugcauagcauggucuaguucaagcugcuaugauggaaaagcaugguuacauauuuguguuacuggggaugaugaaaaugcuacugcuaguaucaucuaugaugggaugcuuguugacaguauugguucaugguccaaaaacauccucagaacucaggagucagaaugcguuugcaucaauggaacuugugcagugguaaugacugaugguagugcaucaggaaaggcugacacuagaguauuauucauaagagaagggaaaauuauaaauauuagcccauugucaggaagugcucagcacguugaggaaugcuccuguuauccccgguauccugaaguuagguguguuugcagagacaauuggaagggcuccaauaggccuguucuauauauaaauauggcggauuauaguauugaguccaguuaugugugcucaggacuuguuggcgacacaccaagaaaugaugauagcuccagcagcagcaauugcagagacccuaauaacgaaagaggggccccaggagugaaagggugggccuuugacgacgggaaugauguuuggaugggacggacaaucaaaaaugauucacgcucagguuaugagacuuuuagggucgucaaugguuggaccauggcuaauucaaagucacagauaaauaggcaagucauaguugacagugacaacuggucuggguauucuggcaucuucucuguugaaggcaaaaaaugcaucaacagguguuuuuauguggaguugauaagagggagaccacaggaacccagagugugguggacuucaaauagcaucauuguauucuguggaaccucagguacauauggaacaggcucauggccugauggagcgaauaucaacuucaugccuauauaa

SEQ ID NO: 55560 - RNA, 1401 nt, Artificial Sequence
  derived and/or modified CDS sequence (wt) from neuraminidase__InfluenzaA__AGQ81759
augaauccaaaucagaagauaauagcaauuggcucuguuucucuaaccauugcgauaauauguuuucucauacagauugccaucuuaacaacgaccaugacacuacauuucaggcagagugaaugcagcaacccaucgaauaaucaaguggugccaugugaaccuaucauaauagaaaggaacacagugcauuugaauaguacuaucauagagaaggaaauuuguccuaaaguggcagaauacaagaauuggucaaaaccacaaugucaaauuacaggguucgcuccuuucucaaaggacaacucaauuaggcuuucugcagguggagauaucugggugacaagagaaccuuaugugucgugcagucuuggcaaauguuaucaauuugcacuugggcagggaaccacucugaaaaacaagcauucaaauggcacuacacaugauagaauuccucacagaacucuuuuaaugaaugaguuaggugucccauuucauuugggaaccaaacaagugugcauagcauggucuaguucaagcugccaugaugggaaagcaugguuacauauuugugugacuggggaugauaaaaaugcuacugcuaguauaauuuaugaugggaugcugguugacaguauugguucaugguccaaaaacauccuaagaacccaggagucagaaugcguuugcaucaauggaacuugugcaguaguaaugacugauggaagugcaucaggaaaggcugacacuagaauacuauucauaagagagggaaaaauuauaaauauuagcccauugucaggaagugcucagcauguggaggaaugcuccuguuacccccgguauccugaaguuagguguguuugcagagacaauuggaagggcuccaacaggcccguucuauauauaaauauggcagauuauagcauugaguccaguuauguaugcucaggacuuguuggcgacacaccaagagaugaugauagcuccagcagcagcaacuguagagacccuaauaacgaaagaggggccccaggagugaaagggugggccuuugacgaugggaaugacauuuggaugggacgaacaaucaaaagugauucacgcucagguuaugagacuuuuagggucauuaaugguuggaccacggcuaauuccaagucacagauaaauaggcaagucauaguugacagugacaguuggucuggguauucugguaucuucucuguugaaggcaaaaacugcaucaacagguguuuuuauguggaguugauaagagggagaccacgggagaccagaguaugguggacuucaaacagcaucauuguauucuguggaaccucagguacauauggaacaggcucauggccugauggagcgaauaucaacuucaugccuauauaa

SEQ ID NO: 55561 - RNA, 1401 nt, Artificial Sequence
  derived and/or modified CDS sequence (wt) from neuraminidase__InfluenzaA__AGQ81760
augaauccaaaucagaagauaauagcaauuggcucuguuucucuaaccauugcgauaauauguuuucucaugcagauugccaucuuaacaacgaccaugacacuacauuucaggcagaaugaaugcagcaauccaucgaauaaucaaguggugccaugugaaccuaucauaauagagaggaacacagugcauuugaauaguacuaccauagagaaggaaauuuguccuaaaguggcagaauacaagaauuggucaaaaccacaaugucaaauuacaggguuugcuccuuucucaaaggacaacucaauuaggcuuucugcagguggagauaucugggugacaagagaaccuuaugugucgugcagucuuggaaaauguuaucaguuugcacuugggcagggaaccacucugaaaaacaagcacucaaauggcacuacacacgauagaauuccucacagaacucuuuuaaugaaugaguuaggugucccauuucauuugggaaccaaacaagugugcauagcauggucuaguucaagcugccaugaugggaaagcaugguuacauauuugugugacuggggaugauaaaaaugcuacugcuaguaucauuuaugaugggaugcugguugacaguauugguucaugguccaaaaacauccuaagaacccaggagucagaaugcguuugcaucaauggaacuugugcaguaguaaugacugauggaagugcaucaggaaaggcugacacuagaguauuauucauaagagagggaaaaauuauaaauauuagcccauugucaggaagugcucagcacguggaggaaugcuccuguuacccccgguauccugaaguuagguguguuugcagagacaauuggaagggcuccaauaggcccguucuauauauaaauauggcagauuauaguauugaguccaguuauguaugcucaggacuuguuggcgacacaccaagagaugaugauagcuccaguagcagcaacuguagagacccuaauaacgaaagaggggccccaggaguaaaagggugggccuuugacgaugggaaugacauuuggaugggacgaacaaucaaaagugauucacgcucagguuaugagacuuuuagggucguuaaugguuggaucacagcuaauuccaagucacagauaaauaggcaagucauaguugacagugacagcuggucuggguauucugguaucuucucuguugaaggcaaaaacugcaucaacagguguuuuuauguggaguugauaagagggagaccacaggagaccagagugugguggacuucaaacagcaucauuguauucuguggaaccucggguacauauggaacaggcucauggccugauggagcgaauaucaacuucaugccuauauaa

SEQ ID NO: 55562 - RNA, 1401 nt, Artificial Sequence
  derived and/or modified CDS sequence (wt) from neuraminidase__InfluenzaA__AGQ81761
augaauccaaaucagaagauaauagcaauuggcucuguuucucuaaccauugcgauaauauguuuucucaugcagauugccaucuuaacaacgaccaugacacugcauuucaggcagaaugaaugcagcaauccaucgaauaaucaaguggugccaugugaaccuaucauaauagagaggaacacagugcauuugaauaguacuaccauagagaaggaaauuuguccuaaaguggcagaauacaagaauuggucaaaaccacaaugucaaauuacaggguucgccccuuucucaaaggacaacucaauuaggcuuucugcagguggagauaucugggugacaagagaaccuuaugugucgugcagucuuggcaaauguuaucaauuugcacuugggcagggaaccacucugaaaaacaagcacucaaauggcacuacacaugauagaauuccucacagaacucuuuuaaugaaugaguuaggugucccauuucauuugggaaccaaacaagugugcauagcauggucuaguucaagcugccaugaugggaaagcaugguuacauauuugugugacuggggaugauaaaaaugcuacugcuaguaucauuuaugaugggaugcugguugacaguauugguucaugguccaaaaacauccuaagaacccaggagucagaaugcguuugcaucaauggaacuugugcaguaguaaugacugauggaagugcaucaggaaaggcugacacuagaauauuauucauaaaagagggaaaaauuauaaauauuagcccauugucaggaagugcucagcacguggaggaaugcuccuguuacccccgguauccugaaguuagguguguuugcagagacaauuggaagggcuccaauaggcccguucuauauauaaauauggcagauuauaguauugaguccaguuauguaugcucaggacuuguuggcgacacaccaagagaugaugauagcuccagcagcagcaacuguagagacccuaauaacgaaagaggggccccaggagugaaagggugggccuuugacgaugggaaugacauuuggaugggacgaacaaucaaaagugauucacgcucagguuaugagacuuuuagggucguuaaugguuggaccacggccaauuccaagucacagauaaauaggcaagucauaguugacagugacagcuggucuggguauucugguaucuucucuguugaaggcaaaaacuguaucaacagguguuuuuauguggaguugauaagagggagaccacaggagaccagagugugguggacuucaaacagcaucauuguauucuguggaaccucagguacauauggaacaggcucauggccugauggagcgaauaucaacuucaugccuauauaa

SEQ ID NO: 55563 - RNA, 1401 nt, Artificial Sequence
  derived and/or modified CDS sequence (wt) from neuraminidase__InfluenzaA__AGQ81763
augaauccaaaucagaagauaauagcaauuggcucuguuucucuaaucauugcgauaauaugucuccucaugcagauugccaucuuaacaacgacuaugacacuacauuucaggcagaaugaaugcaguaacccaucgaauaaucaaguggugccaugugaaccgaucauaauagagaggaacacagugcauuugaauaguacuaccauagagagggaaauuuguccuaaaguagcagaauacaagaauuggucaaaaccacaaugucaaauuacaggguucgcuccuuucucaaaggacaacucaauuaggcuuucugcagguggggauaucugggugacaagagaaccuuauguuucaugcagucucggcaaauguuaucaauuugcacuugggcagggaaccacccugaaaaacaagcacucaaauggcacuacacaugauagaaccccucacagaacucuuuuaaugaaugaguuaggugucccauuucauuugggaaccaaacaagugugcauagcauggucuaguucaagcugcuaugauggaaaagcaugguuacauauuugugucacuggggaugauaaaaaugcuacugcuaguaucaucuaugaugggaugcuuguugacaguauugguucaugguccaaaaacauccucaggacucaggagucagaaugcguuugcaucaauggaacuugugcagugguaaugacugauggaagugcaucaggaaaggccgacacuagaguauuauucauaagagaagggaaaauuauaaauauuagcccauugucaggaagugcucagcacguugaggaaugcuccuguuacccccgguauccugaaguuagguguguuugcagagacaauuggaagggcuccaauaggcccguucuauauauaaauauggcggauuauaguauugaguccaguuaugugugcucaggacuuguuggcgacacaccaagaaaugaugauagcuccagcagcagcaacugcagagacccuaauaacgaaagaggggccccaggagugaaagggugggccuuugacgacgggaaugauguuuggaugggaaggacaaucaaaaaugguucacgcucagguuaugagacuuuuagggucgucaaugguuggaccauggcuaauucaaagucacagauaaauaggcaagucauaguugacagugacaacuggucuggguauucuggcaucuucucuguugaaggcaaaaaaugcaucaacagguguuuuuauguggaguugauaagagggagaccacaggaacccagagugugguggaccucaaauagcaucauuguauucuguggaaccucagguacauauggaacaggcucauggccugauggagcgaauaucaacuucaugccuauauaa

SEQ ID NO: 55564 - RNA, 1401 nt, Artificial Sequence
  derived and/or modified CDS sequence (wt) from neuraminidase__InfluenzaA__AGQ81766
augaauccaaaucagaagauaauagcaauuggcucuguuucucuaaccauugcgauaauauguuuucucaugcagauugccaucuuaacaacgaccaugacacugcauuucaggcagaaugaaugcagcaauccaucgaauaaucaaguggugccaugugaaccuaucauaauagagaggaacacagugcauuugaauaguacuaccauagagaaggaaauuuguccuaaaguggcagaauacaagaauuggucaaaaccacaaugucaaauuacaggguucgcuccuuucucaaaggacaacucaauuaggcuuucugcagguggagauaucugggugacaagagaaccuuaugugucgugcagucuuggcaaauguuaucaauuugcacuugggcagggaaccacucugaaaaacaagcacucaaauggcacuacacaugauagaauuccucacagaacucuuuuaaugaaugaguuaggugucccauuucauuugggaaccaaacaagugugcauagcauggucuaguucaagcugucaugaugggaaagcaugguuacauauuugugugacuggggaugauaaaaaugcuacugcuaguaucauuuaugaugggaugcugguugacaguauugguucaugguccaaaaacauccuaagaacccaggagucagaaugcguuugcaucaauggaacuugugcaguaguaaugacugauggaagugcaucaggaaaggcugacacuagaauauuauucauaagagagggaaaaauuauaaauauuaguccauugucaggaagugcucagcacguggaggaaugcuccuguuacccccgguauccugaaguuagguguguuugcagagacaauuggaagggcuccaauaggcccguucuauauauaaauauggcagauuauaguauugaguccaguuaugugugcucaggacuuguuggcgacacaccaagagaugaugauagcuucagcagcagcaacuguagagacccuaauaacgaaagaggggccccaggagugaaagggugggccuuugacgaugggaaugacauuuggaugggacgaacaaucaaaagugauucacgcucagguuaugagacuuuuagggucguuaaugguuggaccacggcuaauuccaagucacagauaaauaggcaagucauaguugacagugacagcuggucuggguauucugguaucuucucuguugaaggcaaaaacugcaucaacagguguuuuuauguggaguugauaagagggagaccacaggagaccauagugugguggacuucaaacagcaucauuguauucuguggaaccucagguacauauggaacaggcucauggccugauggagcgaauaucaacuucaugccuauauaa

SEQ ID NO: 55565 - RNA, 1401 nt, Artificial Sequence; identical to SEQ ID NO: 55564
  derived and/or modified CDS sequence (wt) from neuraminidase__InfluenzaA__AGQ81767

SEQ ID NO: 55566 - RNA, 1410 nt, Artificial Sequence
  derived and/or modified CDS sequence (wt) from neuraminidase__InfluenzaA__AGQ81768
augaauccaaaucagaagauaguagcaaucgguucugucucucuaacuauugcgacaauaugccuucucaugcagauugccaucuuaguuacgacuaugacauuacacuucaagcauggugaaugcaccaacuccucgaauaaucaagcagugccauguggaccaaucauaauagaaaggaacauaacagagauagugcaucuaaauagcacuaccuuagagaaggaaauuuguccuaaagcagcaggauacagggauuggucaaaaccacagugucaaaucacaggguucgcuccuuucuccaaggauaauucaauuaggcucuccgcaaguggcgauauuugggugacaagagaaccuuauguaucaugcggucuugguaaauguuaucaguuugcacuuggacaggggacuaccuuggacaacagacauucaaacggcacaucacaugauaggacuccucauaggacacuuuuaaugagugaguuagguguuccguuucauuuggcgaccaaacaagugugcauagcauggucuagcucaagcugucaugauggggaagcaugguuacauauuugugucacuggggaugauagaaaugcaacugccaguaucauuuaugaugguaugcuuguugacaguauuggcucauggucuaaaaacauucucagaacucaggagucagaauguguuugcaucaauggaaccugcacgguaguaaugacagauggaagugcgucaggaaaagcugauacuagaauacuauuuauuagagaggggaaaaucgugcacauuagcccuuugucaggaagugcucagcauguggaggaaugcuccuguuacccccaauauccagaaguuagauguguuugcagagacaauuggaggggaucuaaucgacccguucuauauauaaauauggcggauuauaguguugauucugguuaugugugcucgggacuuguuggugacacaccuagaaaugacgauacaucuagcagcagcaauugcaaggauccuaacaaugagagaggggccccaggagugaaagggugggccuuugacaguggaaaugacauuuggaugggaagaacgauugaaaaggauuugcgcucagguuaugagacuuucagagucauuggugguuggaacaccgcuaauuccaagucacagacaaauagacaagucauaguugacagugacaauucaucuggguauucuggcauuuucuccguugaaggcaaaagcugcaucaacagguguuuuuauguagaguugauaagagggagaccaaaggagacuagagugugguggacuucaaauaguaucauuguauucuguggaacuucagguacuuauggaacaggcucauggccugauggggcaaauauaaauuucaugccuauauaa

SEQ ID NO: 55567 - RNA, 1410 nt, Artificial Sequence
  derived and/or modified CDS sequence (wt) from neuraminidase__InfluenzaA__AGQ81769
augaauccaaaucagaagauaguagcaaucgguucugucucucuaacuauugcgacaauaugccuucucaugcagauugccaucuuaguuacgacuaugacauuacacuucaagcauggugaaugcaccaacuccucgaauaaucaagcagugccauguggaccaaucauaauagaaaggaacauaacagagauagugcaucuaaauagcacuaccuuagagaaggaaauuuguccuaaagcagcaggauacagggauuggucaaaaccacagugucaaaucacaggguucgcuccuuucuccaaggauaauucaauuaggcucuccgcaaguggcgauauuugggugacaagagaaccuuauguaucaugcggucuugguaaauguuaucaguuugcacuuggacaggggacuaccuuggacaacagacauucaaacggcacaucacaugauaggacuccucauaggacacuuuuaaugagugaguuagguguuccguuucauuuggcgaccaaacaagugugcauagcauggucuagcucaagcugucaugauggggaagcaugguuacauauuugugucacuggggaugauagaaaugcaacugccaguaucauuuauggugguaugcuuguugacaguauuggcucauggucuaaaaacauucucagaacucaggagucagaauguguuugcaucaauggaaccugcacgguaguaaugacagauggaagugcgucaggaaaagcugauacuagaauacuauuuauuagagaggggaaaaucgugcacauuagcccuuugucaggaagugcucagcauguggaggaaugcuccuguuacccccaauauccagaaguuagauguguuugcagagacaauuggaggggaucuaaucgacccguucuauauauaaauauggcggauuauaguguugauucugguuaugugugcucgggacuuguuggugacacaccuagaaaugacgauacaucuagcagcagcaauugcaaggauccuaacaaugagagaggggccccaggagugaaagggugggccuuugacaguggaaaugacauuuggaugggaagaacgauugaaaaggauuugcgcucagguuaugagacuuucagagucauuggugguuggaacacugcuaauuccaagucacagacaaauagacaagucauaguugacagugacaauucaucuggguauucuggcauuuucuccguugaaggcaaaagcugcaucaacagguguuuuuauguagaguugauaagagggagaccaaaggagacuagagugugguggacuucaaauaguaucauuguauucuguggaacuucagguacuuauggaacaggcucauggccugauggggcaaauauaaauuucaugccuauauaa

SEQ ID NO: 55568 - RNA, 1401 nt, Artificial Sequence
  derived and/or modified CDS sequence (wt) from neuraminidase__InfluenzaA__AGQ81770
augaauccaaaucagaagauaauagcaauuggcucuguuucuauaaccauugcgauaauauguuuuaucaugcagauugccaucuuaacaacgaccaugacacuacauuucaggcagaaugaaugcagcaauccaucgaauaaucaaguggugccaugugaaccuaucauaauagagaggaacacagugcauuugaauaguacuaccauagagaaggaaacuuguccuaaaguggcagaauacaagaauuggucaaaaccacaaugucaaauuacaggguuugcuccuuucucaaaggacaacucaauuaggcuuucugcagguggagauaucugggugacaagagaaccuuaugugucgugcagucuuggaaaauguuaucaguuugcacuugggcagggaaccacucugaaaaacaagcacucaaauggcacuacacacgauagaauuccucacagaacucuuuuaaugaaugaguuaggugucccauuucauuugggaaccaaacaagugugcauagcauggucuaguucaagcugccaugaugggaaagcaugguuacauauuugugugacuggggaugauaaaaaugcuacugcuaguaucauuuaugaugggaugcugguugacaguauugguucaugguccaaaaacauccuaagaacccaggagucagaaugcguuugcaucaauggaacuugugcaguaguaaugacugauggaagugcaucaggaaaggcugacacuagaguauuauucauaagagagggaaaaauuauaaauauuagcccauugucaggaagugcucagcacguggaggaaugcuccuguuacccccgguauccugaaguuagguguguuugcagagacaauuggaagggcuccaauaggcccguucuauauauaaauauggcagauuauaguguugaguccaguuauguaugcucaggacuuguuggcgacacaccaagagaugaugauagcuccaguagcagcaacuguagagacccuaauaacgaaagaggggccccaggaguaaaagggugggccuuugacgaugggaaugacauuuggaugggacgaacaaucaaaagugauucacgcucagguuaugagacuuuuagggucguuaaugguuggaccacagcuaauuccaagucacagauaaauaggcaagucauaguugacagugacagcuggucuggguauucugguaucuucucuguugaaggcaaaaacugcaucaacagguguuuuuauguggaguugauaagagggagaccacaggagaccagagugugguggacuucaaacagcaucauaguauucuguggaaccucagguacauauggaacaggcucauggccugauggagcgaauaucaacuucaugccuauauaa

SEQ ID NO: 55569 - RNA, 1410 nt, Artificial Sequence
  derived and/or modified CDS sequence (wt) from neuraminidase__InfluenzaA__AGQ81772
augaauccaaaucagaagauaguagcaauuggcuccgccucccuaacuauugcgacaaugugccuccuccugcagauugcccucuuugcuacaacuaugacacuacauuucaagcagacggggugcacaaacuccucugacaaucaagcagugccauguggaccaaucauaauagaaaggaacauaacagaaauagugcauuugaauagcaccacuuuagaaaaggaaacuuguccuaagucagcaggauacaggaauuggucuaaaccacaaugucaaaucacaggauucgcuccuuucuccaaggacaauucaauuaggcuugccgcagcuggagauauuugggugacaagagaaccuuaugugucaugcggucuugguaaauguuaucaauuugcucuugggcaggggaccaccuuggacaacaaacacucaaauggcacaacacaugauagaacuccucauagaacccuuuuaaugagugaguuggguguuccguuucauuuggcaaccaaacaaguguguauagcaugguccagcucaagcugccaugauggaaaagcaugguuacauguuugugucacaggggacgauaagaaugcaacugcuaguaucauuuaugaugggauacuuguugacagcauugcuucauggucuaaaaacauacucagaacucaagagucagaaugcguuuguauuaacggaaccuguacgguaguaaugacagauggaagugcaucaggaagggcugacaccagaauacuauuuauuagagaggggaaaaucguacacauuagcccauugucaggaagugcucagcauguugaggaaugcuccuguuacccccgauauccagaaguuagauguguuugcagagacaauuggaagggauccaauagacccguucuauuuauaaauauggcagauuauaguauugauuccaguuauguguguccagggcuugugggcgacacaccaagaaaugaugauagaucuagcagcagcaacugcagagauccuaauaacgaaagaggagccccaggagugaaagggugggccuucgacaguggaaaugauauuuggaugggaagaacgaucgaaaaggauucgcgcucagguuaugagacuuucagggucauuagugguuggagcacagcuaauuccaagucacagauaaauagacaagucauaguugaucgugauaacucgucuggguauucugguauuuucucuguugaaggcaaaagcugcaucaacagguguuuuuauguagagcugauaagaggaagaccaaaagagaauagagugugguggacuucaaacagcaucauuguauuuuguggaacuucagguacuuauggaacaggcucauggccugauggggcgaauaucaaucucaugccgauauaa

SEQ ID NO: 55570 - RNA, 1401 nt, Artificial Sequence
  derived and/or modified CDS sequence (wt) from neuraminidase__InfluenzaA__AGQ81773
augaauccaaaucagaagauaauagcaauuggcucuguuucucuaaccauugcgauaauauguuuucucaugcagauugccaucuuaacaacgaccaugacacuacauuucaggcagaaugaaugcagcaauccaucgaauaaucaaguggugccaugugaaccuaucauaauagagaggaaaacagugcauuugaauaguacuaccauagagaaggaaauuuguccuaaaguggcagaauacaagaauuggucgaaaccacaaugucaaauuacaggguuugcuccuuucucaaaggacaacucaauuaggcuuucugcagguggagauaucugggugacaagagaaccuuaugugucgugcagucuuggaaaauguuaucaguuugcacuugggcagggaaccacucugaaaaacaagcacucaaauggcaccacacacgauagaauuccucacagaacucuuuuaaugaaugaguuaggugucccauugcauuggggaaccaaacaagugugcauagcauggucuaguucaagcugccaugaugggaaagcaugguuacauauuuguguaacuggggaugauaaaaaugcuacugcuaguaucauuuaugaugggaugcugguugacaguauugguucaugguccaaaaacauccuaagaacccaggagucagaaugcguuugcaucaauggaacuugugcaguaguaaugacugaugggagugcaucaggaaaggcugauacuagaguauuauucauaagagagggaaaaauuauaaauauuagcccauugucaggaagugcucagcacguggaggaaugcucauguuacccccgguauccugaaguuagguguguuugcagagacaauuggaagggcuccaauaggcccguucuauauauaaauauggcagauuauaguauugaguccaguuauguaugcucaggacuuguuggcgacacaccaagagaugaugauagcuccaguagcagcaacuguagagacccuaauaacgaaagaggggccccaggaguaaaaggguggggcuuugacgaugggaaugacauuuggaugggacgaacaaucaaaagugauucacgcucagguuaugagacuuuuagggucguuaaugguuggaccacagcuaauuccaagucacagauaaauaggcaagucauaguugacagugacagcuggucuggguauucugguaucuucucuguugaaggcaaaaacugcaucaacagguguuuuuauguggaguugauaagagggagaccacaggagaccagagugugguggacuucaaacagcaucauuguauucuguggaaccucagguacauauggaacaggcucauggccugauggagcgaauaucaacuucaugccuauauaa

SEQ ID NO: 55571 - RNA, 1401 nt, Artificial Sequence
  derived and/or modified CDS sequence (wt) from neuraminidase__InfluenzaA__AGQ81774
augaauccaaaucagaagauaauagcaauuggcucuguuucucuaaucauugcgauaauaugucuccucaugcagauugccaucuuaacaacgacuaugacacuacauuucaggcagaaugaaugcaguaacccaucgaauaaucaagugaugccaugugaaccgaucauaauagagaggaacacagugcauuugaauagcacuaccauagagagggaaauuuguccuaaaguagcagaauacaagaauuggucaaaaccacaaugucaaauuacaggguucgcuccuuucucaaaggacaacucaauuaggcuuucugcagguggggauaucugggugacaagagaaccuuaugucucaugcagucucgacaaauguuaucaauuugcacuugggcagggaaccacccugaaaaacaagcacucaaauggcacuacacaugauagaaccccucacagaacucuuuuaaugaaugaguuaggugucccauuucauuugggaaccaaacaagugugcauagcauggucuaguucaagcugcuaugauggaaaagcaugguuacauauuuguguuacuggggaugauaaaaaugcuacugcuaguaucaucuaugaugggaugcuuguugacaguauugguucaugguccaaaaacauccucagaacucaggagucagaaugcguuugcaucaauggaacuugugcagugguaaugacugauggaagugcaucaggaaaggccgacacuagaguauuauucauaagagaagggaaaauuauaaauauuagcccauugucaggaagugcucagcacguugaggaaugcuccuguuauccccgguauccugaaguuaggugugucugcagagacaauuggaagggcuccaauaggcccauucuauauauaaauauggcugauuauagcauugaguccaguuaugugugcucaggacuuguuggcgacacaccaagaaaugaugauagcuccagcagcagcaacugcagagacccuaauaacgaaagaggggccccaggagugaaagggugggccuuugacgacgggaaugauguuuggaugggacggacaaucaaaaaugguucacgcucagguuaugagacuuuuagggucgucaaugguuggaccauagcuaauucaaagucacagauaaauaggcaagucauaguugacagugacgacuggucuggguauucuggcaucuucucuguugaaggcaaaaaaugcaucaacagguguuuuuauguggaguugauaagagggagaccacaggaacccagagugugguggaccucaaauagcaucauuguauucuguggaaccucagguacauauggaacaggcucauggccugauggagcgaauaucaacuucaugccuauauaa

SEQ ID NO: 55572 - RNA, 1401 nt, Artificial Sequence
  derived and/or modified CDS sequence (wt) from neuraminidase__InfluenzaA__AGQ81776
augaauccaaaucagaagauaauagcaauuggcucuguuucucuaaccauugcgauaauauguuuucucaugcagauugccaucuuaacaacgaccaugacacuacauuucaggcagaaugaaugcagcaauccaucgaauaaucaaguggugccaugugaaccuaucauaauagagaggaacacagugcauuugaauaguacuaccauagagaaggaaauuuguccuaaaguggcagaauacaagaauuggucaaaaccacaaugucaaauuacaggguuugcuccuuucucaaaagacaacucaauuaggcuuucugcagguggagauaucugggugacaagagaaccuuaugugucgugcagucuuggaaaauguuaucaguuugcacuugggcagggaaccacucugaaaaacaagcacucaaauggcacuacacacgacagaauuccucacagaacucuuuuaaugaaugaguuaggugucccauuucauuugggaaccaaacaagugugcauagcauggucuaguucaagcugccaugaugggaaagcaugguuacauauuugugugacuggggaugauaaaaaugcuacugcuaguauuauuuaugaugggaugcugguugacaguauugguucaugguccaaaaacauccuaaggacccaggagucagaaugcguuugcaucaauggaacuugugcaguaguaaugacugauggaagugcaucaggaaaggcugacacuagaguauuauucauaagagagggaaaaauuauaaauauuagcccauugucaggaagugcucagcacguggaggaaugcuccuguuacccccgguauccugaaguuagguguguuugcagagacaauuggaagggcuccaauaggcccguucuauauauaaauauggcagauuauaguauugaguccaguuauguaugcucaggacuuguuggcgacacaccaagagaugaugauagcuccaguagcagcaacuguagggacccuaauaacgaaagaggggccccaggaguaaaagggugggccuuugacgaugggaaugacauuuggaugggacgaacaaucaaaagugauucacgcucagguuaugagacuuuuagggucauugaugguuggaccacagcugauuccaagucacagauaaauaggcaagucauaguugacagugacagcuggucuggguauucugguaucuucucuguugaaggcaaaaacugcaucaacagguguuuuuauguggaguugauaagagggagaccacaggagaccagagugugguggacuucaaacagcaucauuguguucuguggaaccucagguacauauggaacaggcucauggccugauggagcgaauaucaacuucaugccuauauaa

SEQ ID NO: 55573 - RNA, 1410 nt, Artificial Sequence
  derived and/or modified CDS sequence (wt) from neuraminidase__InfluenzaA__AGQ81777
augaauccaaaucagaagauaguaacaauuggcuccgccucccuaacuauugcgacaaugugccuccuccugcagauugcccucuuugcuacaacuaugacacuacauuucaagcagacggggugcacaaacuccucugacaaucaagcagugccauguggaccaaucauaauagaaaggaacauaacagaaauagugcauuugaauagcaccacuuuagaaaaggaaacuuguccuaagucagcaggauacaggaauuggucuaaaccacaaugucaaaucacaggauucgcuccuuucuccaaggacaauucaauuaggcuugcugcagcuggagauauuugggugacaagagaaccuuaugugucaugcggucuugguaaauguuaucaauuugcucuugggcaggggaccaccuuggacaacaaacacucaaauggcacaacacaugauagaacuccucauagaacccuuuuaaugaaugaguuggguguuccguuucauuuggcaaccaaacaaguguguauagcaugguccagcucaagcugccaugauggaaaagcaugguuacauguuugugucacaggggacgauaagaaugcaacugcuaguaucauuuaugaugggauacuuguugacagcauugcuucauggucuaaaaacauacucagaacucaagagucagaaugcguuuguauuaacggaaccuguacgguaguaaugacagauggaagugcaucaggaagggcugacaccagaauacuauuuauuagagaggggaaaaucguacacauuagcccauugucaggaagugcucagcauguugaggaaugcuccuguuaccccagauauccagaaguuagauguguuugcagagacaauuggaauggauccaauagacccguucuauuuauaaauauggcagauuauaguauugauuccaguuauguguguucagggcuugugggcgacacaccaagaaaugaugauagaucuagcagcagcaacugcagagauccuaauaacgaaagaggagccccaggagugaaagggugggccuucgacaguggaaaugauauuuggaugggaagaacgaucgaaaaggauucgcgcucagguuaugagacuuucagggucauuagugguuggagcacagcuaauuccaagucacagauaaauagacaagucauaguugaucgugauaacucgucuggguauucugguauuuucucuguugaaggcaaaagcugcaucaacagguguuuuuauguagagcugauaagaggaagaccaaaagagaauagagugugguggacuucaaacagcaucauuguauuuuguggaacuucagguacuuauggaacaggcucauggccugauggggcgaauaucaaucucaugccgauauaa

SEQ ID NO: 55574 - RNA, 1410 nt, Artificial Sequence
  derived and/or modified CDS sequence (wt) from neuraminidase__InfluenzaA__AGQ81778
augaauccaaaucagaagauaguaacaauuggcuccgccucccuaacuauugcgacaaugugccuccuccugcagauugcccucuuugcuacaacuaugacacuacauuucaagcagacggggugcacaaacuccucugacaaucaagcagugccauguggaccaaucauaauagaaaggaacauaacagaaauagugcauuugaauagcaccacuuuagaaaaggaaacuuguccuaagucagcaggauacaggaauuggucuaaaccacaaugucaaaucacaggauucgcuccuuucuccaaggacaauucaauuaggcuugcugcagcuggagauauuugggugacaagagaaccuuaugugucaugcggucuugguaaauguuaucaauuugcucuugggcaggggaccaccuuggacaacaaacacucaaauggcacaacacaugauagaacuccucauagaacccuuuuaaugaaugaguuggguguuccguuucauuuggcaaccaaacaaguguguauagcaugguccagcucaagcugccaugauggaaaagcaugguuacauguuugugucacaggggacgauaagaaugcaacugcuaguaucauuuaugaugggauacuuguugacagcauugcuucauggucuaaaaacauacucagaacucaagagucagaaugcguuuguauuaacggaaccuguacgguaguaaugacagauggaagugcaucaggaagggcugacaccagaauacuauuuauuagagaggggaaaaucguacacauuagcccauugucaggaagugcucagcauguugaggaaugcuccuguuaccccagauauccagaaguuagauguguuugcagagacaauuggaagggauccaauagacccguucuauuuauaaauauggcagauuauaguauugauuccaguuauguguguucagggcuugugggcgacacaccaagaaaugaugauagaucuagcagcagcaacugcagagauccuaauaacgaaagaggagccccaggagugaaagggugggccuucgacaguggaaaugauauuuggaugggaagaacgaucgaaaaggauucgcgcucagguuaugagacuuucagggucauuagugguuggagcacagcuaauuccaagucacagauaaauagacaagucauaguugaucgugauaacucgucuggguauucugguauuuucucuguugaaggcaaaagcugcaucaacagguguuuuuauguagagcugauaagaggaagaccaaaagagaauagagugugguggacuucaaacagcaucauuguauuuuguggaacuucagguacuuauggaacaggcucauggccugauggggcgaauaucaaucucaugccgauauaa

SEQ ID NO: 55575 - RNA, 1410 nt, Artificial Sequence
  derived and/or modified CDS sequence (wt) from neuraminidase__InfluenzaA__AGQ81779
augaauccaaaucagaagauaguagcaauuggcuccgccucccuaacuauugcgacaaugugccuccuccugcagauugcccucuuugcuacaacuaugacacuacauuucaagcagacggggugcacaaacuccucugacaaucaagcagugccauguggaccaaucauaauagaaaggaacauaacagaaauagugcauuugaauagcaccacuuuagaaaaggaaacuuguccuaagucagcaggauacaggaauuggucuaaaccacaaugucaaaucacaggauucgccccuuucuccaaggacaauucaauuaggcuugccgcagcuggagauauuugggugacaagagaaccuuaugugucaugcggucuugguaaauguuaucaauuugcucuugggcaggggaccaccuuggacaacaaacacucaaauggcacaacacaugauagaacuccucauagaacccuuuuaaugaaugaguuggguguuccguuucauuuggcaaccaaacaaguguguauagcaugguccagcucaagcugccaugauggaaaagcaugguuacauguuugugucacaggggacgauaagaaugcaacugcuaguaucauuuaugaugggauacuuguugacagcauugcuucauggucuaaaaacauacucagaacucaagagucagaaugcguuuguauuaacggaaccuguacgguaguaaugacagauggaagugcaucaggaagggcugacaccagaauacuauuuauuagagaggggaaaaucguacacauuagcccauugucaggaagugcucagcauguugaggaaugcuccuguuacccccgauauccagaaauuagauguguuugcagagacaauuggaagggauccaauagacccguucuauuuauaaauauggcagauuauaguauugauuccaguuauguguguucagggcuugugggcgacacaccaagaaaugaugauagaucuagcagcagcaacugcagagauccuaauaacgaaagaggagccccaggagugaaagggugggccuucgacaguggaaaugauauuuggaugggaagaacgaucgaaaaggauucgcgcucagguuaugagacuuucagggucauuagugguuggagcacagcuaauuccaagucacagauaaauagacaagucauaguugaucgugauaacucgucuggguauucugguauuuucucuguugaaggcaaaagcugcaucaacagguguuuuuauguagagcugauaagaggaagaccaaaagagaauagagugugguggacuucaaacagcaucauuguauuuuguggaacuucagguacuuauggaacaggcucauggccugauggggcgaauaucaaucucaugccgauauaa

SEQ ID NO: 55576 - RNA, 1410 nt, Artificial Sequence
  derived and/or modified CDS sequence (wt) from neuraminidase__InfluenzaA__AGQ81780
augaauccaaaucagaagauaguggcaauuggcuccgccucccuaacuauugcgacaaugugccuccuccugcagauugcccucuuugcuacaacuaugacacuacauuucaagcagacggggugcacaaacuccucugacaaucaagcagugccauguggaccaaucauaauagaaaggaacauaacagaaauagugcauuugaauagcaccacuuuagaaaaggaaacuuguccuaagucagcaggauacaggaauuggucuaaaccacaaugucaaaucacaggauucgcuccuuucuccaaggacaauucaauuaggcuugccgcagcuggagauauuugggugacaagagaaccuuaugugucaugcggucuugguaaauguuaucaauuugcucuugggcaggggaccaccuuggacaacaaacacucaaauggcacaacacaugauagaacuccucauagaacccuuuuaaugaaugaauuggguguuccguuucauuuggcaaccaaacaaguguguauagcaugguccagcucaagcugccaugauggaaaagcaugguuacauguuugugucacaggggacgauaagaaugcaacugcuaguaucauuuaugaugggauacuuguugacagcauugcuucauggucuaaaaacauacucagaacucaagagucagaaugcguuuguauuaacggaaccuguacgguaguaaugacagauggaagugcaucaggaagggcugacaccagaauacuauuuauuagagaggggaaaaucguacacauuagcccauugucaggaagugcucagcauguugaggaaugcuccuguuacccccgauauccagaaguuagauguguuugcagagacaauuggaagggauccaauagacccguucuauuuauaaauauggcagauuauaguauugauuccaguuauguguguucagggcuugugggcgacacaccaagaaaugaugauagaucuagcagcagcaacugcagagauccuaauaacgaaagaggagccucaggagugaaagggugggccuucgacaguggaaaugauauuuggaugggaagaacgaucgaaaaggauucgcgcucagguuaugagacuuucagggucauuagugguuggagcacagcuaauuccaagucacagauaaauagacaagucauaguugaucgugauaacucgucuggguauucugguauuuucucuguugaaggcaaaagcugcaucaacagguguuuuuauguagagcugauaagaggaagaccaaaagagaauagagugugguggacuucaaacagcaucauuguauuuuguggaacuucagguacuuauggaacaggcucauggccugauggggcgaauaucaaucucaugccgauauaa

SEQ ID NO: 55577 - RNA, 1401 nt, Artificial Sequence
  derived and/or modified CDS sequence (wt) from neuraminidase__InfluenzaA__AGQ81781
augaauccaaaucagaagauaauagcaauuggcucuguuucucuaaccauugcgauaauauguuuucucaugcagauugccaucuuaacaacgaccaugacaccacauuucaggcagaaugaaugcagcaauccaucgaauaaucaaguggugccaugugaaccuaucauaauagagaggaacacugugcauuugaauaguacuaccauagagaaggaaauuugucccaaaguggcagaauacaagaauuggucaaaaccacaaugucaaauuacaggguuugcuccuuucucaaaggacaacucaauuaggcuuucugcagguggagauaucugggugacaagagaaccuuaugugucgugcagucuuggaaaauguuaccaguuugcacuugggcagggaaccacucugaaaaacaagcacucaaauggcacuacacaugauagaauuccucacagaacucuuuuaaugaaugaguuaggugucccauuucauuugggaaccaaacaagugugcauagcauggucuaguucaagcugccaugaugggaaagcaugguuacauauuugugugacuggggaugauaaaaaugcuacugcuaguaucauuuaugaugggaugcugguugacaguauugguucaugguccaaaaacauccuaagaacccaggagucagaaugcguuuguaucaauggaacuugugcaguaguaaugacugauggaagugcaucaggaaaggcugacacuagaauauuauucauaagagagggaaaaauuauaaauauuagcccauugucaggaagugcucagcacguggaggaaugcuccuguuacccccgguauccugaaguuaggugcguuuguagagacaauuggaagggcuccaauaggcccguucuauauauaaauauggcagauuauaguauugaguccaguuauguaugcucaggacuuguuggcgacacaccaagagaugaugauaguuccaguagcagcaacuguagagacccuaauaacgaaagaggggccccuggaguaaaagggugggccuuugacgaugggaaugacauuuggaugggacgaacaaucaaaagugauucacgcucagguuaugagacuuuuagggucguuaaugguuggaccacagcuaauuccaagucacagauaaauaggcaagucauaguugauagugacagcuggucuggguauucugguaucuucucuguugaaggcaaaaacugcaucaacagguguuuuuauguggaguugauaagagggagaccacaggagaccagagugugguggacuucaaacagcaucauuguauucuguggaaccucagguacauauggaacaggcucauggccugauggagcggauaucaacuuaaugccuauauaa

SEQ ID NO: 55578 - RNA, 1410 nt, Artificial Sequence
  derived and/or modified CDS sequence (wt) from neuraminidase__InfluenzaA__AGQ81783
augaauccaaaucagaagauaguaacaauuggcuccgccucccuaacuauugcgacaaugugccuccuccugcagauugcccucuuugcuacaacuaugacacuacauuucaagcagacggggugcacaaacuccucugacaaucaagcagugccauguggaccaaucauaauagaaaggaacauaacagaaauagugcauuugaauagcaccacuuuagaaaaggaaacuuguccuaagucagcaggauacaggaauuggucuaaaccacaaugucaaaucacaggauucgcuccuuucuccaaggacaauucaauuaggcuugcugcagcuggagauauuugggugacaagagaaccuuaugugucaugcggucuugguaaauguuaucaauuugcucuugggcaggggaccaccuuggacaacaaacacucaaauggcacaacacaugauagaacuccucauagaacccuuuuaaugaaugaguuggguguuccguuucauuuggcaaccaaacaaguguguauagcaugguccagcucaagcugccaugauggaaaagcaugguuacauguuugugucacaggggacgauaagaaugcaacugcuaguaucauuuauaaugggauacuuguugacagcauugcuucauggucuaaaaacauacucagaacucaagagucagaaugcguuuguauuaacggaaccuguacgguaguaaugacagauggaagugcaucaggaagggcugacaccagaauacuauuuauuagagaggggaaaaucguacacauuagcccauugucaggaagugcucagcauguugaggaaugcuccuguuaccccagauauccagaaguuagauguguuugcagagacaauuggaagggauccaauagacccguucuauuuauaaauauggcagauuauaguauugauuccaguuauguguguucagggcuugugggcgacacaccaagaaaugaugauagaucuagcagcagcaacugcagagauccuaauaacgaaagaggagccccaggagugaaagggugggccuucgacaguggaaaugauauuuggaugggaagaacgaucgaaaaggauucgcgcucagguuaugagacuuucagggucauuagugguuggagcacagcuaauuccaagucacagauaaauagacaagucauaguugaucgugauaacucgucuggguauucugguauuuucucuguugaaggcaaaagcugcaucaacagguguuuuuauguagagcugauaagaggaagaccaaaagagaauagagugugguggacuucaaacagcaucauuguauuuuguggaacuucagguacuuauggaacaggcucauggccugauggggcgaauaucaaucucaugccgauauaa

SEQ ID NO: 55579 - RNA, 1401 nt, Artificial Sequence
  derived and/or modified CDS sequence (wt) from neuraminidase__InfluenzaA__AGQ81784
augaauccaaaucagaagauaauagcaauuggcucuguuucucuaaccauugcgauaauauguuuucucaugcagauugccaucuuaacaacgaccaugacacuacauuucaggcagaaugaaugcagcaauccaucgaauaaucaaguggugccaugugaaccuaucauaauagagaggaacacagugcauuugaauaguacuaccauagagaaggaaauuuguccuaaaguggcagaauacaagaauuggucaaaaccacaaugccaaauuacaggguuugcuccuuucucaaaggacaauucaauuaggcuuucugcagguggagauaucuggguuacaagagaaccuuaugugucgugcagucuuggaaaauguuaucaguuugcacuugggcagggaaccacucugagaaacaagcacucaaauggcacuacacacgauagaauuccucacagaacucuuuuaaugaaugaguuaggugucccauuucauuugggaaccaaacaagugugcauagcauggucuaguucaagcugccaugaugggaaagcaugguuacauauuugugugacuggggaugauaaaaaugcuacugcuaguaucauuuaugaugggaugcugguugacaguauugguucaugguccaaaaacauccuaagaacccaggagucagaaugcguuugcaucaauggaacuugugcaguaguaaugacugauggaaaugcaucgggaaaggcugacacuagaguguuauucauaagagagggaaaaauuauaaauauuagcccauugucaggaagugcucagcacguggaggaaugcuccuguuacccccgguauccugaaguuagguguguuugcagagauaauuggaagggcuccaauaggcccguucuauauauaaauauggcagauuauaguauugaguccaguuaugucugcucaggacuuguuggcgacacaccaagagaugaugauagcuccaguagcagcaacuguagagacccuaauaacgaaagaggggccccaggaguaaaagggugggccuuugacgaugggaaugacauuuggaugggacgaacaaucaaaagugauucacgcucagguuaugagacuuuuagggucguuaaugguuggaccacagcuaauuccaagucacagauaaauaggcaagucauaguugacagugacagcuggucuggguauucugguaucuucucuguugaaggcaaaaacugcaucaacagguguuuuuauguggaguugauaagagggagaccacaggagaccagagugugguggacuucaaacagcaucauuguauucuguggaaccucagguacauauggaacaggcucauggccugauggagcggauaucaacuucaugccuauauaa

SEQ ID NO: 55580 - RNA, 1401 nt, Artificial Sequence
  derived and/or modified CDS sequence (wt) from neuraminidase__InfluenzaA__AGQ81785
augaauccaaaucagaagauaauagcaauuggcucuguuucucuaaccauugcgauaauauguuuuaucaugcagauugccaucuuaacaacgaccaugacaccacauuucaggcagaaugaaugcagcaauccaucgaauaaucaaguggugccaugugaaccuaucauaauagagaggaacacugugcauuugaauaguacuaccauagagaaggaaauuugucccaaaguggcagaauacaagaauuggucaaaaccacaaugucaaauuacaggguuugcuccuuucucaaaggacaacucaauuaggcuuucugcagguggagauaucugggugacaagagaaccuuaugugucgugcagucuuggaaaauguuaccaguuugcacuugggcagggaaccacucugaaaaacaagcacucaaauggcacuacacaugauagaauuccucacagaacucuuuuaaugaaugaguuaggugucccauuucauuugggaaccaaacaagugugcauagcauggucuaguucaagcugccaugaugggaaagcaugguuacauauuugugugacuggggaugauaaaaaugcuacugcuaguaucauuuaugaugggaugcugguugacaguauugguucaugguccaaaaacauccuaagaacccaggagucagaaugcguuuguaucaauggaacuugugcaguaguaaugacugauggaagugcaucaggaaaggcugacacuagaauauuauucauaagagagggaaaaauuauaaauauuagcccauugucaggaagugcucagcacguggaggaaugcuccuguuacccccgguauccugaaguuaggugcguuuguagagacaauuggaagggcuccaauaggcccguucuauauauaaauauggcagauuauaguauugaguccaguuauguaugcucaggacuuguuggcgacacaccaagagaugaugauaguuccaguagcagcaacuguagagacccuaauaacgaaagaggggccccuggaguaaaagggugggccuuugacgaugggaaugacauuuggaugggacgaacaaucaaaagugauucacgcucagguuaugagacuuuuagggucguuaaugguuggaccacagcuaauuccaagucacagauaaauaggcaagucauaguugacagugacagcuggucuggauauucugguaucuucucuguugaaggcaaaaacugcaucaacagguguuuuuauguggaguugauaagagggagaccacaggagaccagagugugguggacuucaaacagcaucauuguauucuguggaaccucagguacauaugggacaggcucauggccugauggagcggauaucaacuuaaugccuauauaa

SEQ ID NO: 55581 - RNA, 1401 nt, Artificial Sequence
  derived and/or modified CDS sequence (wt) from neuraminidase__InfluenzaA__AGQ81787
augaauccaaaccagaagauaauagcaauuggcucuguuucucuaaucauugcgauaauaugucuccucaugcagauugccaucuuaacaacgacuaugacacuacauuucaggcagaaugaaugcaguaacccaucgaauaaucaaguggugccaugugaaccaaucauaauagagaggaacacagugcauuugaauagcacuaccauagagagggaaauuuguccuaaaguagcagaauacaagaauuggucaaaaccacaaugucaaauuacaggguucgcuccuuuuucaaaggacaacucaauuaggcuuucugcagguggggauaucugggugacaagagaaccuuaugucucaugcagucucgacaaauguuaucaauuugcacuugggcagggaaccacccugaaaaacaagcacucaaauggcacuacacaugauagaaccccucacagaacucuuuuaaugaaugaguuaggugucccauuucaucugggaaccaaacaagugugcauagcauggucuaguucaagcugcuaugauggaaaagcaugguuacauauuuguguuacuggggaugauaaaaaugcuacugcuaguaucaucuaugaugggaugcuuguugacaguauugguucaugguccaaaaacauccucagaacucaggagucagaaugcguuugcaucaauggaacuugugcagugguaaugacugauggaagugcaucaggaaaggccgacacuagaguauuauucauaagagaagggaaaauuauaaauauuagcccauugucaggaagugcucagcacguugaggaaugcuccuguuauccccgguauccugaaguuaggugugucugcagagacaauuggaagggcuccaauaggcccauucuauauauaaauauggcugauuauagcauugaguccaguuaugugugcucaggacuuguuggcgacacaccaagaaaugaugauagcuccagcagcagcaacugcagagacccuaauaacgaaagaggggccccaggagugaaagggugggccuuugacgacgggaaugauguuuggaugggacggacaaucaaaaaugguucacgcucagguuaugagacuuuuagggucgucaaugguuggaccauggcuaauucaaagucacagauaaauaggcaagucauaguugacagugacgacuggucuggguauucuggcaucuucucuguugaaggcaaaaaaugcaucaacagguguuuuuauguggaguugauaagagggagaccacaggaacccagagugugguggaccucaaauagcaucauuguauucuguggaaccucagguacauauggaacaggcucauggccugauggagcgaauaucaacuucaugccuauauaa

SEQ ID NO: 55582 - RNA, 1401 nt, Artificial Sequence
  derived and/or modified CDS sequence (wt) from neuraminidase__InfluenzaA__AGQ81789
augaauccaaaucagaagauaauagcaauuggcucuguuucucuaaccauugcgauaauaugucuucucaugcagauugccaucuuaacaacgaccaugacaccacauuucaggcagaaugaaugcagcaauccaucgaauaaucaaguggugccaugugaaccuaucauaauagagaggaacacugugcauuugaauaguacuaccauagagaaggaaauuugucccaaaguggcagaauacaagaauuggucaaaaccacaaugucaaauuacaggguuugcuccuuucucaaaggacaacucaauuaggcuuucugcagguggagauaucugggugacaagagaaccuuaugugucgugcagucuuggaaaauguuaccaguuugcacuugggcagggaaccacucugaaaaacaagcacucaaauggaaccacacaugauagaauuccucacagaacucuuuuaaugaaugaguuaggugucccauuucauuugggaaccaaacaagugugcauagcauggucuaguucaagcugccaugaugggaaagcaugguuacauauuugugugacuggggaugauaaaaaugcuacugcuaguaucauuuaugaugggaugcugguugacaguauugguucaugguccaaaaacauccuaagaacccaggagucagaaugcguuuguaucaauggaacuugugcaguaguaaugacugauggaagugcaucaggaaaggcugacacuagaauauuauucauaagagagggaaaaauuauaaauauuagcccauugucaggaagugcucagcacguggaggaaugcuccuguuacccccgguauccugaaguuaggugcguuuguagagacaauuggaagggcuccaauaggcccguucuauauauaaauauggcagauuauaguauugaguccaguuauguaugcucaggacuuguuggcgacacaccaagagaugaugauaguuccaguagcagcaacuguagagacccuaauaacgaaagaggggccccuggaguaaaagggugggccuuugacgaugggaaugacauuuggaugggacgaacaaucaaaagugauucacgcucagguuaugagacuuuuagggucguuaaugguuggaccacagcuaauuccaagucacagauaaauaggcaagucauaguugacagugacagcuggucuggauauucugguaucuucucuguugaaggcaaaaacugcaucaacagguguuuuuauguggaguugauaagagggagaccacaggagaccagagugugguggacuucaaacagcaucauuguauucuguggaaccucagguacauauggaacaggcucauggccugauggagcggauaucaacuuaaugccuauauaa

SEQ ID NO: 55583 - RNA, 1401 nt, Artificial Sequence
  derived and/or modified CDS sequence (wt) from neuraminidase__InfluenzaA__AGQ81790
augaauccaaaucagaagauaauagcaauuggcucuguuucucuaaucauugcgauaauaugucuccucaugcagauugccaucuuaacaacgacuaugacacuacauuucaggcagaaugaaugcagcaacccaucgaacaaucaagcgaugccaugugaaccgaucauaauagagaggaacacagugcauuugaauaguacuaccauagagagggaaauuuguccuaaaguaacagaauacaagaauuggucaaaaccacaaugucaaauuacaggguuugcuccuuucucaaaagacaacucaauuaggcuuucugcagguggggauaucugggugacaagagaaccuuaugucucaugcagucucgauaaauguuaucaauuugcacuugggcagggaaccacccugaaaaacaagcacucaaauggcacuacacaugauagaaccccucacagaacucuuuuaaugaaugaguuaggugucccauuucauuugggaaccaaacaagugugcauagcauggucuaguucaagcugcuaugauggaaaagcaugguuacauauuuguguuacuggggaugauaaaaaugcuacugcuaguaucaucuaugaugggaugcuuguugacaguauugguucaugguccaaaaacauccucagaacucaggagucagaaugcguuugcaucaauggaacuugugcagugguaaugacugauggaagugcaucaggaagggccgacacuagaguauuauucauaagagaaggaaaaauuauaaauauuagcccauugucaggaaaugcucagcacguugaggaaugcuccuguuauccccgguauccugaaguuagguguguuugcagagacaauuggaagggcuccaauaggcccauucuauauauaaauauggcugauuauagcauugaguccaguuaugugugcucaggacuuguuggcgacacaccaagaaaugaugauagcuccagcagcagcaacugcagagacccuaauaacgaaagaggggccccaggagugaaagggugggccuuugacgacgggaaugauguuuggaugggacggacaaucaaaaaugguucacgcucagguuaugagacuuuuagggucgucaaugguuggaccauggcuaauucaaagucacagauaaauaggcaagucauaguugacagugacgaauggucuggguauucuggcaucuucucuguugaaggcaaaaaaugcaucaacagguguuuuuauguggaguugauaagagggagaccacaggaacccagagugugguggaccucaaacagcaucauuguauucuguggaaccucagguacauauggaacaggcucauggccugauggagcaaauaucaauuucaugccuauauaa

SEQ ID NO: 55584 - RNA, 1401 nt, Artificial Sequence
  derived and/or modified CDS sequence (wt) from neuraminidase__InfluenzaA__AGQ81792
augaauccaaaucagaagauaauagcaauuggcucuguuucucuaaucauugcgauaauaugucuccucaugcagauugccaucuuaacaacgacuaugacacuacauuucaggcagaaugaaugcaguaacccaucgaauaaucaagugaugccaugugaaccgaucauaauagagaggaacacagugcauuugaauaguacuaccauagagagggaaauuuguccuaaaguagcagaauacaagaauuggucaaaaccacaaugucaaauuacaggguucgcuccuuucucaaaggacaacucaauuaggcuuucugcagguggggauaucugggugacaagagaaccuuaugucucaugcagucucaacaaauguuaucaauuugcacuugggcagggaaccacccuggaaaacaagcacucaaauggcacuacacaugauaggaccccucacagaacucuuuuaaugaaugaauuaggugucccauuucauuugggaaccaaacaagugugcauggcauggucuaguucaagcugcuaugauggaaaagcaugguuacauauuuguguuacuggggaugauaaaaaugcuacugcuagugucaucuaugaugggaugcuuguugacaguauugguucauggucccaaaacauccucagaacucaggagucagaaugcguuugcaucaauggaacuugugcagugguaaugacugauggaagugcaucaggaaaggccgacacuagaguauuauucauaagagaagggaagauuauaaauauuagcccauugucaggaagugcucagcacguugaggaaugcuccuguuauccccgguauccugaaguuaggugugucugcagagacaauuggaagggcuccaauaggcccauucuauauauaaauauggcugauuauagcauugaguccaguuaugugugcucaggacuuguuggcgacacaccaagaaaugaugauagcuccagcagcagcaacugcagagacccuaauaacgaaagaggggccccaggagugaaagggugggccuuugacgacgggaaugauguuuggaugggacggacaaucaaaaaugguucacgcucagguuaugagacuuuuagggucgucaaugguuggaccauggcuaauucaaagucacagauaaauaggcaagucauaguugacagugacgacuggucuggguauucuggcaucuucucuguugaaggcaaaaaaugcaucaacagguguuuuuauguggaguuaauaagagggagaccacaggaacccagagugugguggaccucaaauagcaucauuguauucuguggaaccucagguacauauggaacaggcucauggccugauggagcgaauaucaacuucaugccuauauaa

SEQ ID NO: 55585 - RNA, 1401 nt, Artificial Sequence
  derived and/or modified CDS sequence (wt) from neuraminidase__InfluenzaA__AGQ81793
augaauccaaaucagaagauaauagcaauuggcucuguuucucuaaucauugcgauaauaugucuccucaugcagauugccaucuuaacaacgacuaugacacuacauuucaggcagaaugaaugcaguaacccaucgaauaaucaagugaugccaugugaaccgaucauaauagagaggaacacagugcauuugaauaguacuaccauagagagggaaauuuguccuaaaguagcagaauacaagaauuggucaaaaccacaaugucaaauuacaggguucgcucccuucucaaaggacaacucaauuaggcuuucugcagguggggauaucugggugacaagagaaccuuaugucucaugcagucucaacaaauguuaucaauuugcacuugggcagggaaccacccuggaaaacaagcacucaaauggcacuacacaugauaggaccccucacagaacucuuuuaaugaaugaauuaggugucccauuucauuugggaaccaaacaagugugcauggcauggucuaguucaagcugcuaugauggaaaagcaugguuacauauuuguguuacuggggaugauaaaaaugcuacugcuagugucaucuaugaugggaugcuuguugacaguauugguucaugguccaaaaacauccucagaacucaggagucagaaugcguuugcaucaauggaacuugugcagugguaaugacugauggaagugcaucaggaaaggccgacacuagaguauuauucauaagagaagggaagauuauaaauauuagcccauugucaggaagugcucagcacguugaggaaugcuccuguuauccccgguauccugaaguuaggugugucugcagagacaauuggaagggcuccaauaggcccauucuauauauaaauauggcugauuauagcauugaguccaguuaugugugcucaggacuuguuggcgacacaccaagaaaugaugauagcuccagcagcagcaacugcagagacccuaauaacgaaagaggggccccaggagugaaagggugggccuuugacgacgggaaugauguuuggaugggacggacaaucaaaaaugguucacgcucagguuaugagacuuuuagggucgucaaugguuggaccauggcuaauucaaagucacagauaaauaggcaagucauaguugacagugacgacuggucuggguauucuggcaucuucucuguugaaggcaaaaaaugcaucaacagguguuuuuauguggaguuaauaagagggagaccacaggaacccagagugugguggaccucaaauagcaucauuguauucuguggaaccucagguacauauggaacaggcucauggccugauggagcgaauaucaacuucaugccuauauaa

SEQ ID NO: 55586 - RNA, 1401 nt, Artificial Sequence
  derived and/or modified CDS sequence (wt) from neuraminidase__InfluenzaA__AGQ81794
augaauccaaaucagaagauaauagcaauuggcucuguuucucuaaucauugcgauaauaugucuccucaugcagauugccaucuuaacaacgacuaugacacuacauuucaggcagaaugaaugcaguaacccaucgaauaaucaagugaugccaugugaaccgaucauaauagagaggaacacagugcauuugaauaguacuaccauagagagggaaauuuguccuaaaguagcagaauacaagaauuggucaaaaccacaaugucaaauuacaggguucgcuccuuucucaaaggacaacucaauuaggcuuucugcagguggggauaucugggugacaagagaaccuuaugucucaugcagucucaacaaauguuaucaauuugcacuugggcagggaaccacccuggaaaacaagcacucaaauggcacuacacaugauaggaccccucacagaacucuuuuaaugaaugaauuaggugucccauuucauuugggaaccaaacaagugugcauggcauggucuaguucaagcugcuaugauggaaaagcaugguuacauauuuguguuacuggggaugauaaaaaugcuacugcuagugucaucuaugaugggaugcuuguugacaguauugguucaugguccaaaaacauccucagaacucaggagucagaaugcguuugcaucaauggaacuugugcagugguaaugacugauggaagugcaucaggaaaggccgacacuagaguauuauucauaagagaagggaagauuauaaauauuagcccauugucaggaagugcucagcacguugaggaaugcuccuguuauccccgguauccugaaguuaggugugucugcagagacaauuggaagggcuccaauaggcccauucuauauauaaauauggcugauuauagcauugaguccaguuaugugugcucaggacuuguuggcgacacaccaagaaaugaugauagcuccagcagcagcaacugcagagacccuaauaacgaaagaggggccccaggagugaaagggugggccuuugacgacgggaaugauguuuggaugggacggacaaucaaaaaugguucacgcucagguuaugagacuuuuagggucgucaaugguuggaccauggcuaauucaaagucacagauaaauaggcaagucauaguugacagugacgacuggucuggguauucuggcaucuucucuguugaaggcaaaaaaugcaucaacagguguuuuuauguggaguuaauaagagggagaccacaggaacccagagugugguggaccucaaauagcaucauuguauucuguggaaccucagguacauauggaacaggcucauggccugauggagcgaauaucaacuucaugccuauauaa

SEQ ID NO: 55587 - RNA, 1401 nt, Artificial Sequence
  derived and/or modified CDS sequence (wt) from neuraminidase__InfluenzaA__AGQ81795
augaauccaaaucagaagauaauagcaauuggcucuguuucucuaaucauugcgauaauaugucuccucaugcagauugccaucuuaacaacgacuaugacacuacauuucaggcagaaugaaugcaauaacccaucgaauaaucaagugaugccaugugaaccgaucauaauagagaggaacacagugcauuugaauagcacuaccauagagagggaaauuuguccuaagguagcagaauacaagaauuggucaaaaccacaaugucaaauuacaggguucgcuccuuuuucaaaggacaacucaauuaggcuuucugcagguggggauaucugggugacaagagaaccuuaugucucaugcagucucgacaaauguuaucaauuugcacuugggcagggaaccacccugaaaaacaagcacucgaauggcacuacacaugauagaaccccucacagaacucuuuuaaugaaugaguuaggugucccauuucauuugggaaccaaacaagugugcauagcauggucuaguucaagcugcuaugauggaaaagcaugguuacauauuuguguuacuggggaugauaaaaaugcuacugcuaguaucaucuaugaugggaugcuuguugacaguauugguucaugguccaaaaacauccucagaacucaggagucagaaugcguuugcaucaauggaacuugugcagugguaaugacugauggaagugcaucaggaaaagccgacacuagaguauuauucauaagagaagggaaaauuauaaauauuagcccauugucaggaagugcucagcacguugaggaaugcuccuguuauccccgguauccugaaguuaggugugucugcagagacaauuggaagggcuccaauaggcccauucuauauauaaauauggcugauuauagcauugaguccaguuaugugugcucaggacuuguuggcgacacaccaagaaaugaugauagcuccagcagcagcaacugcagagacccuaauaacgaaagaggggccccaggagugaaagggugggccuuugacgacgggaaugauguuuggaugggacggacaaucaaaaaugguucacgcucagguuaugagacuuuuagggucgucaaugguuggaccauagcuaauucaaagucacagauaaauaggcaaaucauaguugauagugacgacuggucuggguauucuggcaucuucucuguugaaggcaaaaaaugcaucaacagguguuuuuauguggaguugauaagagggagaccacaggaacccagagugugguggaccucaaauagcaucauuguauucuguggaaccucagguacauauggaacaggcucauggccugauggagcgaauaucaacuucaugccuauauaa

SEQ ID NO: 55588 - RNA, 1401 nt, Artificial Sequence
  derived and/or modified CDS sequence (wt) from neuraminidase__InfluenzaA__AGQ81796
augaauccaaaccagaagauaauagcaauuggcucuguuucucuaaucauugcgauaauaugucuccucaugcagauugccaucuuaacaacgacuaugacacuacauuucaggcagaaugaaugcaguaacccaucgaauaaucaagugaugccaugugaaccaaucauaauagagaggaacacagugcauuugaauagcacuaccauagagagggaaauuuguccuaaaguagcagaauacaagaauuggucaaaaccacaaugucaaauuacaggguucgcuccuuucucaaaggacaacucaauuaggcuuucugcagguggggauaucugggugacaagagaaccuuaugucucaugcagucucgacaaauguuaucaauuugcacuugggcagggaaccacccugaaaaacaagcacucaaauggcacuacacaugauagaaccccucacagaacucuuuuaaugaaugaguuaggugucccauuucauuugggaaccaaacaagugugcauagcauggucuaguucaagcugcuaugauggaaaagcaugguuacauauuuguguuacuggggaugauaaaaaugcuacugcuaguaucaucuaugaugggaugcuuguugacaguauugguucaugguccaaaaacauccucagaacucaggagucagaaugcguuugcaucaauggaacuugugcagugguaaugacugauggaagugcaucaggaaaggccgacacuagaguauuauucauaagagaagggaaaauuauaaauauuagcccauugucaggaagugcucagcacguugaggaaugcuccuguuauccccgguauccugaaguuaggugugucugcagagacaauuggaagggcuccaauaggcccauucuauauauaaauauggcugauuauagcauugaguccaguuaugugugcucaggacuuguuggcgacacaccaagaaaugaugauagcuccagcagcagcaacugcagagacccuaauaacgaaagaggggccccaggagugaaagggugggccuuugacgacgggaaugauauuuggaugggacggacaaucaaaaaugguucacgcucagguuaugagacuuuuagggucgucaaugguuggaccauggcuaauucaaagucacagauaaauaggcaagucauaguugacagugacgacuggucuggguauucuggcaucuucucuguugaaggcaaaaaaugcaucaacagguguuuuuauguggaguugauaagagggagaccacaggaaccuagagugugguggaccucaaauagcaucauuguauucuguggaaccucagguacauauggaacaggcucauggccugauggagcgaauaucaacuucaugccuauauaa

SEQ ID NO: 55589 - RNA, 1401 nt, Artificial Sequence
  derived and/or modified CDS sequence (wt) from neuraminidase__InfluenzaA__AGQ81798
augaauccaaaucagaagauaauaucaauuggcucuguuucucuaaucauugcgauaauaugucuccucaugcagauugccaucuuaacaacgacuaugacacuacauuucaggcagaaugaaugcaguaacccaucgaauaaucaagugaugccaugugaaccgaucauaauagagaggaacacagugcauuugaauagcacuaccauagagagggaaauuuguccuaaaguagcagaauacaagaauuggucaaaaccacaaugucaaauuacaggguucgcuccuuucucaaaggacaacucaauuaggcuuucugcagguggggauaucugggugacaagagaaccuuaugucucaugcagucucgacaaauguuaucaauuugcacuugggcagggaaccacccugaaaaacaagcacucaaauggcacuacacaugauagaaccccucacagaacucuuuuaaugaaugaguuaggugucccauuucauuugggaaccaaacaagugugcauagcauggucuaguucaagcugcuaugauggaaaagcaugguuacauauuuguguuacuggggaugauaaaaaugcuacugcuaguaucaucuaugaugggaugcuuguugacaguauugguucaugguccaaaaacauccucagaacucaggagucagaaugcguuugcaucaauggaacuugugcagugguaaugacugauggaagugcaucaggaaaggccgacacuagaguauuauucauaagagaagggaaaauuauaaauauuagcccauugucaggaagugcucagcacguugaggaaugcuccuguuauccccgguacccugaaguuaggugugucugcagagacaauuggaagggcuccaauaggcccauucuauauauaaauauggcugauuauagcauugaguccaguuaugugugcucaggacuuguuggcgacacaccaagaaaugaugauagcuccagcagcagcaacugcagagacccuaauaacgaaagaggggccccaggagugaaagggugggccuuugacgacgggaaugauguuuggaugggacggacaaucaaaaaugguucacgcucagguuaugagacuuuuagggucgucaaugguuggaccauggcuaauucaaagucacagauaaauaggcaagucauaguugacagugacgacuggucuggguauucuggcaucuucucuguugaaggcaaaaaaugcaucaacagguguuuuuauguggaguugauaagagggagaccacaggaacccagagugugguggaccucaaauagcaucauuguauucuguggaaccucagguacauauggaacaggcucauggccugauggagcgaauaucaacuucaugccuauauaa

SEQ ID NO: 55590 - RNA, 1401 nt, Artificial Sequence
  derived and/or modified CDS sequence (wt) from neuraminidase__InfluenzaA__AGQ81799
augaauccaaaucagaagauaauagcaauuggcucuguuucucuaaucauugcgauaauaugucuccucaugcagauugccaucuuaacaacgacuaugacacuacauuucaggcagaaugaaugcaguaacccaucgaauaaucaagugaugccaugugaaccgaucauaauagagaggaacacagugcauuugaauagcacuaccauagagagggaaauuuguccuaaaguagcagaauacaagaauuggucaaaaccacaaugucaaauuacaggguucgcuccuuucucaaaggacaacucaauuaggcuuucugcagguggggauaucugggugacaagagaaccuuaugucucaugcagucucgacaaauguuaucaauuugcacuugggcagggaaccacccugaaaaacaagcacucaaauggcacuacacaugauagaaccccucacagaacucuuuuaaugaaugaguuaggugucccauuucauuugggaaccaaacaagugugcauagcauggucuaguucaagcugcuaugauggaaaagcaugguuacauauuuguguuacuggggaugauaaaaaugcuacugcuaguaucaucuaugaugggaugcuuguugacaguauugguucaugguccaaaaacauccucagaacucaggagucagaaugcguuugcaucaauggaacuugugcagugguaaugacugauggaagugcaucaggaaaggccgacacuagaguauuauucauaagagaagggaaaauuauaaauauuagcccauugucaggaagugcucagcacguugaggaaugcuccuguuauccccgguacccugaaguuaggugugucugcagagacaauuggaagggcuccaauaggcccauucuauauauaaauauggcugauuauagcauugaguccaguuaugugugcucaggacuuguuggcgacacaccaagaaaugaugauagcuccagcagcagcaacugcagagacccuaauaacgaaagaggggccccaggagugaaagggugggccuuugacgacgggaaugauguuuggaugggacggacaaucaaaaaugguucacgcucagguuaugagacuuuuagggucgucaaugguuggaccauggcuaauucaaagucacagauaaauaggcaagucauaguugacagugacgacuggucuggguauucuggcaucuucucuguugaaggcaaaaaaugcaucaacagguguuuuuauguggaguugauaagagggagaccacaggaacccagagugugguggaccucaaauagcaucauuguauucuguggaaccucagguacauauggaacaggcucauggccugauggagcgaauaucaacuucaugccuauauaa

SEQ ID NO: 55591 - RNA, 1401 nt, Artificial Sequence; identical to SEQ ID NO: 55590
  derived and/or modified CDS sequence (wt) from neuraminidase__InfluenzaA__AGQ81800

SEQ ID NO: 55592 - RNA, 1401 nt, Artificial Sequence
  derived and/or modified CDS sequence (wt) from neuraminidase__InfluenzaA__AGQ81801
augaauccaaaucagaagauaauagcaauuggcucuguuucucuaaucauugcgauaauaugucuccucaugcagauugccaucuuaacaacgacuaugacacuacauuucaggcagaaugaaugcaguaacccaucgaauaaucaagugaugccaugugaaccgaucauaauagagaggaacacagugcauuugaauagcacuaccauagagagggaaauuuguccuaaaguagcagaauacaagaauuggucaaaaccacaaugucaaauuacaggguucgcuccuuucucaaaggacaacucaauuaggcuuucugcaaguggggauaucugggugacaagagaaccuuaugucucaugcagucucgacaaauguuaucaauuugcacuugggcagggaaccacccugaaaaacaagcacucaaauggcacuacacaugauagaaccccucacagaacucuuuuaaugaaugaguuaggugucccauuucauuugggaaccaaacaagugugcauagcauggucuaguucaagcugcuaugauggaaaagcaugguuacauauuuguguuacuggggaugauaaaaaugcuacugcuaguaucaucuaugaugggaugcuuguugacaguauugguucaugguccaaaaacauccucagaacucaggagucagaaugcguuugcaucaauggaacuugugcagugguaaugacugauggaagugcaucaggaaaggccgacacuagaguauuauucauaagagaagggaaaauuauaaauauuagcccauugucaggaagugcucagcacguugaggaaugcuccuguuauccccgguacccugaaguuaggugugucugcagagacaauuggaagggcuccaauaggcccauucuauauauaaauauggcugauuauagcauugaguccaguuaugugugcucaggacuuguuggcgacacaccaagaaaugaugauagcuccagcagcagcaacugcagagacccuaauaacgaaagaggggccccaggagugaaagggugggccuuugacgacgggaaugauguuuggaugggacggacaaucaaaaaugguucacgcucagguuaugagacuuuuagggucgucaaugguuggaccauggcuaauucaaagucacagauaaauaggcaagucauaguugacagugacgacuggucuggguauucuggcaucuucucuguugaaggcaaaaaaugcaucaacagguguuuuuauguggaguugauaagagggagaccacaggaacccagagugugguggaccucaaauagcaucauuguauucuguggaaccucagguacauauggaacaggcucauggccugauggagcgaauaucaacuucaugccuauauaa

SEQ ID NO: 55593 - RNA, 1401 nt, Artificial Sequence
  derived and/or modified CDS sequence (wt) from neuraminidase__InfluenzaA__AGQ81802
augaauccaaaucagaagauaauagcaauuggcucuguuucucuaaucauugcgauaauaugucuccucaugcagauugcccucuuaacaacgacuaugacacuacauuucaggcagaaugaaugcaguaacccaucgaauaaucaagugaugccaugugaaccgaucauaauagagaggaacacagugcauuugaauagcacuaccauagagagggaaauuuguccuaaaguagcagaauacaagaauuggucaaaaccacaaugucaaauuacaggguucgcuccuuucucaaaggacaacucaauuaggcuuucugcagguggggauaucugggugacaagagaaccuuaugucucaugcagucucgacaaauguuaucaauuugcacuugggcagggaaccacccugaaaaacaagcacucaaauggcacuacacaugauagaaccccucacagaacucuuuuaaugaaugaguuaggugucccauuucauuugggaaccaaacaagugugcauagcauggucuaguucaagcugcuaugauggaaaagcaugguuacauauuuguguuacuggggaugauaaaaaugcuacugcuaguaucaucuauaaugggaugcuuguugacaguauugguucaugguccaaaaacauccucagaacucaggagucagaaugcguuugcaucaauggaacuugugcagugguaaugacugauggaagugcaucaggaaaggccgacacuagaguauuauucauaagagaaggggaaauuauaaauauuagcccauugucaggaagugcucagcacguugaggaaugcuccuguuauccccgguacccugaaguuaggugugucugcagagacaauuggaagggcuccaauaggcccauucuauauauaaauauggcugauuauagcauugaguccaguuaugugugcucaggacuuguuggcgacacaccaagaaaugaugauagcuccagcagcagcaacugcagagacccuaauaacgaaagaggggccccaggagugaaagggugggccuuugacgacgggaaugauguuuggaugggacggacaaucaaaaaugguucacgcucagguuaugagacuuuuagggucgucaaugguuggaccauggcuaauucaaagucacagauaaauaggcaagucauaguugacagugacgacuggucuggguauucuggcaucuucucuguugaaggcaaaaaaugcaucaacagguguuuuuauguggaguugauaagagggagaccacaggaacccagagugugguggaccucaaauagcaucauuguauucuguggaaccucagguacauauggaacaggcucauggccugauggagcgaauaucaacuucaugccuauauaa

SEQ ID NO: 55594 - RNA, 1401 nt, Artificial Sequence
  derived and/or modified CDS sequence (wt) from neuraminidase__InfluenzaA__AGQ81803
augaauccaaaucagaagauaauagcaauuggcucuguuucucuaaucauugcgauaauaugucuccucaugcagauugccaucuuaacaacgacuaugacacuacauuucaggcagaaugaaugcaguaacccaucgaauaaucaagugaugccaugugaaccgaucauaauagagaggaacacagugcauuugaauagcacuaccauagagagggaaauuuguccuaaaguagcagaauacaagaauuggucaaaaccacaaugucaaauuacaggguucgcuccuuucucaaaggacaacucaauuaggcuuucugcaaguggggauaucugggugacaagagaaccuuaugucucaugcagucucgacaaauguuaucaauuugcacuugggcagggaaccacccugaaaaacgagcacucaaauggcacuacacaugauagaaccccucacagaacucuuuuaaugaaugaguuaggugucccauuucauuugggaaccaaacaagugugcauagcauggucuaguucaagcugcuaugauggaaaagcaugguuacauauuuguguuacuggggaugauaaaaaugcuacugcuaguaucaucuaugaugggaugcuuguugacaguauugguucaugguccaaaaacauccucagaacucaggagucagaaugcguuugcaucaauggaacuugugcagugguaaugacugauggaagugcaucaggaaaggccgacacuagaguauuauucauaagagaagggaaaauuauaaauauuagcccauugucaggaagugcucagcacguugaggaaugcuccuguuauccccgguacccugaaguuaggugugucugcagagacaauuggaagggcuccaauaggcccauucuauauauaaauauggcugauuauagcauugaguccaguuaugugugcucaggacuuguuggcgacacaccaagaaaugaugauagcuccagcagcagcaacugcagagacccuaauaacgaaagaggggccccaggagugaaagggugggccuuugacgacgggaaugauguuuggaugggacggacaaucaaaaaugguucacgcucagguuaugagacuuuuagggucgucaaugguuggaucauggcuaauucaaagucacagauaaauaggcaagucauaguugacagugacgacuggucuggguauucuggcauauucucuguugaaggcaaaaaaugcaucaacagguguuuuuauguggaguugauaagagggagaccacaggaacccagagugugguggaccucaaauagcaucauuguauucuguggaaccucagguacauauggaacaggcucauggccugauggagcgaauaucaacuucaugccuauauaa

SEQ ID NO: 55595 - RNA, 1410 nt, Artificial Sequence
  derived and/or modified CDS sequence (wt) from neuraminidase__InfluenzaA__AGQ81804
augaauccaaaucagaagaugauagcaauuggggccgucucucuaacuauugcgauaauaugccuccucaugcagaccgccaucuuagucacgaccaugacacuacauuucaagcauaaugaaugcaccaacuccucgaacaaucaagcagccccauguggaccaaucauaauagaaaggaacguaacugagguagugcaccuaaauagcacuaccuuagagaaggaaauauguccuaaagcagcaggauacaggaauuggucgaaaccacaaugucagauaacaggguucgcuccuuucuccaaggacaauucaauuaggcucuccgcagguggagauauuugggugacaagagagccuuauguaucauguggucuugguaaauguuaucaguuugcacuugggcaggggacuaccuuggacaacagucacucaaauggcacaucacaugauaggacuccucauaggacacuuuugaugaaugaguuggguguuccauuucauuugaugaccaaacaagugugcauagcaugguccagcucaagcugucaugaugggaaagcaugguuacauguuuguguuacuggagaugauagaaaugcaacugccaguaucaucuauggugguauacuuguugauagcauugguucauggucaaaaaauauccucagaacucaggagucagaauguguuugcaucaauggaaccugugcgguaguaaugacagauggaagugcuucagggaaagcugacacuagaauacuauucauuagagaggggaaaauaguacacauuagcccuuugucaggaagugcucagcauguggaggaaugcuccuguuacccccaauacccagaaguuagguguguuuguagagacaauuggaggggaucuaauagacccguucuauacauaaauauggcagauuauaguauugauuccgguuaugugugcucgggacuuguuggugacacaccaagaaaugacgauguaucuagcagcagcaauugcaaggauccuaauaaugaaagaggggcuccaggagugaaagggugggccuuugacaauggaaaugacauuuggaugggaagaacuauugauaaggauucgcgcucagguuaugagacuuucagggucauugaugguuggaacacggcuaauucuaagucacagacaaguagacaagucauaguuggcagugacaauucguccggguauucuggaauuuucuccguugaaggcaaaagcugcaucaacagguguuuuuauguagagcuaaucagagggagaccaaaggagacuagagugugguggacuucaaauaguauuauuguauucuguggaacuucagguacuuauggaacaggcucauggccugauggugcaaauaucaauuucaugccuauauaa

SEQ ID NO: 55596 - RNA, 1401 nt, Artificial Sequence
  derived and/or modified CDS sequence (wt) from neuraminidase__InfluenzaA__AGQ81805
augaauccaaaucagaagauaauagcaauuggcucuguuucucuaaucauugcgauaauaugucuccucaugcagauugcccucuuaacaacgacuaugacacuacauuucaggcagaaugaaugcaguaacccaucgaauaaucaagugaugccaugugaaccgaucauaauagagaggaacacagugcauuugaauagcacuaccauagagagggaaauuuguccuaaaguagcagaauacaagaauuggucaaaaccacaaugucaaauuacaggguucgcuccuuuuucaaaggacaacucaauuaggcuuucugcagguggggauaucugggugacaagagaaccuuaugucucaugcagucucgacaaauguuaucaauuugcacuugggcagggaaccaccaugaaaaacaagcacucaaauggcacuacacaugauagaaccccucacagaacucuguuaaugaaugaguuaggugucccauuucauuugggaaccaaacaagugugcauagcauggucuaguucaagcugcuaugauggaaaagcaugguuacauauuuguguuacuggggaugauaaaaaugcuacugcuaguaucaucuaugaugggaugcuuguugacaguauugguucaugguccaaaaacauccucagaacucaggagucagaaugcguuugcaucaauggaacuugugcagugguaaugacugauggaagugcaucaggaaaggccgacacuagaguauuauucauaagagaagggaaaauuauaaauauuagcccauugucaggaagugcucagcacguugaggaaugcuccuguuauccccgguacccugaaguuaggugugucugcagagacaauuggaagggcuccaauaggcccauucuauauauaaauauggcugauuauagcauugaguccaguuaugugugcucaggacuuguuggcgacacaccaagaaaugaugauagcuccagcagcagcaacugcagaggcccuaauaacgaaagaggggccccaggagugaaagggugggccuuugacgacgggaaugauguuuggaugggacggacaaucaaaaaugguucacgcucagguuaugagacuuuuagggucgucaaugguuggaccauggcuaauucaaagucacagauaaauaggcaagucauaguugacagugacgacuggucuggguauucuggcaucuucucuguugaaggcaaaaaaugcaucaacagguguuuuuauguggaguugauaagagggagaccacaggaacccagagugugguggaccucaaauagcaucauuguauucuguggaaccucagguacauauggaacaggcucauggccugauggagcgaauaucaacuucaugccuauauaa

SEQ ID NO: 55597 - RNA, 1401 nt, Artificial Sequence
  derived and/or modified CDS sequence (wt) from neuraminidase__InfluenzaA__AGQ81807
augaauccaaaccagaagauaacagcaauuggcucuauuucucuaaucauugcgauaauaugucuccucaugcagauugccauccuaacaacgacuaugacacuacauuucaggcagaaugaaugcagaaacccaucgaauaaucaagugaugccaugugaaccagucauaauagagaggaacacagugcauuugaauagcacuaccauagagagggaaauuuguccuaaaguagcagaauacaagaauuggucaaaaccacaaugucaaauuacaggguucgcuccuuuuucaaaggacaacucaauuaggcuuucugcaaguggggauaucugggugacaagagaacccuaugucucaugcagucucaacaaauguuaucaauuugcacuugggcagggaaccacccugaaaaacaagcacucaaauggcacuacacaugauagaaccccucacagaacucuuuuaaugaaugaguuaggugucccauuccauuugggaaccaaacaagugugcauagcauggucuaguucaagcugcuaugauggaaaagcaugguuacauauuuguguuacuggggaugauaaaaaugcuacugcuaguaucaucuaugaugggaugcuuguugacaguauugguucaugguccaaaaacauccucagaacccaggagucagaaugcguuugcaucaauggaacuugugcagugguaaugacugauggaagugcaucaggaaaggccgacacuagaguauuauuuauaaaagaagggaaaauuauaaauauuagcccauugucaggaagugcucagcacguugaggaaugcuccuguuauccccgauauccugaaguuaggugugucuguagagacaauuggaagggcuccaauaggcccauucuauauauaaauauggcugauuauagcauugaguccaguuaugugugcucaggacuuguuggcgacacaccaagaaaugaugauagcuccagcagcagcaacugcagagacccuaauaacgaaagaggggccccaggagugaaagggugggccuuugacgacgggaaugauguuuggaugggacggacaaucaaaaaugguucacgcucagguuaugagacuuuuagggucgucaaugguuggaucauggcuaauucaaagucacagauaaauaggcaagucauaguugacagugacgacuggucuggguauucuggcaucuucucuguugaaggcaaaaaaugcaucaacagguguuuuuauguggagcugauaagagggagaccacaggaacccagagugugguggaccucaaauagcaucauuguauucuguggaaccucagguacauauggaacaggcucauggccugauggagcgaauaucaacuucaugccuauauaa

SEQ ID NO: 55598 - RNA, 1401 nt, Artificial Sequence
  derived and/or modified CDS sequence (wt) from neuraminidase__InfluenzaA__AGQ81808
augaauccaaaucagaagauaauagcaauuggcucuguuucucuaaccauugcgauaauaugcuuccucaugcagauugccauccuaacaacgaccaugacacuacauuucaagcaaaaugaaugcagcaacccaucaaauaaucaaguggugccaugugaaccgauccuaauagagaggaacacagugcauuugaauaguacuaccauagagaaggaaguuuguccuaaaguggcagaauacaagaauuggucaaaaccacaaugucaaauuacaggguucgcuccuuucucaaaggacaacucaauuaggcuuucugcagguggagauaucuggguaacaagagaaccuuauguuucaugcagucuuggcaaauguuaucaauuugcacuugggcagggaaccacccugaaaaacaaucacucaaauggcaccacacaugauagaacuccucacagaacucuuuuaaugaaugaguuaggugucccauuucauuugggaaccaaacaagugugcauagcauggucuaguucaaguugcuaugauggaaaagcaugguuacauauuuguguuacuggggaugauaaaaaugcuacugcuaguaucauuuaugaugggaugcuuguugacaguauugguucaugguccaaaaacauccucagaacccaggagucagaaugcguuugcaucaauggaacuugugcaguaguaaugacugaugggagugcaucaggaaaggcugacacuagaauauuauucauaagagaggggaaaauuauaaacauuagcccauuaucagggagugcucagcauguugaggaaugcucauguuacccccgguauccugaaguuagguguguuugcagagacaauuggaaaggcuccaauaggcccguucuauauauaaauauggcagauuauaguguugaguccaguuaugugugcucaggacuuguuggcgacacaccaagaaaugaugauagcuccagcagcagcaauugcagagacccuaauaacgaaagaggggccccaggagugaaaggaugggccuuugacgaugguaaugauguuuggaugggacgaacaaucagaaauaauucacgcucagguuaugagaccuuuaggguagucaaugguuggaccacggcuaauucaaagucacaaauaaauaggcaaaucauaguugacagugaaaacuggucuggguauucugguaucuucucuguugaaggcaaaaacugcaucaacaggugcuuuuauguggagcugauaagagggaggccacaggagcccagagugugguggacuucaaauagcaucauuguauucuguggaaccucagguacauaugggacaggcucauggccugauggagcgaauaucaacuucaugccuauauaa

SEQ ID NO: 55599 - RNA, 1401 nt, Artificial Sequence
  derived and/or modified CDS sequence (wt) from neuraminidase__InfluenzaA__AGQ81809
augaauccaaaucagaagauaacagcaauuggcucuguuucucuaaucauugcgauaauaugucuccucaugcaaauugccaucuuaacaacgacuaugacauuacauuucagacagaaugaaugcaguaacccaucgaauaaucaagugaugccaugugaaccgaucauaauagagaggaacacagugcauuugaauaguacuaccauagagagggaaauuuguccuaaaguagcagaauacaagaauuggucaaaaccacaaugucaaauuacaggguucgcuccuuucucaaaggacaacucaauuaggcuuucugcagguggggauaucugggugacaagagaaccuuaugucucaugcagucccgacaaauguuaucaauuugcacuugggcagggaaccacccugaaaaacaagcacucaaauggcacuacacaugauagaaccccucacagaacucuuuuaaugaaugaguuaggugucccauuucauuugggaaccaaacaagugugcauagcauggucuaguucaagcugcuaugauggaaaagcaugguuacauauuuguguuacuggggaugauaaaaaugcuacugcuaguaucaucuaugaugggaugcuuguugacaguauuggcucaugguccaaaaacauccucagaacucaggagucagaaugcguuugcaucaauggaacuugugcagugguaaugaccgauggaagugcaucaggagaggccgacacuagaauauuauucauaagagaaggaaaaauuauaaauaucagcccauugucaggaagugcucagcacguugaggaaugcuccuguuauccccgguauccugaaguuagguguguuugcagagacaauuggaagggcuccaauaggcccauuauauauauaaacaugguugauuauagcauugggucccguuaugugugcucaggacuugucggcgacacaccaagaaaugaugauagcaccagcagcagcaauugcagagacccuaauaacgaaagaggggccccaggagugaaagggugggccuuugacgacgggaaugauguuuggauggggcggacaaucaaaaauggcucacgcucagguuaugagacuuuuagggucaucaacgguuggaccauggcuaauucaaagucacagauaaauaggcaagucauaguugacagugacaacuggucuggguauuccggcaucuucucuguugaaggcaaaaaaugcaucaacagguguuuuuauguggaguugauaagagggagaccacaggaacccagagugugguggaccucaaauagcaucauuguauucuguggaaccucagguacauauggaacaggcucauggccugauggagcggauaucaacuucaugccuauauaa

SEQ ID NO: 55600 - RNA, 1401 nt, Artificial Sequence
  derived and/or modified CDS sequence (wt) from neuraminidase__InfluenzaA__AGQ81810
augaauccaaaucagaagauacuagcaauuggcucuguuucucuaaccauugcgauaauaugcuuccucaugcagauugccaucuuaacaacgacuaugacacuacauuucaagcaaaaugaaugcagcaacccaucaaauaaucaaguggugccaugugaaccgauccuaauagagaggaacacagugcauuugaauaguacuaccauagagaaggaaguuuguccuaaaguggcagaauacaagaauuggucaaaaccacaaugucaaauuacaggguucgcuccuuucucaaaggacaacucaauuaggcuuucugcagguggagauaucuggguaacaagagaaccuuauguuucaugcagucuuggcaaauguuaucaauuugcacuugggcagggaaccacccugaaaaacaaucacucaaauggcaccacacaugauagaacuccucacagaacucuuuuaaugaaugaguuaggugucccauuucauuugggaaccaaacaagugugcauagcauggucuaguucaaguugcuaugauggaaaagcaugguuacauauuuguguuacuggggaugauaaaaaugcuacugcuaguauuauuuaugaugggaugcuuguugacaguauugguucaugguccaaaaacauccucagaacccaggagucagaaugcguuugcaucaauggaacuugugcaguaguaaugacugaugggagugcaucaggaaaggcugacacuagaauauuauucauaagagaggggaaaauuauaaacauuagcccauuaucagggagugcucagcauguugaggaaugcucauguuauccccgguauccugaaguuagguguguuugcagagacaauuggaaaggcuccaauaggcccguucuauauauaaauauggcagauuauaguauugaguccaguuaugugugcucaggacuuguuggcgacacaccaagaaaugaugauagcuccagcagcagcaauugcagagacccuaauaacgaaagaggggccccaggagugaaaggaugggccuuugacgaugguaaugauguuuggaugggacgaacaaucagaaauaauucacgcucagguuaugagaccuuuaggguagucaaugguuggaccacggcuaauucaaagucacaaauaaauaggcaagucauaguugacagugaaaacuggucuggguauucugguaucuucucuguugaaggcaaaaacugcaucaacaggugcuuuuauguggagcugauaagagggaggccacaggagcccagagugugguggacuucaaauagcaucauuguauucuguggaaccucagguacauaugggacaggcucauggccugauggagcgaauaucaacuucaugccuauauaa

SEQ ID NO: 55601 - RNA, 1401 nt, Artificial Sequence
  derived and/or modified CDS sequence (wt) from neuraminidase__InfluenzaA__AGQ81811
augaauccaaaucagaagauaauagcaauuggcucuguuucucuaaccauugcgauaauauguuuccucaugcagauugccaucuuaacaacgacuaugacccuacauuucaagcaaaaugaaugcagcaacccaucaaauaaucaaguggugccaugugaaccaauccuaauagagaggaacacagugcauuugaauaguacuaccauagagaaggaaguuuguccuaaaguggcagaauacaagaauuggucaaaaccacaaugucaaauuacuggguucgcuccuuucucaaaggacaacucaauuaggcuuucugcagguggagauaucuggguaacaagagagccuuauguuucaugcagucuuggcaaauguuaucaauuugcacuugggcagggaaccacccugaaaaacaagcacucaaauggcaccacacaugauagaacuccucacagaacucuuuuaaugaaugaauuaggugucccauuccauuugggaaccaaacaagugugcauagcauggucuaguucaaguugcuaugauggaaaagcaugguuacauauuuguguuacuggggacgauaaaaaugccacugcuaguaucauuuaugaugggaugcuuguugacaguauugguucaugguccaaaaacauccucagaacccaggagucagaaugcguuugcaucaauggaacuugugcaguaguaaugacugauggaagugcaucaggaaaggcugacacuagaauauuauucauaagggaggggaaaauuguaaacauuagcccauugucagggagugcucagcacguugaggaaugcuccuguuacccccgguauccugaaguuagguguguuugcagagacaauuggaaaggcuccaauaggcccguucuauauauaaauauggcagauuauaguguugaguccaguuaugugugcucaggacuuguuggcgacacaccaagaaaugaugauagcuucagcagcagcaauugcagagacccuaauaacgaaagaggggccccaggagugaaaggaugggccuuugacgaugguaaugauguuuggaugggacgaacaaucagaaaugauucacgcucagguuaugagacuuuuaggguagucaaugguuggaccacggcuaauucaaagucacaaauaaauaggcaagucauaguugacagugaaagcuggucuggguauucugguaucuucucuguugaaggcaaaaacugcaucaacagguguuuuuauguggaguugauaagagggagaccacaggagccuagagugugguggacuucaaauagcaucauuguauucuguggaaccucagguacauauggaacaggcucauggccugauggagcgaauaucaacuucaugccuauauaa

SEQ ID NO: 55602 - RNA, 1410 nt, Artificial Sequence
  derived and/or modified CDS sequence (wt) from neuraminidase__InfluenzaA__AGQ81812
augaauccaaaucagaagauaauaacaauuggcucugucucucuaaccauugcaacaauauguuuccuuaugcagauugccauccuaguaacgacuauaacacugcacuucaagcagaaugaaugcagcauucccucgaacaaucaaguggugccaugcgagccaaucauaguggaaaggaacauaacagagauaguguauuugaauaacaccaccauagaaaaagaacuuugcccuaaauuaacagaauacagggauuggucgaaaccacagugucagaucacaggguuugccccuuucuccaaggacaacucaauccgucuuucugcugguggggacauuuggguaacaagggaaccuuauguaucaugcagucccaauaaauguuaucaguucgcacuugggcagggaacuacgcuagacaacaaacacucaaauggcacaauacacgauaggauuccucaucgaacccuuuugaugaacgaguuggguguuccguuucauuuggggaccaaacaaguuugcauagcaugguccagcucaagcugucaugauggaaaagcauggcugcauguuuguguuacuggggaugauagaaaugcaaccgccaguuucauuuaugaugggaugcuuguugacaguauugguucauggucucaaaacauucucagaacucaggagucagaaugcgucugcaucaaugggacuuguacaguaguaaugacugauggaagugcaucaggaagggcugauacuagaauacuauucauuaaagaggggaaaauuguccaugucagcccauugucaggaagugcucagcauauagaggaauguuccuguuauccccgcuauccagaugucagauguguuugcagagacaauuggaaagguuccaauaggcccauuauagauauaaauguggcagauuauagcauugacucuaguuacguguguucagggcuuguuggagacacaccaagaaacgaugauagcucuagcaauagcaacugcaaggauccuaauaaugagagagggaacccuggaguaaaagggugggcauuugacuauggaaaugauguuuggaugggaagaacaaucagcaaggauucacgcucugguuaugagaccuucagggucauuggcgguuggacaacagcuaauuccaaaucucagguaaauagacaagucauaguugacaacaauaauuggucuggguauucuggcauuuucucuguugaaggcaaaagcugcaucaauagguguuuuuauguggaguugauaagaggaaggccacaagagacuagaguaugguggaccucaaacagcaucgucguauuuuguggaacuucagguacuuauggaacaggcucauggccugauggggcgaauaucaauuucaugccuauauaa

SEQ ID NO: 55603 - RNA, 1401 nt, Artificial Sequence
  derived and/or modified CDS sequence (wt) from neuraminidase__InfluenzaA__AGQ81814
augaauccaaaucagaagauaauagcaauuggcucuguuucucuaaccauugcgauaaugugcuuccucaugcagauugccaucuuaacaacgacuaugacacuacauuucaagcaaaaugaaugcagcaacccaucaaauaaucaaguggugccaugugaaccgauccuaauagagaggaacacagugcauuugaauaguacuaccauagagaaggaaguuuguccuaaaguggcagaauacaagaauuggucaaaaccacaaugucaaauuacaggguucgcuccuuucucaaaggacaacucaauuaggcuuucugcagguggagauaucuggguaacaagagaaccuuauguuucaugcagucuuggcaaauguuaucaauuugcacuugggcagggaaccacccugaaaaacaaucacucaaauggcaccacacaugauagaacuccucacagaacucuuuuaaugaaugaguuagguguuccauuucauuugggaaccaaacaagugugcauagcauggucuaguucaaguugcuaugauggaaaagcaugguuacauauuuguguuacuggggaugauaaaaaugcuacugcuaguaucauuuaugaugggaugcuugucgacaguauugguucaugguccaaaaacauccucagaacccaggagucagaaugcguuugcaucaauggaacuugugcaguaguaaugacugaugggagugcaucaggaaaggcugacacuagaauauuauucauaagagaggggaaaauuauaaacauuagcccauuaucagggagugcucagcauguugaggaaugcucauguuacccccgguauccugaaguuagguguguuugcagagacaauuggaaaggcuccaauaggcccguucuauauauaaauauggcagauuauaguguugaguccaguuaugugugcucaggacuuguuggcgacacaccaagaaaugaugauagcuccagcagcagcaauugcagagacccuaauaacgaaagaggggccccaggagugaaaggaugggccuuugacgaugguaaugauguuuggaugggacgaacaaucagaaauaauucacgcucagguuaugagaccuuuaggguugucaacgguuggaccacggcuaauucaaagucacaaauaaauaggcaagucauaguugacagugaaaacuggucuggguauucugguaucuucucuguugaaggcaaaaacugcaucaacagguguuuuuauguggagcugauaagagggaggccacaggagcccagagugugguggacuucaaauagcaucauuguauucuguggaaccucagguacauaugggacaggcucauggccugauggagcgaauaucaacuucaugccuauauaa

SEQ ID NO: 55604 - RNA, 1401 nt, Artificial Sequence
  derived and/or modified CDS sequence (wt) from neuraminidase__InfluenzaA__AGQ81815
augaauccaaaucagaagauaauagcaauuggcucuguuucacuaaccauugcgauaauaugcuuccucaugcagauugccaucuuaacaacgacuaugacccuacauuucaagcaaaaugaaugcagcaacccaucaaauaaccaaguggugccaugugaaccgauccuaauagagaggaacacagugcauuugaauaguacuaccauagagaaggaaguuuguccuaaaguggcagaauacaagaauuggucaaaaccacaaugucaaauuacaggguucgcuccuuucucaaaggacaacucaauuaggcuuucugcagguggagauaucuggguaacaagagaaccuuauguuucaugcagucuuggcaaauguuaucaauuugcacuugggcagggaaccacccugaaaaacaagcacucaaauggcaccacacaugauagaacuccucacagaacucuuuuaaugaaugaguuaggugucccauuucauuugggaacaaaacaagugugcauagcauggucuaguucaaguugcuaugauggaaaagcaugguuacauauuuguguuacuggggaugauaaaaaugcuacugcuaguaucauuuaugaugggaugcuuguugacaguauugguucaugguccaagaacauccucagaacccaggagucagaaugcguuugcaucaauggaacuugugcaguaguaaugacugauggaagugcaucaggaaaggcugacacuagaauauuauucauaagagaggggaaaauuauaaacauuagcccauugucagggagugcucagcacguugaggaaugcuccuguuacccccgguauccugaaguuagguguguuugcagagacaauuggaaaggcuccaauaggcccguucuauauauaaauauggcagauuauaguguugaguccaguuaugugugcucaggacuuguuggcgacacaccaagaaaugaugauagcuccagcagcagcaauugcagagauccuaauaacgaaagagggaccccaggagugaaaggaugggccuuugacgaugguaaugauguuuggaugggacgaacaaucagaaaugauucacgcucagguuaugagacuuuuaggguaaucaaugguuggaccacggcuaauucaaagucacaaauaaauaggcaagucauaguugacagugaaaacuggucuggguauucugguaucuucucuguugaaggcaaaaacugcaucaacagguguuuuuauguggaguugauaagagggagaccacaggagcccagagugugguggacuucaaauagcaucauuguauucuguggaaccucagguacauauggaacaggcucauggccugauggagcgaauaucaacuacaugccuauauaa

SEQ ID NO: 55605 - RNA, 1401 nt, Artificial Sequence
  derived and/or modified CDS sequence (wt) from neuraminidase__InfluenzaA__AGQ81816
augaauccaaaucagaagauaauagcaauuggcucuguuucacuaaccauugcgauaauaugcuuccucaugcagauugccaucuuaacaacgacuaugacccuacauuucaagcaaaauggaugcagcaacccaucaaauaaccaaguggugccaugugaaccgauccuaauagagaggaacacagugcauuugaauaguacuaccauagagaaggaaguuuguccuaaaguggcagaauacaagaauuggucaaaaccacaaugucaaauuacaggguucgcuccuuucucaaaggacaacucaauuaggcuuucugcagguggagauaucuggguaacaagagaaccuuauguuucaugcagucuuggcaaauguuaucaauuugcacuugggcagggaaccacccugaaaaacaagcacucaaauggcaccacacaugauagaacuccucacagaacucuuuuaaugaaugaguuaggugucccauuucauuugggaacaaaacaagugugcauagcauggucuaguucaaguugcuaugauggaaaagcaugguuacauauuuguguuacuggggaugauaaaaaugcuacugcuaguaucauuuaugaugggaugcuuguugacaguauugguucaugguccaagaacauccucagaacccaggagucagaaugcguuugcaucaauggaacuugugcaguaguaaugacugauggaagugcaucaggaaaggcugacacuagaauauuauucauaagagaggggaaaauuauaaacauuagcccauugucagggagugcucagcacguugaggaaugcuccuguuacccccgguauccugaaguuagguguguuugcagagacaauuggaaaggcuccaauaggcccguucuauauauaaauauggcagauuauaguguugaguccaguuaugugugcucaggacuuguuggcgacacaccaagaaaugaugauagcuccagcagcagcaauugcagagauccuaauaacgaaagagggaccccaggagugaaaggaugggccuuugacgaugguaaugauguuuggaugggacgaacaaucagaaaugauucacgcucagguuaugagacuuuuaggguaaucaaugguuggaccacggcuaauucaaagucacaaauaaauaggcaagucauaguugacagugaaaacuggucuggguauucugguaucuucucuguugaaggcaaaaacugcaucaacagguguuuuuauguggaguugauaagagggagaccacaggagcccagagugugguggacuucaaauagcaucauuguauucuguggaaccucagguacauauggaacaggcucauggccugauggagcgaauaucaacuacaugccuauauaa

SEQ ID NO: 55606 - RNA, 1401 nt, Artificial Sequence; identical to SEQ ID NO: 55604
  derived and/or modified CDS sequence (wt) from neuraminidase__InfluenzaA__AGQ81817

SEQ ID NO: 55607 - RNA, 1401 nt, Artificial Sequence; identical to SEQ ID NO: 55604
  derived and/or modified CDS sequence (wt) from neuraminidase__InfluenzaA__AGQ81818

SEQ ID NO: 55608 - RNA, 1401 nt, Artificial Sequence
  derived and/or modified CDS sequence (wt) from neuraminidase__InfluenzaA__AGQ81819
augaauccaaaucagaagauaauagcaauuggcucuguuucacuaaccauugcgauaauaugcuuucucaugcagauugccaucuuaacaacgacuaugacccuacauuucaagcaaaaugaaugcagcaacccaucaaauaaccaaguggugccaugugaaccgauccuaauagagaggaacacagugcauuugaauaguacuaccauagagaaggaaguuuguccuaaaguggcagaauacaagaauuggucaaaaccacaaugucaaauuacaggguucgcuccuuucucaaaggacaacucaauuaggcuuucugcagguggagauaucuggguaacaagagaaccuuauguuucaugcagucuuggcaaauguuaucaauuugcacuugggcagggaaccacccugaaaaacaagcacucaaauggcaccacacaugauagaacuccucacagaacucuuuuaaugaaugaguuaggugucccauuucauuugggaacaaaacaagugugcauagcauggucuaguucaaguugcuaugauggaaaagcaugguuacauauuuguguuacuggggaugauaaaaaugcuacugcuaguaucauuuaugaugggaugcuuguugacaguauugguucaugguccaagaacauccucagaacccaggagucagaaugcguuugcaucaauggaacuugugcaguaguaaugacugauggaagugcaucaggaaaggcugacacuagaauauuauucauaagagaggggaaaauuauaaacauuagcccauugucagggagugcucagcacguugaggaaugcuccuguuacccccgguauccugaaguuagguguguuugcagagacaauuggaaaggcuccaauaggcccguucuauauauaaauauggcagauuauaguguugaguccaguuaugugugcucaggacuuguuggcgacacaccaagaaaugaugauagcuccagcagcagcaauugcagagauccuaauaacgaaagagggaccccaggagugaaaggaugggccuuugacgaugguaaugauguuuggaugggacgaacaaucagaaaugauucacgcucagguuaugagacuuuuaggguaaucaaugguuggaccacggcuaauucaaagucacaaauaaauaggcaagucauaguugacagugaaaacuggucuggguauucugguaucuucucuguugaaggcaaaaacugcaucaacagguguuuuuauguggaguugauaagagggagaccacaggagcccagagugugguggacuucaaauagcaucauuguauucuguggaaccucagguacauauggaacaggcucauggccugauggagcgaauaucaacuacaugccuauauaa

SEQ ID NO: 55609 - RNA, 1401 nt, Artificial Sequence
  derived and/or modified CDS sequence (wt) from neuraminidase__InfluenzaA__AGQ81820
augaauccaaaucagaagauaauagcaauuggcucuguuucucuaaccauugcgauaauaugcuuccucaugcagauugccaucuuaacaacgacuaugacccuacauuucaagcaaaaugaaugcagcaacccaucaaauaaccaaguggugccaugugaaccgauccuaauagagaggaacacagugcauuugaauaguacuaccauagagaaggaaguuuguccuaaaguggcggaauacaagaauuggucaaaaccacaaugucaaauuacaggguucgcuccuuucucaaaggacaacucaauuaggcuuucugcagguggagauaucuggguaacaagagaaccuuauguuucaugcagucuuggcaaauguuaucaauuugcacuugggcagggaaccacccugaaaaacaagcacucaaauggcaccacacaugauagaacuccucacagaacucuuuuaaugaaugaguuaggugucccauuucauuugggaaccaaacaagugugcauagcauggucuaguucaaguugcuaugauggaaaagcaugguugcauauuuguguuacuggggaugauaaaaaugcuacugcuaguaucauuuaugaugggaugcuuguugacaguauugguucaugguccaaaaacauccucagaacccaggagucagaaugcguuugcaucaauggaacuugugcaguaguaaugacugauggaagugcaucaggaaaggcugacacuagaauauuauucauaagagaggggaaaauuauaaacauuagcccauugucagggagugcucagcacguugaggaaugcuccuguuacccccgguauccugaaguuagguguguuugcagagacaauuggaaaggcuccaauaggcccguucuauauauaaauauggcagauuauaguauugaguccaguuaugugugcucaggacuuguuggcgacacaccaagaaaugaugauagcuccagcagcagcaauugcagagacccuaauaacgaaagagggaccccaggagugaaaggaugggccuuugacgaugguaaugauguuuggaugggacgaacaaucagaaaugauucacgcucagguuaugagacuuuuaggguaaucaaugguuggaccacagcuaauucaaagucacaaauaaauaggcaagucauaguugacagugaaaacuggucuggguauucugguaucuucucuguugaaggcaaaaacugcaucaacagguguuuuuauguggaguugauaagagggagaccacaggagcccaaagugugguggacuucaaauagcaucauuguauucuguggaaccucagguacauauggaacaggcucauggccugauggagcgaauaucaacuucaugccuauauaa

SEQ ID NO: 55610 - RNA, 1401 nt, Artificial Sequence
  derived and/or modified CDS sequence (wt) from neuraminidase__InfluenzaA__AGQ81822
augaauccaaaucagaagauaauagcaauuggcucuguuucacuaaccauugcgauaauaugcuuccucaugcagauugccaucuuaacaacgacuaugacccuacauuucaagcaaaaugaaugcagcaacccaucaaauaaccaaguggugccaugugaaccgauccuaauagagaggaacacagugcauuugaauaguacuaccauagagaagaaaguuuguccuaaaguggcagaauacaagaauuggucaaaaccacaaugucaaauuacaggguucgcuccuuucucaaaggacaacucaauuaggcuuucugcagguggagauaucuggguaacaagagaaccuuauguuucaugcagucuuggcaaauguuaucaauuugcacuugggcagggaaccacccugaaaaacaagcacucaaauggcaccacacaugauagaacuccucacagaacucuuuuaaugaaugaguuaggugucccauuucauuugggaacaaaacaagugugcauagcauggucuaguucaaguugcuaugauggaaaagcaugguuacauauuuguguuacuggggaugauaaaaaugcuacugcuaguaucauuuaugaugggaugcuuguugacaguauugguucaugguccaagaacauccucagaacccaggagucagaaugcguuugcaucaauggaacuugugcaguaguaaugacugauggaagugcaucaggaaaggcugacacuagaauauuauucauaagagaggggaaaauuauaaacauuagcccauugucagggagugcucagcacguugaggaaugcuccuguuacccccgguauccugaaguuagguguguuugcagagacaauuggaaaggcuccaauaggcccguucuauauauaaauauggcagauuauaguguugaguccaguuaugugugcucaggacuuguuggcgacacaccaagaaaugaugauagcuccagcagcagcaauugcagagauccuaauaacgaaagagggaccccaggagugaaaggaugggccuuugacgaugguaaugauguuuggaugggacgaacaaucagaaaugauucacgcucagguuaugagacuuuuaggguaaucaaugguuggaccacggcuaauucaaagucacaaauaaauaggcaagucauaguugacagugaaaacuggucuggguauucugguaucuucucuguugaaggcaaaaacugcaucaacagguguuuuuauguggaguugauaagagggagaccacaggagcccagagugugguggacuucaaauagcaucauuguauucuguggaaccucagguacauauggaacaggcucauggccugauggagcgaauaucaacuacaugccuauauaa

SEQ ID NO: 55611 - RNA, 1401 nt, Artificial Sequence
  derived and/or modified CDS sequence (wt) from neuraminidase__InfluenzaA__AGQ81823
augaauccaaaucagaagauaauagcaauuggcucuguuucucuaaccauugcgauaauaugcuuccucaugcagauugccaucuuaacaacgacuaugacacuacauuucaagcaaaaugaaugcagcaacccaucaaauaaucaaguggugccaugugaaccgauccuaauagagaggaacacagugcauuugaauaguacuaccauagagaaggaaguuuguccuaaaguggcagaauacaagaauuggucaaaaccacaaugucaaauuacaggguucgcuccuuucucaaaggacaacucaauuaggcuuucugcggguggagauaucuggguaacaagagaaccuuauguuucaugcagucuuggcaaauguuaucaauuugcacuugggcagggaaccacccugaaaaacaagcacucaaauggcaccacacaugauagaacuccucacagaacucuuuuaaugaaugaguuaggugucccauuucauuugggaaccaaacaagugugcauagcauggucuaguucaaguugcuaugauggaaaagcaugguuacauauuuguguuacuggggaugauaaaaaugcuacugcuaguaucauuuaugaugggaugcuuguugacaguauugguucaugguccaaaaacauccucagaacccaggagucagaaugcguuugcaucaauggaacuugugcaguaguaaugacugaugggagugcaucaggaaaggcugacacuagaauauuauucauaagagaggggaaaauuauaaacauuagcccauuaucagggagugcucagcacguugaggaaugcucauguuacccccgguauccugaaguuagguguguuugcagagacaauuggaaaggcuccaauaggcccguucuauauauaaauauggcagauuauaguguugaguccaguuaugugugcucaggacuuguuggcgacacaccaagaaaugaugauagcuccagcagcagcaauugcagagacccuaauaacgaaagaggggccccaggagugaaaggaugggccuuugacgaugguaaugauguuuggaugggacgaacaaucagaaaugauucacgcucagguuaugagaccuuuaggguagucaaugguuggaccacggcuaauucaaagucacaaauaaauaggcaagucauaguugacagugaaaacuggucuggguauucugguaucuucucuguugaaggcaaaaacugcaucaacagguguuuuuauguggagcugauaagagggaggccacaggagcccagagugugguggacuucaaauagcaucauuguauucugugggaccucagguacauaugggacaggcucauggccugauggagcgaauaucaacuucaugccuauauaa

SEQ ID NO: 55612 - RNA, 1401 nt, Artificial Sequence
  derived and/or modified CDS sequence (wt) from neuraminidase__InfluenzaA__AGQ81824
augaauccaaaucagaagauaauagcaauuggcucuguuucucuaaccauugcgauaauaugcuuccucaugcagauugccaucuuaacaacgacuaugacacuacauuucaagcaaaaugaaugcagcaacccaucaaauaaucaaguggugccaugugaaccgauccuaauagagaggaacacagugcauuugaauaguacuaccauagagaaggaaguuuguccuaaaguggcagaauacaagaauuggucaaaaccacaaugucaaauuacaggguucgcuccuuucucaaaggacaacucaauuaggcuuucugcggguggagauaucuggguaacaagagaaccuuauguuucaugcagucuuggcaaauguuaucaauuugcacuugggcagggaaccacccugaaaaacaagcacucaaauggcaccacacaugauagaacuccucacagaacucuuuuaaugaaugaguuaggugucccauuucauuugggaaccaaacaagugugcauagcauggucuaguucaaguugcuaugauggaaaagcaugguuacauauuuguguuacuggggaugauaaaaaugcuacugcuaguaucauuuaugaugggaugcuuguugacaguauugguucaugguccaaaaacauccucagaacccaggagucagaaugcguuugcaucaacggaacuugugcaguaguaaugacugaugggagugcaucaggaaaggcugacacuagaauauuauucauaagagaggggaaaauuauaaacauuagcccauuaucagggagugcucagcacguugaggaaugcucauguuacccccgguauccugaaguuagguguguuugcagagacaauuggaaaggcuccaauaggcccguucuauauauaaauauggcagauuauaguguugaguccaguuaugugugcucaggacuuguuggcgacacaccaagaaaugaugauagcuccagcagcagcaauugcagagacccuaauaacgaaagaggggccccaggagugaaaggaugggccuuugacgaugguaaugauguuuggaugggacgaacaaucagaaaugauucacgcucagguuaugagaccuuuaggguagucaaugguuggaccacggcuaauucaaagucacaaauaaauaggcaagucauaguugacagugaaaacuggucuggguauucugguaucuucucuguugaaggcaaaaacugcaucaacagguguuuuuauguggagcugauaagagggaggccacaggagcccagagugugguggacuucaaauagcaucauuguauucugugggaccucagguacauaugggacaggcucauggccugauggagcgaauaucaacuucaugccuauauaa

SEQ ID NO: 55613 - RNA, 1401 nt, Artificial Sequence; identical to SEQ ID NO: 55612
  derived and/or modified CDS sequence (wt) from neuraminidase__InfluenzaA__AGQ81825

SEQ ID NO: 55614 - RNA, 1401 nt, Artificial Sequence
  derived and/or modified CDS sequence (wt) from neuraminidase__InfluenzaA__AGQ81831
augaauccaaaucagaagauacuagcaauuggcucuguuucucuaaccauugcgauaauauguuuccucaugcagauugccaucuuaacaacgacuaugacccuacauuucaagcaaaaugaaugcagcaacccaucaaauaaucaaguggugccaugugaaccaauccuaauagagaggaacacagugcauuugaauaguacuaccauagagaaggaaguuuguccuaaaguggcagaauacaagaauuggucaaaaccacaaugucaaauuacuggguucgcuccuuucucaaaggacaacucaauuaggcuuucugcagguggagauaucuggguaacaagagagccuuauguuucaugcagucuuggcaaauguuaucaauuugcacuugggcagggaaccacccugaaaaacaagcacucaaauggcaccacacaugauaggacuccucacagaacucuuuuaaugaaugaauuaggugucccauuccauuugggaaccaaacaagugugcauagcauggucuaguucaaguugcuaugauggaaaagcaugguuacauauuuguguuacuggggacgauaaaaaugccacugcuaguaucauuuaugaugggaugcuuguugacaguauugguucaugguccaaaaacauccucagaacccaggagucagaaugcguuugcaucaauggaacuugugcaguaguaaugacugauggaagugcaucaggaaaggcugacacuagaauauuauucauaagggaggggaaaauuguaaacauuagcccauugucagggagugcucagcacguugaggaaugcuccuguuacccccgguauccugaaguuagguguguuugcagagacaauuggaaaggcuccaauaggcccguucuauauauaaauauggcagauuauaguguugaguccaguuaugugugcucaggacuuguuggcgacacaccaagaaaugaugauagcuucagcagcagcaauugcagagacccuaauaacgaaagaggggccccaggagugaaaggaugggccuuugacgaugguaaugauguuuggaugggacgaacaaucagaaaugauucacgcucagguuaugagacuuuuaggguagucaaugguuggaccacggcuaauucaaagucacaaauaaauaggcaagucauaguugacagugaaagcuggucuggguauucugguaucuucucuguugaaggcaaaaacugcaucaacagguguuuuuauguggaguugauaagagggagaccacaggagccuagagugugguggacuucaaauagcaucauuguauucuguggaaccucagguacauauggaacaggcucauggccugauggagcgaauaucaacuucaugccuauauaa

SEQ ID NO: 55615 - RNA, 1401 nt, Artificial Sequence; identical to SEQ ID NO: 55604
  derived and/or modified CDS sequence (wt) from neuraminidase__InfluenzaA__AGQ81837

SEQ ID NO: 55616 - RNA, 1401 nt, Artificial Sequence; identical to SEQ ID NO: 55604
  derived and/or modified CDS sequence (wt) from neuraminidase__InfluenzaA__AGQ81838

SEQ ID NO: 55617 - RNA, 1401 nt, Artificial Sequence; identical to SEQ ID NO: 55611
  derived and/or modified CDS sequence (wt) from neuraminidase__InfluenzaA__AGQ81839

SEQ ID NO: 55618 - RNA, 1401 nt, Artificial Sequence; identical to SEQ ID NO: 55611
  derived and/or modified CDS sequence (wt) from neuraminidase__InfluenzaA__AGQ81840

SEQ ID NO: 55619 - RNA, 1401 nt, Artificial Sequence; identical to SEQ ID NO: 55608
  derived and/or modified CDS sequence (wt) from neuraminidase__InfluenzaA__AGQ81841

SEQ ID NO: 55620 - RNA, 1410 nt, Artificial Sequence
  derived and/or modified CDS sequence (wt) from neuraminidase__InfluenzaA__AGQ81843
augaauccaaaucagaagauaauaacaauugguguagugaacacgacucuaucaacaauagcccuucuuauuggaauugggaaucugauuuucaacacuguuauacaugagaaaauaggaguccaccaaacugugguauacccaacaauaacacccccagugauaccaaacugcagugacaccacaauuacauacaacaacacugugguaaacaacauaacaacaacaauaauaaacaaagcggaaaagcaguucaagcccucacugccacugugccccuuccgagguuucuucccuuuucauaaggacaaugcaauacgauugggugagaacaaagauguaauagucacaagagagccuuaugucaguugcgacaaugaugauugcugguccuuugcccuugcccaaggggcucuacuaggaacuaaacacagcaauggaaccaucaaagacaggacaccguauagaucauugauccgguuuccgauagggacagcuccagugcuggguaacuacaaggagauauguguugcuuggucaaguagcaguuguuucgauggaaaggaauggaugcauguuugcaugacuggaaaugacaaugaugcgaguggccaaauaauauaugcagggaagaugacagacuccauuaaaucauggagaagagauauauuaagaacucaagagucugaaugccaaugcauugaugggaccuguauugucgcugucacagauggcccugcagcuaguagugcagaccaccgaauuuacuggauacgagaagggaagauaauaaaguaugaagacauucccaaaacaaagauacagcauuuagaggaguguucuugcuauguggacaccgauguguacugcauauguagggacaauuggaaagguucuaacaggccuuggaugaggaucaacaaugagaccauacuagaaacaggguauguaugcagcaaauuccauucagacacccccaggccagccgauccuucaacagugucaugugauuccccaaguaacaucaauggaggaccuggagucaaaggauuuggcuucagagcggguaaugauguaugguugggaaggacaguaucaacuacuggaagaucaggcuuugaagucaucaaggucacagagggauggaucaacucccucaaucaugcuaaaucaguuacacaaacacuaguaucgaacaaugauuggucagguuacucagggaguuucauuguugagaacaauggcuguuuccagcccugcuucuacauugaacucauacggggaaggcccaauaggaacgacgacguuucuuggacaagcaauaguauaguuacuuucuguggacuagacaaugaaccuggaucgggaaauuggccugaugguuccaacauuggguuuaugcccaaguaa

SEQ ID NO: 55621 - RNA, 1410 nt, Artificial Sequence
  derived and/or modified CDS sequence (wt) from neuraminidase__InfluenzaA__AGQ81845
augaauccaaaucagaagauaauaacaauugguguaguaaacacgacucuaucaacaauagcccuucuuauuggaauugggaaucugauuuucaacacuguuauacaugagaaaauagggguccaccaaacugugauauacccaacaauaacauccccagugguaccaaacugcagugacaccacaauuacauacaacaacacugugguaaacaacauaacaacaacaguaauaaauaaagcggaaaagcauuucaagcccucacugccacugugccccuucaaagguuucuuccccuuucauaaggacaaugcaauacgauugggugagaacaaagauguaauagucacaagggagccuuaugucaguugcgacaaugaugauugcugguccuuugcccucgcccaaggggcucugcuaggaacuaaacacagcaauggaaccaucaaggacaggacaccguauagaucauuaauccgguucccaauagggacagccccaguacuggguaacuacaaggagauauguguugcuuggucaaguagcaguugcuucgauggaaaagaauggaugcauguuugcaugacuggaaaugacaaugaugcgaguggccaaauaauauaugcagggaagaugacagacuccauuaaaucauggagaagggauauacuaagaacucaagaauccgaaugucaaugcauugaugggaccuguauugucgcuguuacagauggcccugcagcuaauagugcagaucaccgaauuuacuggauacgagaaggaaagauaauaaaguaugaaaacauucccaaaacaaagauacaacauuuagaggaguguucuugcuauguggacaccgauguguacugcauauguagggacaauuggaaagguucuaacaggccuuggaugaggaucaacaaugagaccauacuagaaacaggguauguaugcagcaaauuccauucagauacccccaggccagccgauccuucaacagugucaugugauuccccaaguaacaucaauggaggaccuggagucaaaggauuugguuucagaacagguaaugauguaugguugggaaggacggugucaacuacuggaagaucaggcuuugaagucaucaaggucacagagggauggaucaacucccucaaucaugccaaaucaguuacacaaacacuaguaucgaacagugauuggucagguuacucagggaguuucauuguugagaacaauggcuguuuccagcccugcuucuauauugaacucauacggggaaggcccaauaagaacgaugauguuucuuggacaagcaauaguauaguuacuuucuguggacuagacaaugaaccuggaucgggaaauuggccugaugguuccaacauuggguuuaugcccaaguaa

SEQ ID NO: 55622 - RNA, 1410 nt, Artificial Sequence
  derived and/or modified CDS sequence (wt) from neuraminidase__InfluenzaA__AGQ81846
augaauccaaaucagaagauaauaacaauugguguaguaaacacgacucuaucaacaauagcccuucuuauuggaauugggaaucugauuuucaacacuguuauacaugagaaaauagggguccaccaaacugugauauacccaacaauaacauccccagugguaccaaacugcagugacaccacaauuacauacaacaacacugugguaaacaacauaacaacaacaguaauaaauaaagcggaaaagcauuucaagcccucacugccacugugccccuucaaagguuucuuccccuuucauaaggacaaugcaauacgauugggugagaacaaagauguaauagucacaagggagccuuaugucaguugcgacaaugaugauugcugguccuuugcccucgcccaaggggcucuacuaggaacuaaacacagcaauggaaccaucaaggacaggacaccguauagaucauuaauccgguucccaauagggacagccccaguacuggguaacuacaaggagauauguguugcuuggucaaguagcaguugcuucgauggaaaagaauggaugcauguuugcaugacuggaaaugacaaugaugcgaguggccaaauaauauaugcagggaagaugacagacuccauuaaaucauggagaagggauauacuaagaacucaagaauccgaaugucaaugcauugaugggaccuguauugucgcuguuacagauggcccugcagcuaauagugcagaucaccgaauuuacuggauacgagaaggaaagauaauaaaguaugaaaacauucccaaaacaaagauacaacauuuagaggaguguucuugcuauguggacaccgauguguacugcauauguagggacaauuggaaagguucuaacaggccuuggaugaggaucaacaaugagaccauacuagaaacaggguauguaugcagcaaauuccauucagauacccccaggccagccgauccuucaacagugucaugugauuccccaaguaacaucaauggaggaccuggagucaaaggauuugguuucagaacagguaaugauguaugguugggaaggacggugucaacuacuggaagaucaggcuuugaagucaucaaggucacagagggauggaucaacucccucaaucaugccaaaucaguuacacaaacacuaguaucgaacagugauuggucagguuacucagggaguuucauuguugagaacaauggcuguuuccagcccugcuucuauauugaacucauacggggaaggcccaauaagaacgaugaugucucuuggacaagcaauaguauaguuacuuucuguggacuagacaaugaaccuggaucgggaaauuggccugaugguuccaacauuggguuuaugcccaaguaa

SEQ ID NO: 55623 - RNA, 1410 nt, Artificial Sequence
  derived and/or modified CDS sequence (wt) from neuraminidase__InfluenzaA__AGQ81847
augaauccaaaucagaagauaauaacaauugguguaguaaacacgacucugucaacaauagcccuucuuauuggaauugggaaucugauuuucaacacuguuauacaugagaaaauagggguccaccaaacugugauauacccaacaauaacauccccagugguaccaaacugcagugacaccacaauuacauacaacaacacugugguaaacaacauaacaacaacaguaauaaauaaagcggaaaagcauuucaagcccucacugccacugugccccuucaaagguuucuuccccuuucauaaggacaaugcaauacgauugggugagaacaaagauguaauagucacaagggagccuuaugucaguugcgacaaugaugauugcugguccuuugcccucgcucaaggggcucuacuaggaacuaaacacagcaauggaaccaucaaggacaggacaccguauagaucauuaauccgguucccaauagggacagccccaguacuggguaacuacaaggagauauguguugcuuggucaaguagcaguugcuucgauggaaaagaauggaugcauguuugcaugacuggaaaugacaaugaugcgaguggccaaauaauauaugcagggaagaugacagacuccauuaaaucauggagaagggauauacuaagaacucaagaauccgaaugucaaugcauugaugggaccuguauugucgcuguuacagauggcccugcagcuaauagugcagaucaccgaauuuacuggauacgagaaggaaagauaauaaaguaugaaaacauucccaaaacaaagauacaacauuuagaggaguguucuugcuauguggacaccgauguguacugcauauguagggacaauuggaaagguucuaacaggccuuggaugaggaucaacaaugagaccauacuagaaacaggguauguaugcagcaaauuccauucagauacccccaggccagccgauccuucaacagugucaugugauuccccaaguaacaucaauggaggaccuggagucaaaggauuugguuucagaacagguaaugauguaugguugggaaggacggugucaacuacuggaagaucaggcuuugaagucaucaaggucacagagggauggaucaacucccucaaucaugccaaaucaguuacacaaacacuaguaucgaacagugauuggucagguuacucagggaguuucauuguugagaacaauggcuguuuccagcccugcuucuauauugaacucauacggggaaggcccaauaagaacgaugaugucucuuggacaagcaauaguauaguuacuuucuguggacuagacaaugaaccuggaucgggaaauuggccugaugguuccaacauuggguuuaugcccaaguaa

SEQ ID NO: 55624 - RNA, 1410 nt, Artificial Sequence
  derived and/or modified CDS sequence (wt) from neuraminidase__InfluenzaA__AGQ81848
augaauccaaaucagaagauaauaacaauugguguaguaaacacgacucugucaacaauagcccuucuuauuggaauugggaaucugauuuucaacacuguuauacaugagaaaauagggguccaccaaacugugauauacccaacaauaacauccccagugguaccaaacugcagugacaccacaauuacauacaacaacacugugguaaacaacauaacaacaacaguaauaaauaaagcggaaaagcauuucaagcccucacugccacugugccccuucaaagguuucuuccccuuucauaaggacaaugcaauacgauugggugagaacaaagauguaauagucacaagggagccuuaugucaguugcgacaaugaugauugcugguccuuugcccucgcucaaggggcucuacuaggaacuaaacacagcaauggaaccaucaaggacaggacaccguauagaucauuaauccgguucccaauagggacagccccaguacuggguaacuacaaggagauauguguugcuuggucaaguagcaguugcuucgauggaaaagaauggaugcauguuugcaugacuggaaaugacaaugaugcgaguggccaaauaauauaugcagggaagaugacagacuccauuaaaucauggagaagggauauacuaagaacucaagaauccgaaugucaaugcauugaugggaucuguauugucgcuguuacagauggcccugcagcuaauagugcagaucaccgaauuuacuggauacgagaaggaaagauaauaaaguaugaaaacauucccaaaacaaagauacaacauuuagaggaguguucuugcuauguggacaccgauguguacugcauauguagggacaauuggaaagguucuaacaggccuuggaugaggaucaacaaugagaccauacuagaaacaggguauguaugcagcaaauuccauucagauacccccaggccagccgauccuucaacagugucaugugauuccccaaguaacaucaauggaggaccuggagucaaaggauuugguuucagaacagguaaugauguaugguugggaaggacggugucaacuacuggaagaucaggcuuugaagucaucaaggucacagagggauggaucaacucccucaaucaugccaaaucaguuacacaaacacuaguaucgaacagugauuggucagguuacucagggaguuucauuguugagaacaauggcuguuuccagcccugcuucuauauugaacucauacggggaaggcccaauaagaacgaugaugucucuuggacaagcaauaguauaguuacuuucuguggacuagacaaugaaccuggaucgggaaauuggccugaugguuccaacauuggguuuaugcccaaguaa

SEQ ID NO: 55625 - RNA, 1410 nt, Artificial Sequence
  derived and/or modified CDS sequence (wt) from neuraminidase__InfluenzaA__AGQ81850
augaauccaaaucagaagauaauaacaauugguguaguaaacacgacucugucaacaauagcccuucuuauuggaauugggaaucugauuuucaauacuguuauacaugagaaaauagggguccaccaaacugugauauacccaacaauaacauccccagugguaccaaacugcagugacaccacaauuacauacaacaacacugugguaaacaacauaacaacaacaguaauaaauaaagcggaaaagcauuucaagcccucacugccacugugccccuucaaagguuucuuccccuuucauaaggacaaugcaauacgauugggugagaacaaagauguaauagucacaagggagccuuaugucaguugcgacaaugaugauugcugguccuuugcccucgcucaaggggcucuacuaggaacuaaacacagcaauggaaccaucaaggacaggacaccguauagaucauuaauccgguucccaauagggacagccccaguacuggguaacuacaaggagauauguguugcuuggucaaguagcaguugcuucgauggaaaagaauggaugcauguuugcaugacuggaaaugacaaugaugcgacuggccaaauaauauaugcagggaagaugacagacuccauuaaaucauggagaagggauauacuaagaacucaagaauccgaaugucaaugcauugaugggaccuguauugucgcuguuacagauggcccugcagcuaauagugcagaucaccgaauuuacuggauacgagaaggaaagauaauaaaguaugaaaacauucccaaaacaaagauacaacauuuagaggaguguucuugcuauguggacaccgauguguacugcauauguagggacaauuggaaagguucuaacaggccuuggaugaggaucaacaaugagaccauacuagaaacaggguauguaugcagcaaauuccauucagauacccccaggccagccgauccuucaacagugucaugugauuccccaaguaacaucaauggaggaccuggagucaaaggauuugguuucagaacagguaaugauguaugguugggaaggacggugucaacuacuggaagaucaggcuuugaagucaucaaggucacagagggauggaucaacucccucaaucaugccaaaucaguuacacaaacacuaguaucgaacagugauuggucagguuacucagggaguuucauuguugagaacaauggcuguuuccagcccugcuucuauauugaacucauacggggaaggcccaauaagaacgaugaugucucuuggacaagcaauagcauaguuacuuucuguggacuagacaaugaaccuggaucgggaaauuggccugaugguuccaacauuggguuuaugcccaaguaa

SEQ ID NO: 55626 - RNA, 1410 nt, Artificial Sequence
  derived and/or modified CDS sequence (wt) from neuraminidase__InfluenzaA__AGQ81852
augaauccaaaucagaagauaauaacaauugguguaguaaacacgacucugucaacaauagcccuucuuauuggaauugggaaucugauuuucaauacuguuauacaugagaaaauagggguccaccaaacugugacauacccaacaauaacauccccagugguaccaaacugcagugacaccacaauuacauacaacaacacugugguaaacaacauaacaacaacaguaauaaauaaagcggaaaagcauuucaagcccucacugccacugugccccuucaaagguuucuuccccuuucauaaggacaaugcaauacgauugggugagaacaaagauguaauagucacaagggagccuuaugucaguugcgacaaugaugauugcugguccuuugcccucgcucaaggggcucuacuagggacuaaacacagcaauggaaccaucaaggacaggacaccguauagaucauuaauccgguucccaauagggacagccccaguacuggguaacuacaaggagauauguguugcuuggucaaguagcaguugcuucgauggaaaagaauggaugcauguuugcaugacuggaaaugacaaugaugcgacuggccaaauaauauaugcagggaagaugacagacuccauuaaaucauggagaagggauauacuaagaacucaagaauccgaaugucaaugcauugaugggaccuguauugucgcuguuacagauggcccugcagcuaauagugcagaucaccgaauuuacuggauacgagaaggaaagauaauaaaguaugaaaacauucccaaaacaaagauacaacauuuagaggaguguucuugcuauguggacaccgauguguacugcauauguagggacaauuggaaagguucuaacaggccuuggaugaggaucaacaaugagaccauacuagaaacaggguauguaugcagcaaauuccauucagauacccccaggccagccgauccuucaacagugucaugugauuccccaaguaacaucaauggaggaccuggagucaaaggauuugguuucagaacagguaaugauguaugguugggaaggacggugucaacuacuggaagaucaggcuuugaagucaucaaggucacagagggauggaucaacucccucaaucaugccaaaucaguuacacaaacacuaguaucgaacagugauuggucagguuacucagggaguuucauuguugagaacaauggcuguuuccagcccugcuucuauauugaacucauacggggaaggcccaauaggaacgaugaugucucuuggacaagcaauagcauaguuacuuucuguggacuagacaaugaaccuggaucgggaaauuggccugaugguuccaacauuggguuuaugcccaaguaa

SEQ ID NO: 55627 - RNA, 1410 nt, Artificial Sequence
  derived and/or modified CDS sequence (wt) from neuraminidase__InfluenzaA__AGQ81853
augaauccaaaucagaagauaauaacaauugguguaguaaacacgacucugucaacaauagcccuucuuauuggaauugggaaucugauuuucaauacuguuauacaugagaaaauagggguccaccaaacugugacauacccaacaauaacauccccagugguaccaaacugcagugacaccacaauuacauacaacaacacugugguaaacaacauaacaacaacaguaauaaauaaagcggaaaagcauuucaagcccucacugccacugugccccuucaaagguuucuuccccuuucauaaggacaaugcaauacgauugggugagaacaaagauguaauagucacaagggagccuuaugucaguugcgacaaugaugauugcugguccuuugcccucgcucaaggggcucuacuagggacuaaacacagcaauggaaccaucaaggacaggacaccguauagaucauuaauccgguucccaauagggacagccccaguacuggguaacuacaaggagauauguguugcuuggucaaguagcaguugcuucgauggaaaagaauggaugcauguuugcaugacuggaaaugacaaugaugcgacuggccaaauaauauaugcagggaagaugacagacuccauuaaaucauggagaagggauauacuaagaacucaagaauccgaaugucaaugcauugaugggacuuguauugucgcuguuacagauggcccugcagcuaauagugcagaucaccgaauuuacuggauacgagaaggaaagauaauaaaguaugaaaacauucccaaaacaaagauacaacauuuagaggaguguucuugcuauguggacaccgauguguacugcauauguagggacaauuggaaagguucuaacaggccuuggaugaggaucaacaaugagaccauacuagaaacaggguauguaugcagcaaauuccauucagauacccccaggccagccgauccuucaacagugucaugugauuccccaaguaacaucaauggaggaccuggagucaaaggauuugguuucagaacagguaaugauguaugguugggaaggacggugucaacuacuggaagaucaggcuuugaagucaucaaggucacagagggauggaucaacucccucaaucaugccaaaucaguuacacaaacacuaguaucuaacagugauuggucagguuacucagggaguuucauuguugagaacaauggcuguuuccagcccugcuucuauauugaacucauacggggaaggcccaauaagaacgaugaugucucuuggacaagcaauagcauaguuacuuucuguggacuagacaaugaaccuggaucgggaaauuggccugaugguuccaacauuggguuuaugcccaaguaa

SEQ ID NO: 55628 - RNA, 1410 nt, Artificial Sequence
  derived and/or modified CDS sequence (wt) from neuraminidase__InfluenzaA__AGQ81854
augaauccaaaucagaagauaauaacaauugguguaguaaacacgacucugucaacaauagcccuucuuauuggaauugggaaucugauuuucaauacuguuauacaugagaaaauagggguccaccaaacugugacauacccaacaauaacauccccagugguaccaaacugcagugacaccacaauuacauacaacaacacugugguaaacaacauaacaacaacaguaauaaauaaagcggaaaagcauuucaagcccucacugccacugugccccuucaaagguuucuuccccuuucauaaggacaaugcaauacgauugggugagaacaaagauguaauagucacaagggagccuuaugucaguugcgacaaugaugauugcugguccuuugcccucgcucaaggggcucuacuagggacuaaacacagcaauggaaccaucaaggacaggacgccguauagaucauuaauccgguucccaauagggacagccccaguacuggguaacuacaaggagauauguguugcuuggucaaguagcaguugcuucgauggaaaagaauggaugcauguuugcaugacuggaaaugacaaugaugcgacuggccaaauaauauaugcagggaagaugacagacuccauuaaaucauggagaagggauauacuaagaacucaagaauccgaaugucaaugcauugaugggaccuguauugucgcuguuacagauggcccugcagcuaauagugcagaucaccgaauuuacuggauacgagaaggaaagauaauaaaguaugaaaacauucccaaaacaaagauacaacauuuagaggaguguucuugcuauguggacaccgauguguacugcauauguagggacaauuggaaagguucuaacaggccuuggaugaggaucaacaaugagaccauacuagaaacaggguauguaugcagcaaauuccauucagauacccccaggccagccgauccuucaacagugucaugugauuccccaaguaacaucaauggaggaccuggagucaaaggauuugguuucagaacagguaaugauguaugguugggaaggacggugucaacuacuggaagaucaggcuuugaagucaucaaggucacagagggauggaucaacucccucaaucaugccaaaucaguuacacaaacacuaguaucgaacagugauuggucagguuacucagggaguuucauuguugagaacaauggcuguuuccagcccugcuucuauauugaacucauacggggaaggcccaauaagaacgaugaugucucuuggacaagcaauagcauaguuacuuucuguggacuagacaaugaaccuggaucgggaaauuggccugaugguuccaacauuggguuuaugcccaaguaa

SEQ ID NO: 55629 - RNA, 1410 nt, Artificial Sequence; identical to SEQ ID NO: 55627
  derived and/or modified CDS sequence (wt) from neuraminidase__InfluenzaA__AGQ81855

SEQ ID NO: 55630 - RNA, 1410 nt, Artificial Sequence; identical to SEQ ID NO: 55620
  derived and/or modified CDS sequence (wt) from neuraminidase__InfluenzaA__AGQ81856

SEQ ID NO: 55631 - RNA, 1410 nt, Artificial Sequence
  derived and/or modified CDS sequence (wt) from neuraminidase__InfluenzaA__AGQ81857
augaauccaaaucagaagauaauaacaauugguguagugaacacgacucuaucaacaauagcccuucuuauuggaauugggaaucugauuuucaacacuguuauacaugagaaaauaggaguccaccaaacugugguauacccaacaauaacacccccagugauaccaaacugcagugacaccacaauuacauacaacaacacugugguaaacaacauaacaacaacaauaauaaacaaagcggaaaagcaguucaagcccucacugccacugugccccuuccgagguuucuucccuuuucauaaggacaaugcaauacgauugggugagaacaaagauguaauagucacaagagagccuuaugucaguugcgacaaugaugauugcugguccuuugcccuugcccaaggggcucuacuaggaacuaaacacagcaauggaaccaucaaagacaggacaccguauagaucauugauccgguuuccgauagggacagcuccagugcuggguaacuacaaggagauauguguugcuuggucaaguagcaguuguuucgauggaaaggaauggaugcauguuugcaugacuggaaaugacaaugaugcgaguggccaaauaauauaugcagggaagaugacagacuccauuaaaucauggagaagagauauauuaagaacucaagagucugaaugccaaugcauugaugggaccuguauugucgcugucacagauggcccugcagcuaguagugcagaccaccgaauuuacuggauacgagaagggaagauaauaaaguaugaagacauucccaaaacaaagauacagcauuuagaggaguguucuugcuauguggacaccgauguguacugcauauguagggacaauuggaaagguucuaacaggccuuggaugaggaucaacaaugagaccauacuagaaacaggguauguaugcagcaaauuccauucagacacccccaggccagccgauccuucaacagugucaugugauuccccaaguaacaucaauggaggaccuggagucaaaggauuuggcuucagagcggguaaugauguaugguugggaaggacaguaucaacuacuggaagaucaggcuuugaagucaucaaggucacagagggauggaucaacucccucaaucaugcuaaaucaguuacacaaacacuaguaucgaacaaugauuggucagguuacucagggaguuucauuguugagagcaauggcuguuuccagcccugcuucuacauugaacucauacggggaaggcccaauaggaacgacgacguuucuuggacaagcaauaguauaguuacuuucuguggacuagacaaugaaccuggaucgggaaauuggccugaugguuccaacauuggguuuaugcccaaguaa

SEQ ID NO: 55632 - RNA, 1410 nt, Artificial Sequence
  derived and/or modified CDS sequence (wt) from neuraminidase__InfluenzaA__AGQ81858
augaauccaaaucagaagauaaucacaauugguguagugaauacuacucuaucaacaauagcccuucuuauuggaguugggaaucugauuuucaacacuguuauacaugagaaaauaggggaccaucaaauugugguguauccaacaacaacagccucgguggugccaaacugcagugacaccauaauaacauacaauaacacugugguaaacaacauaacaacaacaauaauaacuaaagaggaaacgcacuucaaguccucacugccacugugucccuuccgagguuucuuccccuuucacaaggacaaugcaauacgauugggugagaacaaagacguaauagucacaagggagccuuaugucaguugugacaaugaugauugcugguccuuugcucucgcccagggggcucuacuggggacuaaacacagcaauggaaccaucaaagacaggacaccguauagaucauuaauccgguucccaauagggacugcuccuguacuggguaauuacaaggagauauguguugcuuggucaaguagcaguugcuucgauggaaaggaguggaugcauguuugcaugacugggaacgacaaugaugcgaguggccaaauaauguaugcagggaaaaugacagacuccauuaaaucauggagaaaggauauacuaagaacucaagagucugaaugucaaugcauugaugggaccuguauugucgcugucacagaugguccugcgacuaauagugcagaccaccgaauuuacuggauacgagaagggaagauaauaaaguaugagaacauucccaagacaaagauacaacauuuggaggaguguucuuguuauguggacaucgauguguacugcguauguagggacaauuggaaagguuccaacagaccuuggaugaggaucaacaaugagaccauauuagaaacaggguauguauguaguaaauuucauucagauacccccaggccagccgauccuucaacaguaucaugugauucuccaaguaacgucaauggaggaccuggagucaaagguuuuggcuucaaaacggguaaugauguaugguugggaaggacuguaucaacuaguggaagaucaggcuuugaaauuaucaaagucacggagggguggauuaacucccccaaucaugccaaaucaguuacacaaacauuagugucaaacaaugauuggucagguuacucagggaguuucauuguugagaacaauggcuguuuucagcccugcuucuauauugaacuuauacgggggaggcccaauaagaaugaugacguuucuuggacaagcaauaguauaguuacuuucuguggacuagacaaugaaccuggaucgggaaauuggccugaugguuccaacauuggguuuaugcccaaguaa

SEQ ID NO: 55633 - RNA, 1410 nt, Artificial Sequence
  derived and/or modified CDS sequence (wt) from neuraminidase__InfluenzaA__AGQ81859
augaauccaaaucagaagauaauaacaauugguguagugaauacgacucuaucaacaauagcccuucuuauuggaauugggaaucugauuuucaacacuguuauacaugagaaaauaggaguccaccaaacugugguaugcccaacaauaacacccccggugguaccaaacugcagugacaccacaauuacauacaacaacacugugguaaacaacauaacaacaacaauaauaaauaaagcggaaaagcaguucaaguccucacugccacugugucccuuccgagguuucuuccccuuccauaaggacaaugcaauacgauugggugagaacaaagauguaauagucacaagggagccuuaugucaguugcgacaaugaugauugcugguccuuugcccuugcccaaggggcucuacuaggaacuaaacacagcaauggaaccaucaaagauagaacaccguauagaucauugauucgguuuccaauagggacagcuccagugcuggguaacuacaaggagauaugcguugcuuggucaaguagcaguuguuucgauggaaaggaauggaugcauauuugcaugacuggaaaugacaaugaugcgaguggccagauaauauaugcaggcaagaugacagacuccauuaaaucauggagaagagauauauuaagaacucaagagucugaaugucaaugcauugaugggaccuguauugucgcuaucacagauggcccugcagcuaguagugcagaccaccgaauuuacuggauacgagaagggaagauaauaaaguaugaaaacauucccaaaacaaagauacaacauuuagaagaguguucuugcuauguggacaucgauguguacugcauauguagggauaauuggaaagguucuaacaggcccuggaugaggaucaacaaugagaccauacuagaaacaggguauguaugcagcaaauuccauucagacacccccaggccagccgaucccucaacagugucaugugauuccccaaguaacaucaauggaggaccuggagucaaaggauuuggcuucagagcggguaaugauguaugguugggaaggacaguaucaacuacuggaagaucaggcuuugaagucaucaaggucacagaaggauggaucaauucccucaaccaugcuaaaucaguuacacaaacacuaguaucgaacagugauuggucagguuacucagggaguuucauuguugaaaauaauggcuguuuccagcccugcuucuauaucgaacucauacggggaaggcccaauaggaacgaugauguuucuuggacaagcaauaguauaguuacuuucuguggacuagacaaugaaccuggaucgggaaauuggccugaugguuccaacauuggguuuaugcccaaguaa

SEQ ID NO: 55634 - RNA, 1413 nt, Artificial Sequence
  derived and/or modified CDS sequence (wt) from neuraminidase__InfluenzaA__AGQ81860
augaauccaaaucaaaagauaauaugcauuucagccacaggaaugacacuaucgguaguaagccugcugauaggaauugccaauuugggccuaaacaucggacuccauuauaaggugggugauacaccagaugugagcaucccaaacaugaaugagaccaacucaacaacaacaauaauaaacaauaauacccaaaauaauuucacaaauaucacuaacauuauagugaacaaaaacgaggaaaaaacguuccuaaaucugaccaagccccuaugugagguaaacucauggcacaucuugucgaaagacaaugcaauaagaauaggagaggaugcucauauacuagucacaagggagcccuaccugucuugcgauccacaaggcugcaggauguuugcucugagccaaggaacaacacucagagggcgacaugcgaaugggacuauacaugauagaagcccauuucgagcucucgugaguugggagaugggucaagcgcccaguccauacaauguuaaggucgaaugcguaggauggucgagcacaucgugccaugauggcauaucaagaaugucaauaugcaugucgggaccgaacaacaaugcaucagcagugguuugguacggggggaggccaguaacagaaauuccaucaugggcaggaaauauucucagaacccaagagucagaauguguaugccauaaagggaucuguccaguagucaugacggauggcccagcaaacaacagagcagcaacuaagauaaucuauuucaaagagggaaagauacagaaaauugaagaacuggcagggagugcccagcacaucgaagaauguucaugcuauggggcagucgaggugaucaaaugcauaugcagagacaauuggaaaggggcaaauagaccaguaauuacuauaaacccugaaaugaugacccacacgagcaaguauuugugcucgaagguccuaaccgauacaagucgccccaaugaucccacuaaugggaacugugaugcgccaauaacaggagggagcccugauccuggagugaagggguuugcguuccuagauggggaaaauucauggcuuggaaggacaauuagcaaagacuccaggucgggcuacgaaauguugaaagucccaaaugcagagaccgacacccaaucagggccgacaucacaccaaguaauugucaacaaccaaaacuggucgggauacucaggggcuuucauagacuacugggcaaacaaagagugcuucaauccuuguuuuuauguggaacuaaucagagggagacccaaggagaguaguguacuguggacuucaaauagcauuguagcucucuguggauccaaagagcgauugggaucaugguccuggcaugauggugcugaaaucaucuacuuuaaguag

SEQ ID NO: 55635 - RNA, 1413 nt, Artificial Sequence
  derived and/or modified CDS sequence (wt) from neuraminidase__InfluenzaA__AGQ81861
augaauccaaaucaaaagauaauaugcauuucagccacaggaaugacacuaucgguaguaagccugcugauaggaauugccaauuugggccuaaacaucggacuccauuauaaggugggugauacaccagaugugagcaucccaaacaugaaugagaccaacucaacaacaacaauaauaaacaauaauacccaaaauaauuucacaaauaccacuaacauuauagugaacaaaaacgaggaaaaaacguuccuaaaucugaccaagccccuaugugagguaaacucauggcacaucuugucgaaagacaaugcaauaagaauaggagaggaugcucauauacuagucacaagggagcccuaccugucuugcgauccacaaggcugcaggauguuugcucugagccaaggaacaacacucagagggcgacaugcgaaugggacuauacaugauagaagcccauuucgagcucucgugaguugggagaugggucaagcgcccaguccauacaauguuaaggucgaaugcguaggauggucgagcacaucgugccaugauggcauaucaagaaugucaauaugcaugucgggaccgaacaacaaugcaucagcagugguuugguacggggggaggccaguaacagaaauuccaucaugggcaggaaauauucucagaacccaagagucagaauguguaugccauaaagggaucuguccaguagucaugacggauggcccagcaaacaacagagcagcaacuaagauaaucuauuucaaagagggaaagauacagaaaauugaagaacuggcagggagugcccagcacaucgaagaauguucaugcuauggggcagucgaggugaucaaaugcauaugcagagacaauuggaaaggggcaaauagaccaguaauuacuauaaacccugaaaugaugacccacacgagcaaguauuugugcucgaagguccuaaccgauacaagucgccccaaugaucccacuaaugggaacugugaugcgccaauaacaggagggagcccugauccuggagugaagggguuugcguuccuagauggggaaaauucauggcuuggaaggacaauuagcaaagacuccaggucgggcuacgaaauguugaaagucccaaaugcagagaccgacacccaaucagggccgacaucacaccaaguaauugucaacaaccaaaacuggucgggauacucaggggcuuucauagacuacugggcaaacaaagagugcuucaauccuuguuuuuauguggaacuaaucagagggagacccaaggagaguaguguacuguggacuucaaauagcauuguagcucucuguggauccaaagagcgauugggaucaugguccuggcaugauggugcugaaaucaucuacuuuaaguag

SEQ ID NO: 55636 - RNA, 1413 nt, Artificial Sequence
  derived and/or modified CDS sequence (wt) from neuraminidase__InfluenzaA__AGQ81862
augaauccaaaucagaagauaauaugcauuucagccacaggaaugacacuaucgguaguaagccugcugauaggaauugccaauuuaggccuaaacaucggacuccauuauaaggugggugauacaccagaugugaacaucccaagcaugaacgaaaccaacucaacaacaacaauaauaaacaauaauacucaaaauaauuucacaaauaucacuaacauuauagugaacaaagaggagggaagaacauuucuaaaucugacuaagccucuaugugagguaaacucauggcacauucugucgaaagacaaugcaauaagaauaggggaggaugcucauauacuagucacaagggagcccuauuuguccugugauccgcaaggcuguaggauguuugcucugagccaaggcacaacacucagggggcgacaugcgaacggaacuauacaugacagaagcccauuccgagcucucgugagcugggagaugggucaagcgcccaguccauacaauguuagggucgaaugcauaggauggucaagcacaucaugccacgauggcauaucaagaaugucgauaugcaugucggggccgaacaacaaugcaucagcaguggucugguacggggguaggccaguaacagaaaucccaucaugggcaggaaauauucucagaacucaggaaucagaaugcgugugccauaaagggaucuguccaguggucaugacagauggcccagcaaacaauagagcagcaacuaagauaaucuauuucaaagagggaaagauacaaaaaauugaagaacuggaagggaaugcccaacacauugaagaauguucaugcuauggggcagcagggguaaucaaauguauaugcagggacaauuggaaaggggcaaauagaccaguaaucauuauagauccugaaaugaugacucacacaagcaaguauuugugcucaaggguacuaaccgauacaagucgccccaaugaucccacuagcgggaacugugaugcgccgauaacaggggggagcccagauccuggagugaagggguuugcauucuuggacggagagaacucauggcucggaaggacaauuaguaaagacuccagaucaggcuacgaaauguuaaaggucccaaaugcagaaacugauacccagucagggccaacaucacaccagguaauugucaacaaccaaaacuggucgggauacucaggggcauucauagacuauugggcaaacaaagaaugcuucaauccuuguuuuuauguggaauuaaucagagggagacccaaggagaguaguguacuguggacuucaaauagcauuguagcucucuguggauccaaagagcgauugggaucaugguccuggcacgauggugcugagaucaucuacuuuaaguag

SEQ ID NO: 55637 - RNA, 1413 nt, Artificial Sequence
  derived and/or modified CDS sequence (wt) from neuraminidase__InfluenzaA__AGQ81863
augaauccaaaucagaagauaauaugcauuucagccacaggaaugacacuaucgguaguaagccugcugauaggaaucgccaauuuaggccuaaacaucggacuccauuauaaggugggugauacaccagaugugaacauuccaagcaugaacgaaaccaacucaacgacaacaauaauaaacaauaauacucaaaauaauuucacaaauaucacuaacauuauagugaacaaagaggaggaaagaacauuucuaaaucugacuaagccucuaugugagguaaacucauggcacauucugucaaaagacaaugcaauaaggauaggggaggacgcucauauacuaguaacaagggagcccuauuuguccugugauccgcaaggcuguaggauguuugcucugagccaaggcacaacacucagagggcgacaugcaaacggaacuauacaugauagaagcccauuccgagcucuugugagcugggagaugggucaagcgcccaguccauauaauguuagggucgaaugcauaggauggucaagcacaucaugccacgauggaauaucaagaaugucgauaugcaugucagggccgaacaacaaugcaucagcaguggucugguacggggguaggccaguaacagagaucccaucaugggcaggaaauauucucagaacucaggaaucagaaugugugugccauaaagggaucuguccaguagucaugacagauggcccagcaaacaauagagcagcaacuaagauaaucuacuucaaagagggaaagauacagaaaaucgaagaacuggaagggaaugcccaacacaucgaagaauguucaugcuauggggcagcagggguaaucaaauguauaugcagagacaacuggaaaggggcaaauagaccaguaaucauuauagauccagaaaugaugacucacacaagcaaguacuugugcucaaggguacuaaccgauacaagucgccccaaugaucccauuagugggaacugugaugcuccgauaacagggggaagcccagauccuggggugaagggguuugcauucuuagauggagagaacucauggcucggaaggacaauuagcaaagacuccagaucaggcuacgaaauguuaaaggucccaaaugcagaaacugauacccaaucagguccaacaucgcaccagguaauugucaacaaccaaaacuggucgggauacucaggggcguucauagacuauugggcaaacaaagagugcuucaauccuuguuuuuauguggaacugaucagagggagacccaaggagaguaguguacuguggacuucaaauagcauuguagcucucuguggauccaaagagcgauugggaucaugguccuggcaugauggugcugagaucaucuacuuuaaguag

SEQ ID NO: 55638 - RNA, 1416 nt, Artificial Sequence
  derived and/or modified CDS sequence (wt) from neuraminidase__InfluenzaA__AGQ81864
augaauccaaaucagaaacuauuugcauuaucuggaguggcaauagcacuuaguguacugaacuuauugauaggaaucucaaaugucggguugaauguaucucuacaucuaaaggaaaaaggacccaagcaagaagaaaauucgacaugcacgaccauuaaucaaaacaacacuacuauuguggaaaacacauaugugaacaauacaacaauaauuuccaaggaaacugaguuaaaaccaccaaacuaccuacuguugaacaagagccuaugcaauguugaaggaugggucgugauagcgaaagacaaugcaguaagauucggggaaagugaacaaaucauuguuaccagagagccguacguaucaugcgauccaacaggaugcaaaauguaugccuugcaccaagggaccaccauuaggaacaaacauucaaauggaacaauccaugacagaacagcuuucagaggucucauuuccacuccauugggcacuccaccaaccguaaguaacagugacuucauauguguuggauggucaagcacaacuugccaugaugggauugguagaaugacuaucugcauacaaggaaauaaugacaacgcuacagcaacaguuuauuauaacagaaggcugacuacuaccauuaagaccugggcuagaaacauucugaggacucaagagucagaaugugugugccacaaugguacaugugcaguuguaaugacugacggaucggcuaguagucaagccuauacaaaaguaauguauuuccacaagggguuaguaauuaaggaagaggcauuaaagggaucagccagacacauugaggaaugcuccuguuacggacacagucaaaaggcaaccugugugugcagggauaauuggcagggagcaaauaggcccauuauagaaauugauaugaacacauuagagcacacaaguagauacgugugcacuggaauucucacagacaccagcagaccuggggacaagucuaguggcgauuguuccaauccaauaacuggaaguccuggcgcuccgggagugaagggauucggguuuuuaaauggggauaacacauggcuggguaggaccaucagccccaaaucaagaaguggauucgaaauguugaaaauaccuaaugcagguacugaucccaauucuagaauagcagaaaggcaggaaauugucgacaauaacaauuggucaggcuauuccggaagcuuuauugacuauugggauaaugacagugagugcuacaauccaugcuucuacguagaguugauuagaggaagacccgaagaggcuaaauauguaugguggacaaguaacagucuaauugcccuaugugggagcccauucccaguuggguccgguuccuuccccgauggggcacagauccaauacuuuucguaa

SEQ ID NO: 55639 - RNA, 1416 nt, Artificial Sequence
  derived and/or modified CDS sequence (wt) from neuraminidase__InfluenzaA__AGQ81865
augaauccaaaucagaaacuauucgcauuauccggaguggcaauagcacuuaguguacugaacuuauugauaggacucucaaaugucggauugaauguaucucuacaucuaaaggaaacaggacccaaacaggaagggaauuuaacaugcaugaccauuaaucaaaacaacaccacuguaguagaaaacacauacguaaauaauacaacaauaauuaccaaagaaacugaaucggaaacaccaaacuaucugcuguugaacaagagucuauguaauguugaggggugggucgugauagcaaaagacaaugcaguaagauuuggggaaagugagcaaaucauuguuaccagggaaccauacguaucaugugacccaaauggaugcaaaauguaugccuugcaucaagggacuaccauuaggaacaaacauucaaauggaacaauucaugauagaacagcuuucaggggucucaucuccacuccauugggcacuccaccaaccguaaguaauagugauuuuauauguguuggauggucaagcacaaccugccaugauggaaucggcagaaugacuaucuguauacaagggaauaaugacaaugcuacagcaacgguuuauuauaacagaaggcugaccacuaccauuaagaccugggccagaaacauucugaggacucaagagucagaauguguaugccacaacggcacaugugcaguuguaaugaccgacgggucggcuaguagucaagcccauacaaaaguaauguauuuccacaagggauugguaguuaaggaggaagcauuaaagggaucggccagacauauugaggaaugcuccuguuacgggcauaaucaaaagguaaccugugugugcagagauaauuggcagggagcaaacagaccuauuauagaaauugacaugaacacauuggaacacacaaguagauaugugugcacaggaauucucaccgauacuagcagacccggggacaaaccuacuggugauuguuccaacccaauaacuggaaguccuggagcuccgggagugaagggauuuggguuucuaaauggggguaauacauggcuugguaggaccaucagccccagaucaagaaguggauuugaaauguugaaaauaccuaaugcagguacugaucccaauucuagaauagcugagcggcaggaaauugucgacaauagcaacuggucaggcuauuccggaagcuuuauugacuauuggaaugauaacagugagugcuacaauccauguuucuauguagaguuaauuagagggagaccugaagaggcuaaauaugugugguggacaaguaacagucuaauugcccuauguggaagcccauucccaguuggguccgguuccuuccccgauggggcacagauccaauacuuuucguaa

SEQ ID NO: 55640 - RNA, 1416 nt, Artificial Sequence
  derived and/or modified CDS sequence (wt) from neuraminidase__InfluenzaA__AGQ81868
augaauccaaaucagaaacuauuugcauuaucuggaguggcaauagcacuuaguguacugaacuuauugauaggaaucucaaacgucggauugaauguaucucuacaucuaaaggaaaaaggacccaagcaagaagagaauucaacaugcacgaccauuaaucaaaacaacacuacuguuguggaaaauacauacgugaauaauacaacaauaauuaccaaggaaacugaauugaaaacaccaagcuaccugcuguugaacaagagccuaugcaauguugaagggugggucgugauagcgaaagacaaugcagugagauucggagaaagugaacaaaucauuguuaccagagagccauacguaucaugcgauccaacaggaugcaaaauguaugccuugcaccaagggacuaccauuaggaacaaacauucaaauggaacaauucaugacagaacagcuuucagaggucucauuuccacuucauugggcacuccaccaaccauaaguaacagugacuucauguguguuggauggucaagcacaacuugccaugaugggauugguagaaugacuaucuguauacaaggaaauaaugacaacgcuacagcaacgguuuauuauaacagaaggcugaccacuaccauuaagaccugggcuaggaacauucugaggacucaagagucagaaugugugugccacaauggcauaugugcaguuguaaugacugacggaucggcuaguagucaagccuauacaaaaguaauguauuuccacaagggguuaguaguuaaggaagaggcauuaaagggaucagccagacacauugaggaaugcuccuguuacgggcacagucaaaaagugaccugugugugcagagauaacuggcagggagcaaauaggccuauuauagaaauugauaugaacacauuggagcacacaaguagauacgugugcaccggaauucucacagacaccagcagaccuggggacaaaucuaguggugauuguuccaauccaauagcuggaaguccuggcgcuccgggagugaagggauucggguuuuuaaauggggauaacacauggcuugguaggaccaucagccccagaucaagaaguggauucgaaauguugaaaauaccuaaugcagguacugaucccaauuccagaauagcaggacggcaggaaauugucgacaauaacaauuggucaggcuauuccggaagcuuuauugacuauuggaaugauaacagcgagugcuacaauccaugcuucuacguagaguugauuagaggaagacccgaagaggcuaaauauguaugguggacaaguaacagucuaauugcccuaugugggagcccauucccaguuggguccgguuccuuccccgauggggcacagauccaauacuuuucguaa

SEQ ID NO: 55641 - RNA, 1416 nt, Artificial Sequence
  derived and/or modified CDS sequence (wt) from neuraminidase__InfluenzaA__AGQ81869
augaauccaaaucagaaacuguuugcauuaucuggaguggcaauagcacuuaguguacugaacuuauugauaggaaucucaaaugucggauugaauguaucucuacaucuaaaggaaaaaggacccaagcaagaagagaauucgacaugcacgaccauuaaucaaaacaacacuacuauuguggaaaacacauacgugaauaauacaacaauaauuuccaaggaaacugaauuaaaaacaccaagcuaccugcuguuaaacaagagccuaugcaauguugaaggaugggucgugauagcgaaggacaaugcaguaagauucggggaaagugagcaaaucauuguuaccagagagccguacguaucaugcgauccaacaggaugcaaaauguaugccuugcaccaaggaaccaccauuaggaacaaacauucaaauggaacaauucaugacagaacugcuuucagaggucucauuuccacuccauugggcacuccaccaaccguaaguaacagugacuucauauguguuggauggucaagcacaacuugccaugaugggauugguagaaugacuaucugcauacaaggaaauaaugacaacgcuacagcaacaguuuauuauaacagaaggcugacuacuaccauuaggaccugggcuaggaacauucugaggacucaagagucagaaugugugugccacaauggcacaugugcaguuguaaugacugacggaucggcuaguagucaagccuauacaaaaguaauguacuuccacaagggguuaguaauuaaggaagaggcauuaaagggaucagccagacacauugaggaaugcuccuguuacggacacagucaaaaggcgaccugugugugcagggauaacuggcagggagcaaauaggcccauuauagaaauugauaugaacacauuggagcacacaaguagauacguaugcaccggaauccucacagacaccagcagaccuggggacaagucuaguggugauuguuccaauccaauaacuggaaguccuggcgcuccgggagugaagggauucggguuuuuaaauggggauaacacauggcuugguaggaccaucagccccagaucaagaaguggauucgaaauguugaaaauaccuaaugcagguacugaucccaauucuagaauagcagaacggcaggaaauugucgacaauaacaauuggucaggcuauuccggaagcuuuauugacuauuggaauaaugacagugagugcuacaauccaugcuucuacguagaguugauuagaggaagacccgaagaggcuaaguauguaugguggacaaguaacagucuaauugcccuaugugggagcccauucccaguuggguccgguuccuuccccgauggggcacagauccaauacuuuucguaa

SEQ ID NO: 55642 - RNA, 1416 nt, Artificial Sequence
  derived and/or modified CDS sequence (wt) from neuraminidase__InfluenzaA__AGQ81870
augaauccaaaucagaaacuauuugcauuaucuggaguggcaauagcacuuaguguacugaacuuauugauaggaaucucaaaugucggauugaauguaucucuacaucuaaaggaaaaaggacccaagcaagaagagaauucgacaugcacgaccauuaaucaaaacaacacuacuauuguggaaaacacauacgugaauaauacaacaauaauuuccaaggaaacugaauuaaaaccaccaagcuaccugcuguuaaacaagagccuaugcaauguugaaggaugggucgugauagcgaaggacaaugcaguaagauucggggaaagugagcaaaucauuguuaccagagagccguacguaucaugcgauccaacaggaugcaaaauguaugccuugcaccaaggaaccaccauuaggaacaaacauucaaauggaacaauucaugacagaacugcuuucagaggucucauuuccacuccauugggcacuccaccaaccguaaguaacagugacuucauauguguuggauggucaagcacaacuugccaugaugggauugguagaaugacuaucugcauacaaggaaauaaugacaacgcuacagcaacaguuuauuauaacagaaggcugacuacuaccauuaggaccugggcuaggaacauucugaggacucaagagucagaaugugugugccacaauggcacaugugcaguuguaaugacugacggaucggcuaguagucaagccuauacaaaaguaauguacuuccacaagggguuaguaauuaaggaagaggcauuaaagggaucagccagacacauugaggaaugcuccuguuacggacacagucaaaaggcgaccugugugugcagggauaacuggcagggagcaaauaggccuauuauagaaauugauaugaacacauuggagcacacaaguagauacgugugcaccggaauccucacagacaccagcagaccuggggacaagucuaguggugauuguuccaauccaauaacuggaaguccuggcgcuccgggagugaagggauucggguuuuuaaauggggauaacacauggcuugguaggaccaucagccccagaucaagaaguggauucgaaauguugaaaauaccuaaugcagguacugaucccaauucuagaauagcagaacggcaggaaauugucgacaauaacaauuggucaggcuauuccggaagcuuuauugacuauuggaauaaugacagugagugcuacaauccaugcuucuacguagaguugauuagaggaagacccgaagaggcuaaguauguaugguggacaaguaacagucuaauugcccuaugugggagcccauucccaguuggguccgguuccuuccccgauggggcacagauccaauacuuuucguaa

SEQ ID NO: 55643 - RNA, 1416 nt, Artificial Sequence
  derived and/or modified CDS sequence (wt) from neuraminidase__InfluenzaA__AGQ81871
augaauccaaaucagaaacuauuugcauuaucuggaguggcaauagcacuuaguguacugaacuuauugauaggaaucucaaaugucggauugaauguaucucuacaucuaaaggaaaaaggacccaagcaagaagagaauucgacaugcacgaccauuaaucaaaacaacacuacuauuguggaaaacacauacgugaauaauacaacaauaauuuccaaggaaacugaauuaaaaacaccaagcuaccugcuguuaaacaagagccuaugcaauguugaaggaugggucgugauagcgaaggacaaugcaguaagauucggggaaagugagcaaaucauuguuaccagagagccguacguaucaugcgauccaacaggaugcaaaauguaugccuugcaccaaggaaccaccauuaggaacaaacauucaaauggaacaauucaugacagaacugcuuucagaggucucauuuccacuccauugggcacuccaccaaccguaaguaacagugacuucauauguauuggauggucaagcacaacuugccaugaugggauugguagaaugacuaucugcauacaaggaaauaaugacaacgcuacagcaacaguuuauuauaacagaaggcugacuacuaccauuaggaccugggcuaggaacauucugaggacucaagagucagaaugugugugccacaauggcacaugugcaguuguaaugacugacggaucggcuaguagucaagccuauacaaaaguaauguacuuccacaagggguuaguaauuaaggaagaggcauuaaagggaucagccagacacauugaggaaugcuccuguuacggacacagucaaaaggcgaccugugugugcagggauaacuggcagggagcaaauaggcccauuauagaaauugauaugaacacauuggagcacacaaguagauacgugugcaccggaauccucacagacaccagcagaccuggggacaagucuaguggugauuguuccaauccaauaacuggaaguccuggcgcuccgggagugaagggauucggguuuuuaaauggggauaacacauggcuugguaggaccaucagccccagaucaagaaguggauucgaaauguugaaaauaccuaaugcaggcacugaucccaauucuagaauagcagaacggcaggaaauugucgacaauaacaauuggucaggcuauuccggaagcuuuaucgacuauuggaauaaugacagugagugcuacaauccaugcuucuacguagaguugauuagaggaagacccgaagaggcuaaguauguaugguggacaaguaacagucuaauugcccuaugugggagcccauucccaguuggguccgguuccuuccccgauggggcacagauccaauacuuuucguaa

SEQ ID NO: 55644 - RNA, 1416 nt, Artificial Sequence
  derived and/or modified CDS sequence (wt) from neuraminidase__InfluenzaA__AGQ81872
augaauccaaaucagaaacuauuugcauuaucuggaguggcaauagcacuuaguguacugaacuuauugauaggaaucucaaaugucggauugaauguaucucuacaucuaaaggaaaaaggacccaagcaagaagagaauucgacaugcacgaccauuaaucaaaacaacacuacuauuguggaaaacacauacgugaauaauacaacaauaauuuccaaggaaacugaauuaaaaacaccaaguuaccugcuguuaaacaagagccuaugcaauguugaaggaugggucgugauagcgaaggacaaugcaguaagauucggggaaagugagcaaaucauuguuaccagagagccguacguaucaugcgauccaacaggaugcaaaauguaugccuugcaccaaggaaccaccauuaggaacaaacauucaaauggaacaauucaugacagaacugcuuucagaggucucauuuccacuccauugggcacuccaccaagcguaaguaacagugacuucauauguguuggauggucaagcacaacuugccaugaugggauugguagaaugacuaucugcauacaaggaaauaaugacaacgcuacagcaacaguuuauuauaacagaagguugacuacuaccauuaggaccugggcuaggaacauucugaggacucaagagucagaaugugugugccacaauggcacaugugcaguuguaaugacugacggaucggcuaguagucaagccuauacaaaaguaauguauuuccacaagggguuaguaauuaaggaagaggcauuaaagggaucagccagacacauugaggaaugcuccuguuacggacacagucaaaaggcgaccugugugugcagggauaacuggcagggagcaaauaggcccauuauagaaauugauaugaacacauuggagcacacaaguagauacgugugcaccggaauccucacagacaccagcagaccuggggacaagucuaguggugauuguuccaauccaauaacuggaaguccuggcgcuccgggagugaagggauucggguuuuuaaauggggauaacacauggcuugguaggaccaucagccccagaucaagaaguggauucgaaauguugaaaauaccuaaugcagguacugaucccaauucuagaauagcagaacggcaggaaauugucgacaauaacaauuggucaggcuauuccggaagcuuuauugacuauuggaauaaugacagugagugcuacaauccaugcuucuacguagaguugauuagaggaagacccgaagaggcuaaguauguaugguggacaaguaacagucuaauugcccuaugugggagcccauucccaguuggguccgguuccuuccccgauggggcacagauccaauacuuuucguaa

SEQ ID NO: 55645 - RNA, 1416 nt, Artificial Sequence
  derived and/or modified CDS sequence (wt) from neuraminidase__InfluenzaA__AGQ81875
augaauccaaaucagaaacuauuugcauuaucuggaguggcaauagcacuuaguguacugaauuuauugauaggaaucucaaaugucggauugaauguaucucuacaucuaaaggaaaagggacccaaacaggaagagaauucaacaugcaugaccaucaaucaaaacaacacuacaguaguagaaaacacauacguaaauaacacaacaauaauuaccaaggaaacugaauuggaaacaccaagcuaucugcuuuugaacaagggucuaugcaauguugagggaugggucgugauagcaaaagacaaugcaguaagauuuggggaaacugaacaaaucauuguuaccagggaaccauacguaucaugugacccaaauggaugcaaaauguaugccuugcaucaagggacuaccauuaggaacaaacauucaaaugggacaauucaugacagaacagcuuucagaggucucauuuccacuccauugggcacuccaccaaccguaaguaacagugacuuuauauguguuggauggucaagcacaacuugccaugauggaauuggcagaaugacuaucuguauacaaggaaauaaugacaacgcuacagcaacgguuuacuacaacagaaggcugaccacuaccauuaagaccugggccagaaacauucugaggacucaagagucagaaugugugugccacaauggcacaugugcaguuguaaugacugacggaucggcuaguagucaagcccauacaaaaguaauauauuuccacaagggauuaauagucaaggaggaggcauuaaaggguucagcuagacauauugaggaaugcuccuguuacgggcacagucaaaaggugaccugugugugcagagauaauuggcagggggcaaacaggccuauuauagaaauugacaugaacacauuggagcacacaaguagauaugugugcaccggaauucucacugacacuagcagacccggggacaaaucuacuggugauuguuccaauccaauaacuggaagcccuggcgcuccgggagugaagggauuuggguaucuaaauggggauaacacauggcuugguaggaccaucagccccagaucaagaaguggauuugaaauguugaaaauaccuaaugcagguacugaucccaauucuagaauaaccgaacgacaggaaaucgucgacaauaacaauuggucaggcuauuccggaagcuuuguugacuauuggaaugauaacagugagugcuacaauccauguuucuacguagaguuaauuagagggagacccgaagaggcuaaauauguaugguggacaaguaacaguauaauugcccuauguggaagcccauucccaguuggguccgguuccuuccccgauggggcacagauccaauacuuuucguaa

SEQ ID NO: 55646 - RNA, 1416 nt, Artificial Sequence
  derived and/or modified CDS sequence (wt) from neuraminidase__InfluenzaA__AGQ81876
augaauccaaaucagaaacuauuugcauuaucuggaguggcaauagcacuuaguguacugaauuuauugauaggaaucucaaaugucggauugaauguaucucuacaucuaaaggaaaagggacccaaacaggaagagaauucaacaugcaugaccaucaaucaaaacaacacuacaguaguagaaaacacauacguaaauaacacaacaauaauuaccaaggaaacugaauuggaaacaccaagcuaucugcuguugaacaagggucuaugcaauguugagggaugggucgugauagcaaaagacaaugcaguaagauuuggggaaacugaacaaaucauuguuaccagggaaccauacguaucaugugacccaaauggaugcaaaauguaugccuugcaucaagggacuaccauuaggaacaaacauucaaaugggacaauucaugacagaacagcuuucagaggucucauuuccacuccauugggcacuccaccaaccguaaguaacagugacuuuauauguguuggauggucaagcacaacuugccaugauggaauuggcagaaugacuaucuguauacaaggagauaaugacaacgcuacagcaacgguuuacuacaacagaaggcugaccacuaccaucaagaccugggccagaaacauucugaggacucaagagucagaaugugugugccacaauggcacaugcgcaguuguaaugacugacggaucggcuaguagucaagcccauacaaaaguaauauauuuccacaagggacuaauagucaaggaggaggcauuaaaggguucagcuagacauauugaggaaugcuccuguuacgggcacagucaaaaggugaccugugugugcagagauaauuggcagggggcaaacaggccuauuauagaaauugacaugaacacauuggagcacacaaguagauaugugugcaccggaauucucacugacacuagcagacccggggacaaaucuacuggugauuguuccaauccaauaacuggaagcccuggcgcuccgggagugaagggauuuggguaucuaaauggggauaacacauggcuugguaggaccaucagccccagaucaagaaguggauuugaaauguugaaaauaccuaaugcagguacugaucccaauucuagaauaaccgaacgacaggaaaucgucgacaauaacaauuggucaggcuauuccggaagcuuuguugacuauuggaaugauaacagugagugcuacaauccauguuucuacguagaguuaauuagagggagacccgaagaggcuaaauauguaugguggacaaguaacaguauaauugcccuauguggaagcccauucccaguuggguccgguuccuuccccgauggggcacagauccaauacuuuucguaa

SEQ ID NO: 55647 - RNA, 1416 nt, Artificial Sequence
  derived and/or modified CDS sequence (wt) from neuraminidase__InfluenzaA__AGQ81877
augaauccaaaucagaaacuauuugcauuaucuggaguggcaauagcacuuaguguacugaacuuauugauaggaaucucaaacgucggauugaauguaucucuacaucuaaaggaaaaaggacccaagcaagaagagaauucaacaugcacgaccauuaaucaaaacaacacuacuguuguggaaaauacauacgugaauaauacaacaauaauuaccaaggaaacugaauugaaaacaccaagcuaccugcuguugaacaagagccuaugcaauguugaagggugggucgugauagcgaaagacaaugcagugagauucggagaaagugaacaaaucauuguuaccagagagccauacguaucaugcgauccaacaggaugcaaaauguaugccuugcaccaagggacuaccauuaggaacaaacauucaaauggaacaauucaugacagaacagcuuucagaggucucauuuccacuucauugggcacuccaccaaccauaaguaacagugacuucauguguguuggauggucaagcacaacuugccaugaugggauugguagaaugacuaucuguauacaaggaaauaaugacaacgcuacagcaacgguuuauuauaacagaaggcugaccacuaccauuaagaccugggcuaggaacauucugaggacucaagagucagaaugugugugccacaauggcauaugugcaguuguaaugacugacggaucggcuaguagucaagccuauacaaaaguaauguauuuccacaagggguuaguaguuaaggaagaggcauuaaagggaucagccagacacauugaggaaugcuccuguuacgggcacagucaaaaagugaccugugugugcagagauaacuggcagggagcaaauaggccuauuauagaaauugauaugaacacauuggagcacacaaguagauacgugugcaccggaauucucacagacaccagcagaccuggggacaaaucuaguggugauuguuccaauccaauaacuggaaguccuggcgcuccgggagugaagggauucggguuuuuaaauggggauaacacauggcuugguaggaccaucagccccagaucaagaaguggauucgaaauguugaaaauaccuaaugcagguacugaucccaauuccagaauagcaggacggcaggaaauugucgacaauaacaauuggucaggcuauuccggaagcuuuauugacuauuggaaugauaacagcgagugcuacaauccaugcuucuacguagaguugauuagaggaagacccgaagaggcuaaauauguaugguggacaaguaacagucuaauugcccuaugugggagcccauucccaguuggguccgguuccuuccccgauggggcacagauccaauacuuuucguaa

SEQ ID NO: 55648 - RNA, 1416 nt, Artificial Sequence
  derived and/or modified CDS sequence (wt) from neuraminidase__InfluenzaA__AGQ81878
augaauccaaaucagaaacuauuugcauuaucuggaguggcgauagcacuuaguguacugaacuuauugauaggaaucucaaaugucggauugaauguaucucuacaucuaaaggaaaaaggacccaaacaggaagagaauuuaacaugcacgaccauuaaucaaaacaacacuacuguaguagaaaacacauacguaaauaacacaacaauaauuaccaaggaaacugauuugaaagcaccaagcuauuugcuguugaacaagagccuaugcaauguugaagggugggucgugauagcaaaagacaaugcaguaagauuuggggaaagugaacaaaucauuguuaccagggagccauacguaucaugcgacccaacaggaugcaaaauguaugccuuacaccaagggacuaccauuaggaacaaacauucaaauggaacgauucaugacagaacagcuuucagaggucucauuuccacuccacuaggcacuccaccaaccguaaguaacagugacuuuauguguguuggauggucaagcacaacuugccaugaugggauuggcagaaugacuaucuguauacaagggaauaaugacaacgcuacagcaacgguuuauuauaauagaaggcugaccacuaccauuaagaccugggccagaaacauucugaggacucaagagucagaaugugugugccauaauggcacaugugcaguuguaaugaccgacggaucagcuaguagucaagccuauacaaaaguaauguauuuccacaaggggcuagugguuaaggaggaggcauuaaagggaucagccagacauauugaggaaugcuccuguuacggacacagucaaaaggugaccugugugugcagagauaacuggcagggagcaaacaggccuauuauagaaauugacaugaacacauuggagcacacaaguagauacgugugcacuggaauucucacagacaccagcagaccuggagacaaaucuaguggugauuguuccaauccaauaacugggagucccggcgcuccgggagugaaggguuucggguuucuaaauggggauaacacauggcuugguaggaccaucagccccagaucaagaaguggauucgaaauguugaaaauaccuaaugcagguacugaucccaauucuagaauagcagaacgacaggaaauugucgacaauaacaauuggucaggcuauuccgggagcuuuauugacuauuggaaugauaacagugagugcuacaauccaugcuuuuacguggaguuaauuagaggaagacccgaagaggcuaaauacguaugguggacaaguaacagucuaauugcccuauguggaagcccauucccaauuggguccgguuccuuccccgauggggcgcagauccaauacuuuucguaa

SEQ ID NO: 55649 - RNA, 1416 nt, Artificial Sequence
  derived and/or modified CDS sequence (wt) from neuraminidase__InfluenzaA__AGQ81882
augaauccaaaucagaaacuauuugcacuaucuggaguggcaauagcgcuuaguguacugaacuuauuaauaggaaucucaaaugucggauugaacguuucccuacaucugaaggaaaaaggggccaaacaagaggagaauuuaacaugcacgaccauuaaucaaaacaacacuacuguaguagaaaacacauauguaaauaauacaacaguaauuaccaaggaagcugauuggaaaacaccaagcuaucugcuguugaacaagagccuaugcaauguugaaggcuggguugugauagcaaaagacaacgcaauaagauuuggggaaagugaacaaaucauuguuaccagggagccguauguaucaugcgacccaacaggaugcaagauguaugcccugcaccaagggaccaccauuagaaacaaacauucaaauggaacgauucaugacagaacagcuuucagaggucucaucuccacuccauugggcacuccaccaaccguaaguaacagugacuucauguguguuggguggucaagcacgacuugccaugauggaauuggcagaaugacuauuuguauacaaggaaauaaugacaacgccacagcaacaguuuauuauaauggaaggcugaccaccacaauuaagacaugggcaagaaacauccugaggacucaagagucagaaugugugugccacaauggcacaugugcaguugugaugaccgacggaucggcuagcagucaagccuauacaaaagugauguauuuccacaagggguuagugauuaaggaggaggcauuaaagggaucggccagacacauugaggaaugcuccuguuacggacacagucaaaaggugaccuguguguguagagauaacuggcagggagcaaacaggccuauuauagaaauugacaugaacacauuggaacacacaaguagauacguaugcacuggaauccucacagacaccagcagaccuggugacaaaucuaguggugacuguuccaauccgauaacugggagucccggcgcuccgggggugaagggauucggguuucuaaauggggauaacacauggcuugguaggaccaucagucccaggucaagaaguggauucgaaauguugaaaauacccaaugcagguauugaucccaauucuagaauagcagaacgacaagaaauugucgacaauaacaauuggucaggcuauucaggaagcuucauugacuauuggaaugacaacagugagugcuacaauccaugcuuuuacguagaguuaauuagaggaagacccgaagaggccaaguacguaugguggacaaguaauagucuaauugcccuauguggaagcccauucccaguuggguccgguuccuuccccgauggggcacagauccaauacuuuucguaa

SEQ ID NO: 55650 - RNA, 1416 nt, Artificial Sequence
  derived and/or modified CDS sequence (wt) from neuraminidase__InfluenzaA__AGQ81883
augaauccaaaucagaaacuauuugcacuaucuggaguggcaauagcgcuuaguguacugaacuuauuaauaggaaucucaaaugucggauugaacguuucccuacaucugaaggaaaaagggcccaaacaagaggagaauuuaacaugcacgaccauuaaucaaaacaacacuacuguaguagaaaacacauauguaaauaauacaacaguaauuaccaaggaagcugauuggaaaacaccaagcuaucugcuguugaacaagagccuaugcaauguugaaggcuggguugugauagcaaaagacaacgcaauaagauuuggggaaagugaacaaaucauuguuaccagggagccguauguaucaugcgacccaacaggaugcaagauguaugcccugcaccaagggaccaccauuagaaacaaacauucaaauggaacgauucaugacagaacagcuuucagaggucucaucuccacuccauugggcacuccaccaaccguaaguaacagugacuucauguguguuggguggucaagcacgacuugccaugauggaauuggcagaaugacuauuuguauacaaggaaauaaugacaacgccacagcaacaguuuauuauaauggaaggcugaccaccacaauuaagacaugggcaagaaacauccugaggacucaagagucagaaugugugugccacaauggcacaugugcaguugugaugaccgacggaucggcuagcagucaagccuauacaaaagugauguauuuccacaagggguuagugauuaaggaggaggcauuaaagggaucggccagacacauugaggaaugcuccuguuacggacacagucaaaaggugaccuguguguguagagauaacuggcagggagcaaacaggccuauuauagaaauugacaugaacacauuggaacacacaaguagauacguaugcacuggaauccucacagacaccagcagaccuggugacaaaucuaguggugacuguuccaauccgauaacugggagucccggcgcuccgggggugaagggauucggguuucuaaauggggauaacacauggcuugguaggaccaucagucccaggucaagaaguggauucgaaauguugaaaauacccaaugcagguauugaucccaauucuagaauagcagaacgacaagaaauugucgacaauaacaauuggucaggcuauucaggaagcuucauugacuauuggaaugacaacagugagugcuacaauccaugcuuuuacguagaguuaauuagaggaagacccgaagaggccaaguacguaugguggacaaguaauagucuaauugcccuauguggaagcccauucccaguuggguccgguuccuuccccgauggggcacagauccaauacuuuucguaa

SEQ ID NO: 55651 - RNA, 1416 nt, Artificial Sequence
  derived and/or modified CDS sequence (wt) from neuraminidase__InfluenzaA__AGQ81884
augaauccaaaucagaaacuauuugcacuaucuggaguggcaauagcgcuuaguguacugaacuuauuaauaggaaucucaaaugucggauugaacguuucccuacaucugaaggaaaaagggcccaaacaagaggagaauuuaacaugcacgaccauuaaucaaaacaacacuacuguaguagaaaacacauauguaaauaauacaacaguaauuaccaaggaagcugauuggaaaacaccaagcuaucugcuguugaacaagagccuaugcaauguugaaggcuggguugugauagcaaaagacaacgcaauaagauuuggggaaagugaacaaaucauuguuaccagggagccguauguaucaugcgacccaacaggaugcaagauguaugcccugcaccaagggaccaccauuagaaacaaacauucaaauggaacgauucaugacagaacagcuuucagaggucucaucuccacuccauugggcacuccaccaaccguaaguaacagugacuucauguguguuggguggucaagcacgacuugccaugauggaauuggcagaaugacuauuuguauacaaggaaauaaugacaacgccacagcaacaguuuauuauaauggaaggcugaccaccacaauuaagacaugggcaagaaacauccugaggacucaagagucagaaugugugugccacaauggcacaugugcaguugugaugaccgacggaucggcuagcagucaagccuauacaaaagugauguauuuccacaagggguuagugauuaaggaggaggcauuaaagggaucggccagacacauugaggaaugcuccuguuacggacacagucaaaaggugaccuguguguguagagauaacuggcagggagcaaacaggccuauuauagaaauugacaugaacacauuggaacacacaaguagauacguaugcacuggaauccucacagacaccagcagaccuggugacaaaucuaguggugacuguuccaauccgauaacugggagucccggcgcuccgggggugaagggauucggguuucuaaauggggauaacacauggcuugguaggaccaucagucccaggucaagaaguggauucgaaauguugaaaauacccaaugcagguauugaucccaauucuagaauagcagaacgacaagaaauugucgacaauaacaauuggucaggcuauucagggagcuucauugacuauuggaaugacaacagugagugcuacaauccaugcuuuuacguagaguuaauuagaggaagacccgaagaggccaaguacguaugguggacaaguaauagucuaauugcccuauguggaagcccauucccaguuggguccgguuccuuccccgauggggcacagauccaauacuuuucguaa

SEQ ID NO: 55652 - RNA, 1416 nt, Artificial Sequence
  derived and/or modified CDS sequence (wt) from neuraminidase__InfluenzaA__AGQ81885
augaauccaaaucagaaacuauuugcacuaucuggaguggcaauagcgcuuaguguacugaacuuauuaauaggaaucucaaaugucggauugaacguuucccuacaucugaaggaaaaagggcccaaacaagaggagaauuuaacaugcacgaccauuaaucaaaacaacacuacuguaguagaaaacacauauguaaauaauacaacaguaauuaccaaggaagcugauuggaaaacaccaagcuaucugcuguugaacaagagccuaugcaauguugaaggcuggguugugauagcaaaagacaacgcaauaagauuuggggaaagugaacaaaucauuguuaccagggagccguauguaucaugcgacccaacaggaugcaagauguaugcccugcaccaagggaccaccauuagaaacaaacauucaaauggaacgauucaugacagaacagcuuucagaggucucaucuccacuccauugggcacuccaccaaccguaaguaacagugacuucauguguguuggguggucaagcacgacuugccaugauggaauuggcagaaugacuauuuguauacagggaaauaaugacaacgccacagcaacaguuuauuauaauggaaggcugaccaccacaauuaagacaugggcaagaaacauccugaggacucaagagucagaaugugugugccacaauggcacaugugcaguugugaugaccgauggaucggcuagcagucaagccuauacaaaaguaauguauuuccacaagggguuagugauuaaggaggaggcauuaaagggaucggccagacacauugaggaaugcuccuguuacggacacagucaaaaggugaccuguguguguagagauaacuggcagggagcaaacaggccuauuauagaaauugacaugaacacauuggaacacacaaguagauacguaugcacuggaauccucacagacaccagcagaccuggugacaaaucuaguggugacuguuccaauccgauaacugggagucccggcgcuccgggggugaagggauucggguuucuaaauggggauaacacauggcuugguaggaccaucagucccaggucaagaaguggauucgaaauguugaaaauacccaaugcagguauugaucccaauucuagaauagcagaacgacaagaaauugucgacaauaacaauuggucaggcuauucaggaagcuucauugacuauuggaaugacaacagugagugcuacaauccaugcuuuuacguagaguuaauuagaggaagacccgaagaggccaaguacguaugguggacaaguaauagucuaauugcccuauguggaagcccauucccaguuggguccgguuccuuccccgauggggcacagauccaauacuuuucguaa

SEQ ID NO: 55653 - RNA, 1416 nt, Artificial Sequence
  derived and/or modified CDS sequence (wt) from neuraminidase__InfluenzaA__AGQ81886
augaauccaaaucagaaacuauuugcacuaucuggaguggcaauagcgcuuaguguacugaacuuauuaauaggaaucucaaaugucggauugaacguuucccuacaucugaaggaaaaagggcccaaacaagaggagaauuuaacaugcacgaccauuaaucaaaacaacacuacuguaguagaaaacacauauguaaauaauacaacaguaauuaccaaggaagcugauuggaaaacaccaagcuaucugcuguugaacaagagccuaugcaauguugaaggcuggguugugauagcaaaagacaacgcaauaagauuuggggaaagugaacaaaucauuguuaccagggagccguauguaucaugcgacccaacaggaugcaagauguaugcccugcaccaagggaccaccauuagaaacaaacauucaaauggaacgauucaugacagaacagcuuucagaggucucaucuccacuccauugggcacuccaccaaccguaaguaacagugacuucauguguguuggguggucaagcacgacuugccaugauggaauuggcagaaugacuauuuguauacaaggaaauaaugacaacgccacagcaacaguuuauuauaauggaaggcugaccaccacaauuaagacaugggcaagaaacauccugaggacucaagagucagaaugugugugccacaauggcacaugugcaguugugaugaccgacggaucggcuagcagucaagccuauacaaaaguaauguauuuccacaagggguuagugauuaaggaggaggcauuaaagggaucggccagacacauugaggaaugcuccuguuacgggcacagucaaaaggugaccuguguguguagagauaacuggcagggagcaaacaggccuauuauagaaauugacaugaacacauuggaacacacaaguagauacguaugcacuggaauccucacagacaccagcagaccuggugacaaaucuaguggugacuguuccaauccgauaacugggagucccggcgcuccgggggugaagggauucggguuucuaaauggggauaacacauggcuugguaggaccaucagucccaggucaagaaguggauucgaaauguugaaaauacccaaugcagguauugaucccaauucuagaauagcagaacgacaagaaauugucgacaauaacaauuggucaggcuauucaggaagcuucauugacuauuggaaugacaacagugagugcuacaauccaugcuuuuacguagaguuaauuagaggaagacccgaagaggccaaauacguaugguggacaaguaauagucuaauugcccuauguggaagcccauucccaguuggguccgguuccuuccccgauggggcacagauccaauacuuuucguaa

SEQ ID NO: 55654 - RNA, 1356 nt, Artificial Sequence
  derived and/or modified CDS sequence (wt) from neuraminidase__InfluenzaA__AGQ81888
augaauccaaaucagaaacuauucgcauuauccggaguggcaauagcgcuuaguguacugaacuuauugauaggacucucaaaugucggauugaauguaucucuacaucuaaaagaagcaggacccaaacaggaagagaauuugacaugcaugacuaccaaagaaacugaauugggaacaccaagcuaucugcuguugaacaagagucuauguaauguugaggggugggucgugauagcaaaagacaaugcaguaagauuuggggaaagugagcaaaucauuauuaccagagaaccauacguaucaugugacccaaauggaugcaaaauguaugccuugcaucaagggacuaccauuaggaacaaacauucaaacggaacaauucacgacagaacagccuuuagaggccucaucuccacuccauugggcacuccaccaaccguaaguaauagugauuuuauauguguuggauggucaagcacaacuugccaugauggaauuggcagaaugacuaucuguauacaagggaauaaugacaaugcuacagcaacgguuuauuauaacagaaggcugaccacuaccauuaagaccugggcuagaaacauucugaggacucaagagucagaaugugugugccacaacggcacaugugcaguuguaaugaccgaugggucggcuaguagucaagcccauacaaaaguaauguauuuccacaagggguugguaguuaaggaggaggcauugaagggaucggccaaacauauugaggagugcuccuguuacgggcacaaucaaaaggugaccugugugugcagagauaauuggcagggagcaaacagaccuauuauagaaauugacaugaacacauuggaacacacaaguagauaugugugcaccggaauucucaccgauacuagcagacccggggacaaaccuacuggugauuguuccaauccaauaacuggaaguccuggcgcuccgggagugaagggauuuggauuucuaaauggggauaauacauggcuugguaggaccaucagucccagaucaagaaguggauuugaaaugcugaaaauaccuaacgcagguauugaucccaauucuagaauagcugagcggcaggaaauugucgacaacagcaauuggucaggcuauuccggaagcuuuauugacuauuggaaugauaacagugaguguuacaauccauguuucuacguagaguuaauuagagggagacccgaagaggcuaaauaugugugguggacaaguaacagucuaauugcccuauguggaagcccauucccaguuggguccgguuccuuccccgauggggcacagauccaauacuuuucguaa

SEQ ID NO: 55655 - RNA, 1356 nt, Artificial Sequence
  derived and/or modified CDS sequence (wt) from neuraminidase__InfluenzaA__AGQ81889
augaauccaaaucagaaacuauucgcauuauccggaguggcaauagcgcuuaguguacugaaccuauugauaggacucucaaaugucggauugaauguaucucuacaucuaaaagaaacaggacccaaacaggaagagaauuugacaugcaugacuaccaaagaaacugaauugggaacaccaagcuaucugcuguugaacaagagucuauguaauguugaggggugggucgugauagcaaaagacaaugcaguaagauuuggggaaagugagcaaaucauuauuaccagagaaccauacguaucaugugacccaaauggaugcaaaauguaugccuugcaucaagggacuaccauuaggaacaaacauucaaacggaacaauucacgacagaacagccuucagaggucucaucuccacuccauugggcacuccaccaaccguaaguaauagugauuuuauauguguuggauggucaagcacaacuugccaugauggaauuggcagaaugacuaucuguauacaagggaauaaugacaaugcuacagcaacgguuuauuauaacagaaggcugaccacuaccauuaagaccugggcuagaaacauucugaggacucaagagucagaaugugugugccacaacggcacaugugcaguuguaaugacagaugggucggcuaguagucaagcccauacaaaaguaauguauuuccacaagggguugguaguuaaggaggaggcauugaagggaucggccaaacauauugaggagugcuccuguuacgggcacaaucaaaaggugaccugugugugcagagauaauuggcagggagcaaacagaccuauuauagaaauugacaugaacacauuggaacacacaaguagauaugugugcaccggaauucucaccgauacuagcagacccggggacaaaccuacuggugauuguuccaauccaauaacuggaaguccuggcgcuccgggagugaagggauuuggauuucuaaauggggauaauacauggcuugguaggaccaucagucccagaucaagaaguggauuugaaaugcugaaaauaccuaacgcagguauugaucccaauucuagaauagcugagcggcaggaaauugucgacaacagcaauuggucaggcuauuccggaagcuuuauugacuauuggaaugauaacagugaguguuacaauccauguuucuacguagaguuaauuagagggagacccgaagaggcuaaauaugugugguggacaaguaacagucuaauugcccuauguggaagcccauucccaguuggguccgguuccuuccccgauggggcacagauccaauacuuuucguaa

SEQ ID NO: 55656 - RNA, 1356 nt, Artificial Sequence
  derived and/or modified CDS sequence (wt) from neuraminidase__InfluenzaA__AGQ81890
augaauccaaaucagaaacuauucgcauuauccggaguggcaauagcgcuuaguguacugaacuuauugauaggacucucaaaugucggauugaauguaucucuacaucuaaaagaaacaggacccaaacaggaagagaauuugacaugcaugacuaccaaagaaacugaauugggaacaccaagcuaucugcuguugaacaagagucuaugcaauguugaggggugggucgugauagcaaaagacaaugcaguaagauuuggggaaagugagcaaaucauuauuaccagagaaccauacguaucaugugacccaaauggaugcaaaauguaugccuugcaucaagggaccaccauuaggaacaaacauucaaacggaacaauucacgacagaacagccuucaggggucucaucuccacuccauugggcacuccaccaaccguaaguaauagugauuuuauauguguuggauggucaagcacaacuugccaugauggaauuggcagaaugacuaucuguauacaagggaauaaugacaaugcuacagcaacgguuuauuauaacagaaggcugaccacuaccauuaagaccugggcuagaaacauucugaggacucaagagucagaaugugugugccacaacggcacaugugcaguuguaaugaccgaugggucggcuaguagucaagcccauacaaaaguaauguauuuccacaagggguugguaguuaaggaggaggcauugaagggaucugccaaacauauugaggaaugcuccuguuacgggcacaaucaaaaggugaccugugugugcagagauaauuggcagggagcaaacagaccuauuauagaaauugacaugaacacauuggaacacacaaguagauaugugugcaccggaauucucaccgauacuagcagacccggggacaaaccuacuggugauuguuccaauccaauaacuggaaguccuggcgcuccgggagugaagggauuuggauuucuaaauggggauaauacauggcuugguaggaccaucagucccagaucaagaaguggauuugaaaugcugaaaauaccuaacgcagguauugaucccaauucuagaauagcugagcggcaggaaauugucgacaacagcaauuggucaggcuauuccggaagcuuuauugacuauuggaaugauaacagugaguguuacaauccauguuucuacguagaguuaauuagagggagacccgaagaggcuaaauaugugugguggacaaguaacagucuaauugcccuauguggaagcccauucccaguuggguccgguuccuuccccgauggggcacagauccaauacuuuucguaa

SEQ ID NO: 55657 - RNA, 1356 nt, Artificial Sequence
  derived and/or modified CDS sequence (wt) from neuraminidase__InfluenzaA__AGQ81891
augaauccaaaucagaaacuauucgcauuauccggaguggcaauagcgcuuaguguacugaacuuauugauaggacucucaaaugucggauugaauguaucucuacaucuaaaagaaacaggacccaaacaggaagagaauuugacaugcaugacuaccaaagaaacugaauugggaacaccaagcuaucugcuguugaacaagagucuaugcaauguugaggggugggucgugauagcaaaagacaaugcaguaagauuuggggaaagugagcaaaucauuauuaccagagaaccauacguaucaugugacccaaauggaugcaaaauguaugccuugcaucaagggacuaccauuaggaacaaacauucaaacggaacaauucacgacagaacagccuucaggggucucaucuccacuccauugggcacuccaccaaccguaaguaauagugauuuuauauguguuggauggucaagcacaacuugccaugauggaauuggcagaaugacuaucuguauacaagggaauaaugacaaugcuacagcaacgguuuauuauaacagaaggcugaccacuaccauuaagaccugggcuagaaacauucugaggacucaagagucagaaugugugugccacaacggcacaugugcaguuguaaugaccgaugggucggcuaguagucaagcccauacaaaaguaauguauuuccacaagggguugguaguuaaggaggaggcauugaagggaucugccaaacauauugaggaaugcuccuguuacgggcacaaucaaaaggugaccugugugugcagagauaauuggcagggagcaaacagaccuauuauagaaauugacaugaacacauuggaacacacaaguagauaugugugcaccggaauucucaccgauacuagcagacccggggacaaaccuacuggugauuguuccaauccaauaacuggaaguccuggcgcuccgggagugaagggauuuggauuucuaaauggggauaauacauggcuugguaggaccaucagucccagaucaagaaguggauuugaaaugcugaaaauaccuaacgcagguauugaucccaauucuagaauagcugagcggcaggaaauugucgacaacagcaauuggucaggcuauuccggaagcuuuauugacuauuggaaugauaacagugaguguuacaauccauguuucuacguagaguuaauuagagggagacccgaagaggcuaaauaugugugguggacaaguaacagucuaauugcccuauguggaagcccauucccaguuggguccgguuccuuccccgauggggcacagauccaauacuuuucguaa

SEQ ID NO: 55658 - RNA, 1356 nt, Artificial Sequence
  derived and/or modified CDS sequence (wt) from neuraminidase__InfluenzaA__AGQ81893
augaauccaaaucagaaacuauucgcauuauccggaguggcaauagcgcuuaguguacugaaccuauugauaggacucucaaaugucggauugaauguaucucuacaucuaaaagaaacaggacccaaacaggaagagaauuugacaugcaugacuaccaaagaaacugaauugggaacaccaagcuaucugcuguugaacaagagucuauguaauguugaggggugggucgugauagcaaaagacaaugcaguaagauuuggggaaagugagcaaaucauuauuaccagagaaccauacguaucaugugacccaaauggaugcaaaauguaugccuugcaucaagggacuaccauuaggaacaaacauucaaacggaacaauucacgacagaacagccuucagaggucucaucuccacuccauugggcacuccaccaaccguaaguaauagugauuuuauauguguuggauggucaagcacaacuugccaugauggaauuggcagaaugacuaucuguauucaagggaauaaugacaaugcuacagcaacgguuuauuauaacagaaggcugaccacuaccauuaagaccugggcuagaaacauucugaggacucaagagucagaaugugugugccacaacggcacaugugcaguuguaaugacagaugggucggcuaguagucaagcccauacaaaaguaauguauuuccacaagggguugguaguuaaggaggaggcauugaagggaucggccaaacauauugaggagugcuccuguuacgggcacaaucaaaaggugaccugugugugcagagauaauuggcagggagcaaacagaccuauuauagaaauugacaugaacacauuggaacacacaaguagauaugugugcaccggaauucucaccgauacuagcagacccggggacaaaccuacuggugauuguuccaauccaauaacuggaaguccuggcgcuccgggagugaagggauuuggauuucuaaauggggauaauacauggcuugguaggaccaucagucccagaucaagaaguggauuugaaaugcugaaaauaccuaacgcagguauugaucccaauucuagaauagcugagcggcaggaaauugucgacaacagcaauuggucaggcuauuccggaagcuuuauugacuauuggaaugauaacagugaguguuacaauccauguuucuacguagaguuaauuagagggagacccgaagaggcugaauaugugugguggacaaguaacagucuaauugcccuauguggaagcccauucccaguuggguccgguuccuuccccgauggggcacagauccaauacuuuucguaa

SEQ ID NO: 55659 - RNA, 1356 nt, Artificial Sequence
  derived and/or modified CDS sequence (wt) from neuraminidase__InfluenzaA__AGQ81894
augaauccaaaucagaaacuauucgcauuauccggaguggcaauagcgcuuaguguacugaacuuauugauaggacucucaaaugucggauugaauguaucucuacaucuaaaagaaacaggacccaaacaggaagagaauuugacaugcaugacuaccaaagaaacugaauugggaacaccaagcuaucugcuguugaacaagagucuauguaauguugaggggugggucgugauagcaaaagacaaugcaguaagauuuggggaaagugagcaaaucauuauuaccagagaaccauacguaucaugugacccaaauggaugcaaaauguaugccuugcaucaagggacuaccauuaggaacaaacauucaaacggaacaauucacgacagaacagccuucagaggucucaucuccacuccauugggcacuccaccaaccguaaguaauagugauuuuauauguguuggauggucaagcacaacuugccaugauggaauuggcagaaugacuaucuguauacaagggaauaaugacaaugcuacagcaacgguuuauuauaacagaaggcugaccacuaccauuaagaccugggcuagaaacauucugaggacucaagagucagaaugugugugccacaacggcacaugugcaguuguaaugaccgaugggucggcuaguagucaagcccauacaaaaguaauguauuuccacaagggguugguaguuaaagaggaggcauugaagggaucggccaaacauauugaggagugcuccuguuacgggcacaaucaaaaggugaccugugugugcagagauaauuggcagggagcaaacagaccuauuauagaaauugacaugaacacauuggaacacacaaguagauaugugugcaccggaauucucaccgauacuagcagacccggggacaaaccuacuggugauuguuccaauccaauaacuggaaguccuggcgcuccgggagugaagggauuuggauuucuaaauggggauaauacauggcuugguaggaccaucagucccagaucaagaaguggauuugaaaugcugaaaauaccuaacgcagguauugaucccaauucuagaauagcugagcggcaggaaauugucgacaacagcaauuggucaggcuauuccggaagcuuuauugacuauuggaaugauaacagugaguguuacaauccauguuucuacguagaguuaauuagagggagacccgaagaggcuaaauaugugugguggacaaguaacagucuaauugcccuauguggaagcccauucccaguuggguccgguuccuuccccgauggggcacagauccaauacuuuucguaa

SEQ ID NO: 55660 - RNA, 1356 nt, Artificial Sequence
  derived and/or modified CDS sequence (wt) from neuraminidase__InfluenzaA__AGQ81895
augaauccaaaucagaaacuauucgcauuauccggaguggcaauagcgcuuaguguacugaacuuauugauaggacucucaaaugucggauugaauguaucucuacaucuaaaagaaacaggacccaaacaggaagagaauuugacaugcaugacuaccaaagaaacugaauugggaacaccaagcuaucugcuguugaacaagagucuauguaauguugaggggugggucgugauagcaaaagacaaugcaguaagauuuggggaaagugagcaaaucauuaucaccagagaaccauacguaucaugugacccaaauggaugcaaaauguaugccuugcaucaagggacuaccauuaggaacaaacauucaaacggaacaauucacgacagaacagccuucagaggucucaucuccacuccauugggcacuccaccaaccguaaguaauagugauuuuauauguguuggauggucaagcacaacuugccaugauggaauuggcagaaugacuaucuguauacaagggaauaaugacaaugcuacagcaacgguuuauuauaacagaaggcugaccacuaccauuaagaccugggcuagaaacauucugaggacucaagagucagaaugugugugccacaacggcacaugugcaguuguaaugaccgaugggucggcuaguagucaagcccauacaaaaguaauguauuuccacaagggguugguaguuaaggaggaggcauugaagggaucggccaaacauauugaggagugcuccuguuacgggcacaaucaaaaggugaccugugugugcagagauaauuggcagggagcaaacagaccuauuauagaaauugacaugaacacauuggaacacacaaguagauaugugugcaccggaauucucaccgauacuagcagacccggggacaaaccuacuggugauuguuccaauccaauaacuggaaguccuggcgcuccgggagugaagggauuuggauuucuaaauggggauaauacauggcuugguaggaccaucagucccagaucaagaaguggauuugaaaugcugaaaauaccuaacgcagguauugaucccaauucuagaauagcugagcggcaggaaauugucgacaacagcaauuggucaggcuauuccggaagcuuuauugacuauuggaaugauaacagugaguguuacaauccauguuucuacguagaguuaauuagagggagacccgaagaggcuaaauaugugugguggacaaguaacagucuaauugcccuauguggaagcccauucccaguuggguccgguuccuuccccgauggggcacagauccaauacuuuucguaa

SEQ ID NO: 55661 - RNA, 1356 nt, Artificial Sequence; identical to SEQ ID NO: 55655
  derived and/or modified CDS sequence (wt) from neuraminidase__InfluenzaA__AGQ81896

SEQ ID NO: 55662 - RNA, 1356 nt, Artificial Sequence; identical to SEQ ID NO: 55655
  derived and/or modified CDS sequence (wt) from neuraminidase__InfluenzaA__AGQ81897

SEQ ID NO: 55663 - RNA, 1356 nt, Artificial Sequence; identical to SEQ ID NO: 55655
  derived and/or modified CDS sequence (wt) from neuraminidase__InfluenzaA__AGQ81898

SEQ ID NO: 55664 - RNA, 1356 nt, Artificial Sequence; identical to SEQ ID NO: 55655
  derived and/or modified CDS sequence (wt) from neuraminidase__InfluenzaA__AGQ81899

SEQ ID NO: 55665 - RNA, 1356 nt, Artificial Sequence
  derived and/or modified CDS sequence (wt) from neuraminidase__InfluenzaA__AGQ81900
augaauccaaaucagaaacuauucgcauuauccggaguggcaauagcgcuuaguguacugaacuuauugauaggacucucaaaugucggauugaauguaucucuacaucuaaaagaaacaggacccaaacaggaagagaauuugacaugcaugacuaccaaagaaacugaauugggaacaccaagcuaucugcuguugaacaagagucuaugcaauguugaggggugggucgugauagcaaaagacaaugcaguaagauuuggggaaagugagcaaaucauuauuaccagagaaccauacguaucaugugacccaaauggaugcaaaauguaugccuugcaucaagggacuaccauuaggaacaaacauucaaacggaacaauucacgacagaacagccuucaggggucucaucuccacuccauugggcacuccaccaaccguaaguaauagugauuuuauauguguuggauggucaagcacaacuugccaugauggaauuggcagaaugacuaucuguauacaagggaauaaugacaaugcuacagcaacgguuuauuauaacagaaggcugaccacuaccauuaagaccugggcuagaaacauucugaggacucaagagucagaaugugugugccacaacggcacaugugcaguuguaaugaccgaugggucggcuaguagucaagcccauacaaaaguaauguauuuccacaagggguugguaguuaaggaggaggcauugaagggaucggccaaacauauugaggaaugcuccuguuacgggcacaaucaaaaggugaccugugugugcagagauaauuggcagggagcaaacagaccuauuauagaaauugacaugaacacauuggaacacacaaguagauaugugugcaccggaauucucaccgauacuagcagacccggggacaaaccuacuggugauuguuccaauccaauaacuggaaguccuggcgcuccgggagugaagggauuuggauuucuaaauggggauaauacauggcuugguaggaccaucagucccagaucaagaaguggauuugaaaugcugaaaauaccuaacgcagguauugaucccaauucuagaauagcugagcggcaggaaauugucgacaacagcaauuggucaggcuauuccggaagcuuuauugacuauuggaaugauaacagugaguguuacaauccauguuucuacguagaguuaauuagagggagacccgaagaggcuaaauaugugugguggacaaguaacagucuaauugcccuauguggaagcccauucccaguuggguccgguuccuuccccgauggggcacagauccaauacuuuucguaa

SEQ ID NO: 55666 - RNA, 1356 nt, Artificial Sequence; identical to SEQ ID NO: 55657
  derived and/or modified CDS sequence (wt) from neuraminidase__InfluenzaA__AGQ81901

SEQ ID NO: 55667 - RNA, 1356 nt, Artificial Sequence
  derived and/or modified CDS sequence (wt) from neuraminidase__InfluenzaA__AGQ81902
augaauccaaaucagaaacuauucgcauuauccggaguggcaauagcgcuuaguguacugaacuuauugauaggacucucaaaugucggauugaauguaucucuacaucuaaaagaaacaggacccaaacaggaagagaauuugacaugcaugacuaccaaagaaacugaauugggaacaccaagcuaucugcuguugaacaagagucuauguaauguugaggggugggucgugauagcaaaagacaaugcaguaagauuuggggaaagugagcaaaucauuauuaccagagaaccauacguaucaugugacccaaauggaugcaaaauguaugccuugcaucaagggacuaccauuaggaacaaacauucaaacggaacaauucacgacagaacagccuucagaggucucaucuccacuccauugggcacuccaccaaccguaaguaauagugauuuuauauguguuggauggucaagcacaacuugccaugauggaauuggcagaaugacuaucuguauacaagggaauaaugacaaugccacagcaacgguuuauuauaacagaaggcugaccacuaccauuaagaccugggcuagaaacauucugaggacucaagagucagaaugugugugccacaacggcacaugugcaguuguaaugaccgaugggucggcuaguagucaagcccauacaaaaguaauguauuuccacaagggguugguaguuaaggaggaggcauugaagggaucggccaaacauauugaggagugcuccuguuacgggcacaaucaaaaggugaccugugugugcagagauaauuggcagggagcaaacagaccuauuauagaaauugacaugaacacauuggaacacacaaguagauaugugugcaccggaauucucaccgauacuagcagacccggggacaaaccuacuggugauuguuccaauccaauaacuggaaguccuggcgcuccgggagugaagggauuuggauuucuaaauggggauaauacauggcuugguaggaccaucagucccagaucaagaaguggauuugaaaugcugaaaauaccuaacgcagguauugaucccaauucuagaauagcugagcggcaggaaauugucgacaacagcaauuggucaggcuauuccggaagcuuuauugacuauuggaaugauaacagugaguguuacaauccauguuucuacguagaguuaauuagagggagaccugaagaggcuaaauaugugugguggacaaguaacagucuaauugcccuauguggaagcccauucccaguuggguccgguuccuuccccgauggggcacagauccaauacuuuucguaa

SEQ ID NO: 55668 - RNA, 1356 nt, Artificial Sequence; identical to SEQ ID NO: 55665
  derived and/or modified CDS sequence (wt) from neuraminidase__InfluenzaA__AGQ81903

SEQ ID NO: 55669 - RNA, 1356 nt, Artificial Sequence
  derived and/or modified CDS sequence (wt) from neuraminidase__InfluenzaA__AGQ81904
augaauccaaaucagaaacuauucgcauuauccggaguggcaauagcgcuuaguguacugaacuuauugauaggacucucaaaugucggauugaauguaucucuacaucuaaaagaaacaggacccaaacaggaagagaauuugacaugcaugacuaccaaagaaacugaauugggaacaccaagcuaucugcuguugaacaagagucuauguaauguugaggggugggucgugauagcaaaagacaaugcaguaagauuuggggaaagugagcaaaucauuauuaccagagaaccauacguaucaugugacccaaauggaugcaaaauguaugccuugcaucaagggacuaccauuaggaacaaacauucaaacggaacaauucacgacagaacagccuucagaggucucaucuccacuccauugggcacuccaccaaccguaaguaauagugauuuuauauguguuggauggucaagcacaacuugccaugauggaauuggcagaaugacuaucuguauacaagggaauaaugacaaugccacagcaacgguuuauuauaacagaaggcugaccacuaccauuaagaccugggcuagaaacauucugaggacucaagagucagaaugugugugccacaacggcacaugugcaguuguaaugaccgaugggucggcuaguagucaagcccauacaaaaguaauguauuuccacaagggguugguaguuaaggaggaggcauugaagggaucggccaaacauauugaggagugcuccuguuacgggcacaaucaaaaggugaccugugugugcagagauaauuggcagggagcaaacagaccuauuauagaaauugacaugaacacauuggaacacacaaguagauaugugugcaccggaauucucaccgauacuagcagacccggggacaaaccuacuggugauuguuccaauccaauaacuggaaguccuggcgcuccgggagugaagggauuuggauuucuaaauggggauaauacauggcuugguaggaccaucagucccagaucaagaaguggauuugaaaugcugaaaauaccuaacgcagguauugaucccaauucuagaauaacugagcggcaggaaauugucgacaacagcaauuggucaggcuauuccggaagcuuuauugacuauuggaaugauaacagugaguguuacaauccauguuucuacguagaguuaauuagagggagaccugaagaggcuaaauaugugugguggacaaguaacagucuaauugcccuauguggaagcccauucccaguuggguccgguuccuuccccgauggggcacagauccaauacuuuucguaa

SEQ ID NO: 55670 - RNA, 1356 nt, Artificial Sequence
  derived and/or modified CDS sequence (wt) from neuraminidase__InfluenzaA__AGQ81905
augaauccaaaucagaaacuauucgcauuauccggaguggcaauagcgcuuaguguacugaacuuauugauaggacucucaaaugucggauugaauguaucucuacaucuaaaagaaacaggacccaaacaggaagagaauuugacaugcaugacuaccaaagaaacugaauugggaacaccaagcuaucugcuguugaacaagagucuauguaauguugaggggugggucgugauagcaaaagacaaugcaguaagauuuggggaaagugagcaaaucauuauuaccagagaaccauacguaucaugugacccaaauggaugcaaaauguaugccuugcaucaagggacuaccauuaggaacaaacauucaaacggaacaauucacgacagaacagccuucagaggucucaucuccacuccauugggcacuccaccaaccguaaguaauagugauuuuauauguguuggauggucaagcacaacuugccaugauggaauuggcagaaugacuaucuguauacaagggaauaaugacaaugcuacagcaacgguuuauuauaacagaaggcugaccacuaccauuaagaccugggcuagaaacauucugaggacucaagagucagaaugugugugccacaacggcacaugugcaguuguaaugaccgaugggucggcuaguagucaagcccauacaaaaguaauguauuuccacaagggguugguaguuaaggaggaggcauugaagggaucggccaaacauauugaggagugcuccuguuacgggcacaaucaaaaggugaccugugugugcagagauaauuggcagggagcaaacagaccuauuauagaaauugacaugaacacauuggaacacacaaguagauaugugugcaccggaauucucaccgauacuagcagacccggggacaaaccuacuggugauuguuccaauccaauaacuggaaguccuggcgcuccgggagugaagggauuuggauuucuaaauggggauaauacauggcuugguaggaccaucagucccagaucaagaaguggauuugaaaugcugaaaauaccuaacgcagguauugaucccaauucuagaauagcugagcggcaggaaauugucgacaacagcaauuggucaggcuauuccggaagcuuuauugacuauuggaaugauaacagugaguguuacaauccauguuucuacguagaguuaauuagagggagacccgaagaggcuaaauaugugugguggacaaguaacagucuaauugcccuauguggaagcccauucccaguuggguccgguuccuuccccgauggggcacagauccaauacuuuucguaa

SEQ ID NO: 55671 - RNA, 1356 nt, Artificial Sequence
  derived and/or modified CDS sequence (wt) from neuraminidase__InfluenzaA__AGQ81906
augaauccaaaucagaaacuauucgcauuauccggaguggcaauagcgcuuaguguacugaacuuauugauaggacucucaaaugucggauugaauguaucucuacaucuaaaagaaacaggacccaaacaggaagagaauuugacaugcaugacuaccaaagaaacugaauugggaacaccaagcuaucugcuguugaacaagagucuauguaauguugaggggugggucgugauagcaaaagacaaugcaguaagauuuggggaaagugagcaaaucauuauuaccagagaaccauacguaucaugugacccaaauggaugcaaaauguaugccuugcaucaagggacuaccauuaggaacaaacauucaaacggaacaauucacgacagaacagccuucagaggucucaucuccacuccauugggcacuccaccaaccguaaguaauagugauuuuauauguguuggauggucaagcacaacuugccaugauggaauuggcagaaugacuaucuguauacaagggaauaaugacaaugccacagcaacgguuuauuauaacagaaggcugaccacuaccauuaagaccugggcuagaaacauucugaggacucaagagucagaaugugugugccacaacggcacaugugcaguuguaaugaccgaugggucggcuaguagucaagcccauacaaaaguaauguauuuccacaagggguugguaguuaaggaggaggcauugaagggaucggccagacauauugaggagugcuccuguuacgggcacaaucaaaaggugaccugugugugcagagauaauuggcagggagcaaacagaccuauuauagaaauugacaugaacacauuggaacacacaaguagauaugugugcaccggaauucucaccgauacuagcagacccggggacaaaccuacuggugauuguuccaauccaauaacuggaaguccuggcgcuccgggagugaagggauuuggauuucuaaauggggauaauacauggcuugguaggaccaucagucccagaucaagaaguggauuugaaaugcugaaaauaccuaacgcagguauugaucccaauucuagaauagcugagcggcaggaaauugucgacaacagcaauuggucaggcuauuccggaagcuuuauugacuauuggaaugauaacagugaguguuacaauccauguuucuacguagaguuaauuagagggagaccugaagaggcuaaauaugugugguggacaaguaacagucuaauugcccuauguggaagcccauucccaguuggguccgguuccuuccccgauggggcacagauccaauacuuuucguaa

SEQ ID NO: 55672 - RNA, 1356 nt, Artificial Sequence; identical to SEQ ID NO: 55667
  derived and/or modified CDS sequence (wt) from neuraminidase__InfluenzaA__AGQ81907

SEQ ID NO: 55673 - RNA, 1356 nt, Artificial Sequence
  derived and/or modified CDS sequence (wt) from neuraminidase__InfluenzaA__AGQ81908
augaauccaaaucagaaacuauucgcauuauccggaguggcaauagcgcuuaguguacugaacuuauugauaggacucucaaaugucggauugaauguaucucuacaucuaaaagaaacaggacccaaacaggaagagaauuugacaugcaugacuaccaaagaaacugaauugggaacaccaagcuaucugcuguugaacaagagucuauguaauguugaggggugggucgugauagcaaaagacaaugcaguaagauuuggggaaagugagcaaaucauuauuaccagagaaccauacguaucaugugacccaaauggaugcaaaauguaugcccugcaucaagggacuaccauuaggaacaaacauucaaacggaacaauucacgacagaacagccuucagaggucucaucuccacuccauugggcacuccaccaaccguaaguaauagugauuuuauauguguuggauggucaagcacaacuugccaugauggaauuggcagaaugacuaucuguauacaagggaauaaugacaaugccacagcaacgguuuauuauaacagaaggcugaccacuaccauuaagaccugggcuagaaacauucugaggacucaagagucagaaugugugugccacaacggcacaugugcaguuguaaugaccgaugggucggcuaguaaucaagcccauacaaaaguaauguauuuccacaagggguugguaguuaaggaggaggcauugaagggaucggccaaacauauugaggagugcuccuguuacgggcacaaucaaaaggugaccugugugugcagagauaauuggcagggagcaaacagaccuauuauagaaauugacaugaacacauuggaacacacaaguagauaugugugcaccggaauucucaccgauacuagcagacccggggacaaaccuacuggugauuguuccaauccaauaacuggaaguccuggcgcuccgggagugaagggauuuggauuucuaaauggggauaauacauggcuugguaggaccaucagucccagaucaagaaguggauuugaaaugcugaaaauaccuaacgcagguauugaucccaauucuagaauaacugagcggcaggaaauugucgacaacagcaauuggucaggcuauuccggaagcuuuauugacuauuggaaugauaacagugaguguuacaauccauguuucuacguagaguuaauuagagggagaccugaagaggcuaaauaugugugguggacaaguaacagucuaauugcccuauguggaagcccauucccaguuggguccgguuccuuccccgauggggcacagauccaauacuuuucguaa

SEQ ID NO: 55674 - RNA, 1356 nt, Artificial Sequence; identical to SEQ ID NO: 55657
  derived and/or modified CDS sequence (wt) from neuraminidase__InfluenzaA__AGQ81909

SEQ ID NO: 55675 - RNA, 1356 nt, Artificial Sequence
  derived and/or modified CDS sequence (wt) from neuraminidase__InfluenzaA__AGQ81910
augaauccaaaucagaaacuauucgcauuauccggaguggcaauagcgcuuaguguacugaacuuauugauaggacucucaaaugucggauugaauguaucucuacaucuaaaagaaacaggacccaaacaggaagagaauuugacaugcaugacuaccaaagaaacugaauugggaacaccaagcuaucugcuguugaacaagagucuaugcaauguugaggggugggucgugauagcaaaagacaaugcaguaagauuuggggaaagugagcaaaucauuauuaccagagaaccauacguaucaugugacccaaauggaugcaaaauguaugccuugcaucaagggacuaccauuaggaacaaacauucaaacggaacaauucacgacagaacagccuucaggggucucaucuccacuccauugggcacuccaccaaccguaaguaauagugauuuuauauguguuggauggucaagcacaacuugccaugauggaauuggcagaaugacuaucuguauacaagggaauaaugacaaugcuacagcaacgguuuauuauaacagaaggcugaccacuaccauuaagaccugggcuagaaacauucugaggacucaagagucagaaugugugugccacaacggcacaugugcaguuguaaugaccgaugggucggcuaguggucaagcccauacaaaaguaauguauuuccacaagggguugguaguuaaggaggaggcauugaagggaucggccaaacauauugaggaaugcuccuguuacgggcacaaucaaaaggugaccugugugugcagagauaauuggcagggagcaaacagaccuauuauagaaauugacaugaacacauuggaacacacaaguaguuaugugugcaccggaauucucaccgauacuagcagacccggggacaaaccuacuggugauuguuccaauccaauaacuggaaguccuggcgcuccgggagugaagggauuuggauuucuaaauggggauaauacauggcuugguaggaccaucagucccagaucaagaaguggauuugaaaugcugaaaauaccuaacgcagguauugaucccaauucuagaauagcugagcggcaggaaauugucgacaacagcaauuggucaggcuauuccggaagcuuuauugacuauuggaaugauaacagugaguguuacaauccauguuucuacguagaguuaauuagagggagacccgaagaggcuaaauaugugugguggacaaguaacagucuaauugcccuauguggaagcccauucccaguuggguccgguuccuuccccgauggggcacagauccaauacuuuucguaa

SEQ ID NO: 55676 - RNA, 1356 nt, Artificial Sequence
  derived and/or modified CDS sequence (wt) from neuraminidase__InfluenzaA__AGQ81911
augaauccaaaucagaaacuauucgcauuauccggaguggcaauagcgcuuaguguacugaacuuauugauaggacucucaaaugucggauugaauguaucucuacaucuaaaagaaacaggacccaaacaggaagagaauuugacaugcaugacuaccaaagaaacugaauugggaacaccaagcuaucugcuguugaacaagagucuaugcaauguugaggggugggucgugauagcaaaagacaaugcaguaagauuuggggaaagugagcaaaucauuauuaccagagaaccauacguaucaugugacccaaauggaugcaaaauguaugccuugcaucaagggacuaccauuaggaacaaacauucaaacggaacaauucacgacagaacagccuucaggggucucaucuccacuccauugggcacuccaccaaccguaaguaauagugauuuuauauguguuggauggucaagcacaacuugccaugauggaauuggcagaaugacuaucuguauacaagggaauaaugacaaugcuacagcaacgguuuauuauaacagaaggcuaaccacuaccauuaagaccugggcuagaaacauucugaggacucaagagucagaaugugugugccacaacggcacaugugcaguuguaaugaccgaugggucggcuaguggucaagcccauacaaaaguaauguauuuccacaagggguugguaguuaaggaggaggcauugaagggaucggccaaacauauugaggaaugcuccuguuacgggcacaaucaaaaugugaccugugugugcagagauaauuggcagggagcaaacagaccuauuauagaaauugacaugaacacauuggaacacacaaguagauaugugugcaccggaauucucaccgauacuagcagacccggggacaaaccuacuggugauuguuccaauccaauaacuggaaguccuggcgcuccgggagugaagggauuuggauuucuaaauggggauaauacauggcuugguaggaccaucagucccagaucaagaaguggauuugaaaugcugaaaauaccuaacgcagguauugaucccaauucuagaauagcugagcggcaggaaauugucgacaacagcaauuggucaggcuauuccggaagcuuuauugacuauuggaaugauaacagugaguguuacaauccauguuucuacguagaguuaauuagagggagacccgaagaggcuaaauaugugugguggacaaguaacagucuaauugcccuauguggaagcccauucccaguuggguccgguuccuuccccgauggggcacagauccaauacuuuucguaa

SEQ ID NO: 55677 - RNA, 1356 nt, Artificial Sequence; identical to SEQ ID NO: 55667
  derived and/or modified CDS sequence (wt) from neuraminidase__InfluenzaA__AGQ81912

SEQ ID NO: 55678 - RNA, 1356 nt, Artificial Sequence
  derived and/or modified CDS sequence (wt) from neuraminidase__InfluenzaA__AGQ81913
augaauccaaaucagaaacuauucgcauuauccggaguggcaauaacgcuuaguguacugaacuuauugauaggacucucaaaugucggauugaauguaucucuacaucuaaaagaaacaggacccaaacaggaagagaauuugacaugcaugacuaccaaagaaacugaauugggaacaccaagcuaucugcuguugaacaagagucuaugcaauguugaggggugggucgugauagcaaaagacaaugcaguaagauuuggggaaagugagcaaaucauuauuaccagagaaccauacguaucaugugacccaaauggaugcaaaauguaugccuugcaucaagggacuaccauuaggaacaaacauucaaacggaacaauucacgacagaacagccuucaggggucucaucuccacuccauugggcacuccaccaaccguaaguaauagugauuuuauauguguuggauggucaagcacaacuugccaugauggaauuggcagaaugacuaucuguauacaagggaauaaugacaaugcuacagcaacgguuuauuauaacagaaggcugaccacuaccauuaagaccugggcuagaaacauucugaggacucaagagucagaaugugugugccacaacggcacaugugcaguuguaaugaccgaugggucggcuaguggucaagcccauacaaaaguaauguauuuccacaagggguugguaguuaaggaggaggcauugaagggaucggccaaacauauugaggaaugcuccuguuacgggcacaaucaaaaggugaccugugugugcagagauaauuggcagggagcaaacagaccuauuauagaaauugacaugaacacauuggaacacacaaguagauaugugugcaccggaauucucaccgauacuagcagacccggggacaaaccuacuggugauuguuccaauccaauaacuggaaguccuggcgcuccgggagugaagggauuuggauuucuaaauggggauaauacauggcuugguaggaccaucagucccagaucaagaaguggauuugaaaugcugaaaauaccuaacgcagguauugaucccaauucuagaauagcugagcggcaggaaauugucgacaacagcaauuggucaggcuauuccggaagcuuuauugacuauuggaaugauaacagugaguguuacaauccauguuucuacguagaguuaauuagagggagacccgaagaggcuaaauaugugugguggacaaguaacagucuaauugcccuauguggaagcccauucccaguuggguccgguuccuuccccgauggggcacagauccaauacuuuucguaa

SEQ ID NO: 55679 - RNA, 1356 nt, Artificial Sequence; identical to SEQ ID NO: 55655
  derived and/or modified CDS sequence (wt) from neuraminidase__InfluenzaA__AGQ81914

SEQ ID NO: 55680 - RNA, 1356 nt, Artificial Sequence; identical to SEQ ID NO: 55659
  derived and/or modified CDS sequence (wt) from neuraminidase__InfluenzaA__AGQ81915

SEQ ID NO: 55681 - RNA, 1416 nt, Artificial Sequence
  derived and/or modified CDS sequence (wt) from neuraminidase__InfluenzaA__AGQ81917
augaauccaaaucagaaacuauucgcauuauccggaguggcaauagcgcuuaguguacugaacuuauugauaggacucucaaaugucggauugaauguaucucuacaucuaaaagaaacaggacccaaacaggaagagaauuuaacaugcaugaccauuaaucaaaacaacaccacuguaguagaaaacacauacguaaauaauacaacaauaauuaccaaagaaacugaauuggaaacaccaaacuaucugcuguugaacaaaagucuauguaauguugagggguggguagugguagcaaaagacaaugcaguaagauuuggggaaagugagcaaaucauuguuaccagagaaccauacguaucaugugacccaaauggaugcaaaauguaugccuugcaccaagggacuaccauuaggaacaaacauucaaauggaacaauucaugacagaacagcuuucaggggucucaucuccacuccauugggcacuccaccaaccguaaguaauagugauuuuauauguguuggauggucaagcacaacuugccaugauggaauuggcagaaugacuaucuguauacaggggaauaaugacaaugcuacagcaacgguuuauuauaacagaaggcugaccacuaccauuaaaaccugggccagaaacauucugaggacucaagagucagaaugugugugccacaacggcacaugugcaguuguaaugaccgaugggucggcuaguagucaagcccauacaaaaguaauguauuuccacaagggauugguaauuaaagaggaggcauuaaagggaucagccaaacauauugaggaaugcuccuguuacgggcacaaucaaaaggugaccugugugugcagagauaauuggcagggagcaaacagaccuaucauagaaauugacaugaacacauuggaacacacaaguagauaugugugcaccggaauucucaccgauacuagcaggcccggggacaaaccuacuggugauuguuccaauccaauaacuggaaguccuggcgcuccgggagugaagggauuuggauuucuaaauggggauaauacauggcuugguaggaccaucagucccagaucaagaaguggauuugaaauguugaaaauaccuaaugcagguauugaucccaauucuagaauagcugagcggcaagaaauugucgacaacagcaauuggucaggcuauuccggaagcuuuauugacuauuggaaugauaacagugaguguuacaauccauguuucuacguagaguuaauuagaggaagacccgaggaggcuaaauaugugugguggacaaguaacagucuaauugcccuauguggaagcccauucccaguuggguccgguuccuuccccgauggggcacagauccaauacuuuucguaa

SEQ ID NO: 55682 - RNA, 1356 nt, Artificial Sequence
  derived and/or modified CDS sequence (wt) from neuraminidase__InfluenzaA__AGQ81918
augaauccaaaucagaaacuauucgcauuauccggaguggcaauagcgcuuaguguacugaacuuauugauaggacucucaaaugucggauugaauguaucucuacaucuaaaagaaacaggacccaaacaggaagagaauuugacaugcaugacuaccaaagaaacugaauugggaacaccaagcuaucugcuguugaacaagggucuauguaauguugaggggugggucgugauagcaaaagacaaugcaguaagauuuggggaaagugagcaaaucauuauuaccagagaaccauacguaucaugugacccaaauggaugcaaaauguaugccuugcaucaagggacuaccauuaggaacaaacauucaaacggaacaauucacgacagaacagccuucagaggucucaucuccacuccauugggcacuccaccaaccguaaguaauagugauuuuauauguguuggauggucaagcacaacuugccaugauggaauuggcagaaugacuaucuguauacaagggaauaaugacaaugccacagcaacgguuuauuauaacagaaggcugaccacuaccauuaagaccugggcuagaaacauucugaggacucaagagucagaaugugugugccacaacggcacaugugcaguuguaaugaccgaugggucggcuaguagucaagcccauacaaaaguaauguauuuccacaagggguugguaguuaaggaggaggcauugaagggaucggccaaacauauugaggagugcuccuguuacgggcacaaucaaaaggugaccugugugugcagagauaauuggcagggagcaaacagaccuauuauagaaauugacaugaacacauuggaacacacaaguagauaugugugcaccggaauucucaccgauacuagcagacccggggacaaaccuacuggugauuguuccaauccaauaacuggaaguccuggcgcuccgggagugaagggauuuggauuucuaaauggggauaauacauggcuugguaggaccaucagucccagaucaagaaguggauuugaaaugcugaaaauaccuaacgcagguauugaucccaauucuagaauagcugagcggcaggaaauugucgacaacagcaauuggucaggcuauuccggaagcuuuauugacuauuggaaugauaacagugaguguuacaauccauguuucuacguagaguuaauuagagggagaccugaagaggcuaaauaugugugguggacaaguaacagucuaauugcccuauguggaagcccauucccaguuggguccgguuccuuccccgauggggcacagauccaauacuuuucguaa

SEQ ID NO: 55683 - RNA, 1356 nt, Artificial Sequence
  derived and/or modified CDS sequence (wt) from neuraminidase__InfluenzaA__AGQ81919
augaauccaaaucagaaacuauucgcauuauccggaguggcaauagcgcuuaguguacugaacuuauugauaggacucucaaaugucggauugaauguaucucuacaucuaaaagaaacaggacccaaacaggaagagaauuugacaugcaugacuaccaaagaaacugaauugggaacaccaagcuaucugcuguugaacaagagucuauguaauguugaagggugggucgugauagcaaaagacaaugcaguaagauuuggggaaagugagcaaaucauuauuaccagagaaccauacguaucaugugacccaaauggaugcaaaauguaugccuugcaucaagggacuaccauuaggaacaaacauucaaacggaacaauucacgacagaacagccuucagaggucucaucuccacuccauugggcacuccaccaaccguaaguaauagugauuuuauauguguuggauggucaagcacaacuugccaugauggaauuggcagaaugacuaucuguauacaagggaauaaugacaaugcuacagcaacgguuuauuauaacagaaggcugaccacuaccauuaagaccugggcuagaaacauucugaggacucaagagucagaaugugugugccacaacggcacaugugcaguuguaaugaccgaugggucggcuaguagucaagcccauacaaaaguaauguauuuccacaagggguugguaguuaaggaggaggcauugaagggaucggccaaacauauugaggagugcuccuguuacgggcacaaucaaaaggugaccugugugugcagagauaauuggcagggagcaaacagaccuauuauagaaauugacaugaacacauuggaacacacaaguagauaugugugcaccggaauucucaccgauacuagcagacccggggacaaaccuacuggugauuguuccaauccaauaacuggaaguccuggcgcuccgggagugaagggauuuggauuucuaaauggggauaauacauggcuugguaggaccaucagucccagaucaagaaguggauuugaaaugcugaaaauaccuaacgcagguauugaucccaauucuagaauagcugagcggcaggaaauugucgacaacagcaauuggucaggcuauuccggaagcuuuauugacuauuggaaugauaacagugaguguuacaauccauguuucuacguagaguuaauuagagggagacccgaagaggcuaaauaugugugguggacaaguaacagucuaauugcccuauguggaagcccauucccaguuggguccgguuccuuccccgauggggcacagauccaauacuuuucguaa

SEQ ID NO: 55684 - RNA, 1356 nt, Artificial Sequence; identical to SEQ ID NO: 55665
  derived and/or modified CDS sequence (wt) from neuraminidase__InfluenzaA__AGQ81920

SEQ ID NO: 55685 - RNA, 1356 nt, Artificial Sequence
  derived and/or modified CDS sequence (wt) from neuraminidase__InfluenzaA__AGQ81921
augaauccaaaucagaaacuauucgcauuauccggaguggcaauagcgcuuaguguacugaacuuauugauaggacucucaaaugucggauugaauguaucucuacaucuaaaagaaacaggacccaaacaggaagagaauuugacaugcaugacuaccaaagaaacugaauugggaacaccaagcuaucugcuguugaacaagagucuaugcaauguugaggggugggucgugauagcaaaagacaaugcaguaagauuuggggaaagugagcaaaucauuauuaccagagaaccauacguaucaugugacccaaauggaugcaaaauguaugccuugcaucaagggacuaccauuaggaacaaacauucaaacggaacaauucacgacagaacagccuucaggggucucaucuccacuccauugggcacuccaccaaccguaaguaauagugauuuuauauguguuggauggucaagcacaacuugccaugauggaauuggcagaaugacuaucuguauacaagggaauaaugacaaugcuacagcaacgguuuauuauaacagaaggcugaccacuaccauuaagaccugggcuagaaacauucugaggacucaagagucagaaugugugugccacaacggcacaugugcaguuguaaugaccgaugggucggcuaguggucaagcccauacaaaaguaauguauuuccacaagggguugguaguuaaggaggaggcauugaagggaucggccaaacauauugaggaaugcuccuguuacgggcacaaucaaaaggugaccugugugugcagagauaauuggcagggagcaaacagaccuauuauagaaauugacaugaacacauuggaacacacaaguagauaugugugcaccggaauucucaccgauacuagcagacccggggacaaaccuacuggugauuguuccaauccaauaacuggaaguccuggcgcuccgggagugaagggauuuggauuucuaaauggggauaauacauggcuugguaggaccaucagucccagaucaagaaguggauuugaaaugcugaaaauaccuaacgcagguauugaucccaauucuagaauagcugagcggcaggaaauugucgacaacagcaauuggucaggcuauuccggaagcuuuauugacuauuggaaugauaacagugaguguuacaauccauguuucuacguagaguuaauuagagggagacccgaagaggcuaaauaugugugguggacaaguaacagucuaauugcccuauguggaagcccauucccaguuggguccgguuccuuccccgauggggcacagauccaauacuuuucguaa

SEQ ID NO: 55686 - RNA, 1356 nt, Artificial Sequence; identical to SEQ ID NO: 55667
  derived and/or modified CDS sequence (wt) from neuraminidase__InfluenzaA__AGQ81922

SEQ ID NO: 55687 - RNA, 1356 nt, Artificial Sequence; identical to SEQ ID NO: 55685
  derived and/or modified CDS sequence (wt) from neuraminidase__InfluenzaA__AGQ81923

SEQ ID NO: 55688 - RNA, 1356 nt, Artificial Sequence
  derived and/or modified CDS sequence (wt) from neuraminidase__InfluenzaA__AGQ81924
augaauccaaaucagaaacuauucgcauuauccggaguggcaauagcgcuuaguguacugaacuuauugauaggacucucaaaugucggauugaauguaucucuacaucuaaaagaaacaggacccaaacaggaagagaauuugacaugcaugacuaccaaagaaacugaauugggaacaccaagcuaucugcuguugaacaagagucuaugcaauguugaggggugggucgugauagcaaaagacaaugcaguaagauuuggggaaagugagcaaaucauuauuaccagagaaccauacguaucaugugacccaaauggaugcaaaauguaugccuugcaucaagggacuaccauuaggaacaaacauucaaacggaacaauucacgacagaacagccuucaggggucucaucuccacuccauugggcacuccaccaaccguaaguaauagugauuuuauauguguuggauggucaagcacaacuugccaugauggaauuggcagaaugacuaucuguauacaagggaauaaugacaaugcuacagcaacgguuuauuauaacagaaggcugaccacuaccauuaagaccugggcuagaaacauucugaggacucaagagucagaaugugugugccacaacggcacaugugcaguuguaaugaccgaugggucggcuaauagucaagcccauacaaaaguaauguauuuccacaagggguugguaguuaaggaggaggcauugaagggaucggccaaacauauugaggaaugcuccuguuacgggcacaaucaaaaggugaccugugugugcagagauaauuggcagggagcaaacagaccuauuauagaaauugacaugaacacauuggaacacacaaguagauaugugugcaccggaauucucaccgauacuagcagacccggggacaaaccuacuggugauuguuccaauccaauaacuggaaguccuggcgcuccgggagugaagggauuuggauuucuaaauggggauaauacauggcuugguaggaccaucagucccagaucaagaaguggauuugaaaugcugaaaauaccuaacgcagguauugaucccaauucuagaauagcugagcggcaggaaauugucgacaacagcaauuggucaggcuauuccggaagcuuuauugacuauuggaaugauaacagugaguguuacaauccauguuucuacguagaguuaauuagagggagacccgaagaggcuaaauaugugugguggacaaguaacagucuaauugcccuauguggaagcccauucccaguuggguccgguuccuuccccgauggggcacagauccaauacuuuucguaa

SEQ ID NO: 55689 - RNA, 1356 nt, Artificial Sequence; identical to SEQ ID NO: 55667
  derived and/or modified CDS sequence (wt) from neuraminidase__InfluenzaA__AGQ81925

SEQ ID NO: 55690 - RNA, 1356 nt, Artificial Sequence; identical to SEQ ID NO: 55667
  derived and/or modified CDS sequence (wt) from neuraminidase__InfluenzaA__AGQ81926

SEQ ID NO: 55691 - RNA, 1356 nt, Artificial Sequence; identical to SEQ ID NO: 55667
  derived and/or modified CDS sequence (wt) from neuraminidase__InfluenzaA__AGQ81927

SEQ ID NO: 55692 - RNA, 1356 nt, Artificial Sequence; identical to SEQ ID NO: 55667
  derived and/or modified CDS sequence (wt) from neuraminidase__InfluenzaA__AGQ81928

SEQ ID NO: 55693 - RNA, 1356 nt, Artificial Sequence; identical to SEQ ID NO: 55665
  derived and/or modified CDS sequence (wt) from neuraminidase__InfluenzaA__AGQ81929

SEQ ID NO: 55694 - RNA, 1413 nt, Artificial Sequence
  derived and/or modified CDS sequence (wt) from neuraminidase__InfluenzaA__AGQ81930
augaauccaaaucaaaaaauaauaaccauuggcuccauaucauuaggauugguuguauucaauguucugcugcaugucguaagcaucauagugacaguauuaguccuugggagagguggaaacagcgggaucuguaacgagacaguagugagggaauacaaugagacagucaggauagagaagauaacucaauggcacaauacuaguguggucgaauacgugccauauuggagugaaggcaauuacaugaauaauacagaggcaauaugugaugucaagggcuuugcaccuuucuccaaagacaaugggauaagaauugguuccagaggacauguuuuugucauaagggagcccuucgucucuuguucgcccacggaaugcagaacuuucuuccucacucagggguccuugcucaaugacaaacacucaaauggaacagugaaagauagaagcccauucaggacucucaugagcgucgaagugggccaaucacccaauguuuaucaagccagauuugaagcuguggcguggucagcaacugccugccaugaugggaagaaguggaugacaauugguguaacagggccggauuccaaggcaguagcaguaguucauuauggaggggugccuacugaugucgucaauuccugggcaggggauauauuaaggacccaagaaucauccugcacuugcauucaagguaauugcuauugggugaugacugacggucccgccaauaggcaggcacaguauaggauauacaaagcaaaucaggguaaaauaguuggccaaacggauaucagcuuuaauggaggacauauugaagaguguucuugcuacccuaaugaugggaaaguggaaugcguauguagagacaauuggacaggaaccaacaggccuguacugguuaucucaccggaucucucuuacagaguuggguauuuaugugcagggcugcccagcgauacuccaagaggggaagaugcccaauuuacugggucaugcacuagccccauggggaaucagggguaugguguaaaaggcuucggauuucggcagggaaccgauguauggauggggcgaacgauuagucgaaccuccagaucaggauuugagauacuaagaauaaagaacgguuggacacagacgaguaaagagcagguuaggaagcaaguaguuguugacaauuugaacuggucgggguacagugggucuuucacccugccaguagaauugucuggaaaagauugcuuggucccuuguuuuuggguugaaaugaucaggggcaagccagaagagaaaacaaucuggacuuccagcagcuccauugugauguguggaguugauuaugaaguugccgauuggucauggcacgauggagcuauucuucccuuugacaucgauaagauguaa

SEQ ID NO: 55695 - RNA, 1413 nt, Artificial Sequence
  derived and/or modified CDS sequence (wt) from neuraminidase__InfluenzaA__AGQ81931
augaauccaaaucagaaaauaauaaccauugggucacuauccuuagggcuaguaguccuuaacauccuccuacauauaauuaguauuacaauaacaguguuaguuauaccuagaaauggaaacacugggaguugcaaugaaacagucauuagggaauacaacgaaacaguaagaauugagaaaauaacacaguggcacaauaccaacaucauugaguauauagagaaaccagagaaugaucuuuucaugaacaacacgggaccguugugugaugcuaaggguuuugcacccuucuccaaagacaacggaauaaggauugggucaaaaggucauguuuuuguuauaagggagccauuuguuucuugcucgccaacagagugcaggacguucuuccuuacucaagguucccuacucaaugacaaacacuccaauggcacagugaaagaccgaagccccuauagaacccuaaugagcguagaaauaggacaaucacccaauguguaccaggcaagguuugaggcaguagcguggucagcuacugcaugucaugaugggaagaaauggaugacaauuggaguaacuggcccugaugccaaagcaguagcaguggugcauuaugggggaauucccacugauguaauuaacucuugggccggagauauucuaaggacccaggaaucaucaugcacuugcauucaaggugaguguuauugggugaugacagaugggccagcaaacagacaagcacaauacagagcauucaaggccaagcagggaaagauaauugggcaaacugagaucaguuucaaugggggucauauagaagaaugcucaugcuacccaaaugaggguaaaguggaguguguuugcagggacaacuggacuggaaccaacaggccaguauuggugauuucuucagaucugucuuacagaguaggauacuuaugugcaggccucccuagugacacuccaagaggagaagauagccaguucacgggaucaugcacuagucccaugggaaaccagggguauggaguuaagggguucggauucagacaaggcaaugauguauggauggggaggaccauuagcaggacaucaaggucaggguuugaaauccugaaaaucagaaauggcuggauacaaaauaguaaagaacagaucaaaaggcaaguuguggucgauaacucaaauuggucaggauacagugguuccuuuacacuaccaguagaguuaacaagaagaaauugucugguuccauguuuuuggguugagaugauaaggggcaagccagaagaaaagacaauauggaccucaaguagcuccauugugauguguggaguagaccaugagauugccaacuggucguggcacgauggagcuauucuuccuuuugacaucgauaagauguaa

SEQ ID NO: 55696 - RNA, 1413 nt, Artificial Sequence
  derived and/or modified CDS sequence (wt) from neuraminidase__InfluenzaA__AGQ81932
augaauccaaaucaaaaaauaauaaccauuggcuccauaucauuaggauugguuguauucaauguccugcugcaugucgugagcaucauagugacaguauuaauccuuggaagagguggaaacaacgggaucuguaacgagacaguagugagggaauacaaugagacagucaggauagagaagauaacucaauggcacaauacuaguguggucgaauacgugccguauuggaaugaaggcacuuacaugaauaauacagaagcaauaugugaugucaaaggcuuugcaccuuucuccaaagacaaugggauaagaauugguuccaggggacauguuuuuguuauaagggagcccuucgucucuuguucgcccacggaaugcagaacuuucuuccucacucaggggucuuugcucaaugacaaacacucaaauggaacagugaaagauagaagcccauucaggacucucaugagugucgaagugggccaaucacccaauguuuaucaagccagauuugaagcuguggcguggucagcaacugccugccaugaugggaagaaguggaugacaauugguguaacagggucagauuccaaggcaguagcaguaguucauuauggaggggugccuacugaugucgucaauuccugggcaggggauauauuaaggacccaagaaucauccugcacuugcauucaagguaauugcuauugggugaugacugacggucccgccaauaggcaggcacaguauaggauauacaaagcaaaucaggguaaaguaauuggccaaacggauaucagcuuuaauggaggacauauugaagaauguucuugcuacccuaaugaugggaaaguggaaugcguauguagagacaauuggacagggaccaacaggccuguacugguuaucucaccggaucucucuuacagaguuggguauuuaugugcagggcugccuagugauacuccaagaggggaagaugcccaauuuacugggucaugcacuagccccauggggaaucagggguaugguguaaaaggcuucggauuucggcagggaacugauguauggauggggcggacaauuagucaaaccuccaggucaggauuugagauacuaagaguaaaaaacgguuggacacagacgaguaaagagcagguuaggaaacagguaguuguugauaauuugaacuggucgggguacagugggucuuucacccugccaauagaauugucuggaaaagauugcuugguaccuuguuuuuggguugaaaugaucaggggcaagccggaagagaaaucaauuuggacuuccagcagcuccauugugauguguggaguugauuaugaaguugccgauuggucauggcacgauggagcuauucuucccuuugacaucgauaagauguaa

SEQ ID NO: 55697 - RNA, 1413 nt, Artificial Sequence
  derived and/or modified CDS sequence (wt) from neuraminidase__InfluenzaA__AGQ81934
augaauccaaaucagaagauucuaugcacuucagccacugcuaucguaauaggcacaaucgcaguacucauaggaauagcaaaccuaggguuaaacauaggacugcaucuaaaaccgagcugcaauugcucacacucacaaccugaaacaaccaacacaagccaaacaauaauaaacaacuauuauaaugaaacaaauaucacccaaauaaguaacaccaacauucaaauggaagaaagagcaagcagagauuucaauaacuugacuaaagggcucuguacuauaaauucauggcacauauaugggaaagacaaugcaguaagaauuggagagaacucagauguuuuagucacaagagaacccuauguuucaugcgacccagaugaaugcagguucuaugcucucagccaaggaacaacaaucagagggaaacacucaaacggaacgauacacgauaggucccaauaccgcgcccugauaagcuggccacuaucaucaccgcccacaguauacaauagcaggguggaaugcauuggguggucaaguacuaguugccaugauggcaaguccaggaugucaauauguauaucaggaccaaacaacaaugcaucugcaguaguaugguacaacagaaggccuguugcagaaauuaacacaugggcccgaaauauacuaagaacacaggaaucugaauguguaugccacaacgguguaugcccaguaguguucacagaugggucugccacuggaccugcagacacaagaauauacuauuucaaagagggaagaauauugaaaugggaaucucugacuggaacugcuaagcauauugaagaaugcucauguuacggggaacgaacaggaauuaccugcacaugcagagacaauuggcagggaucaaauagaccaguaauccgaauagauccaguggcaaugacacauacuagucaguauauaugcagcccuguucucacagacaauccccggccgaaugacccaaauguagguaaguguaacgacccuuauccagguaauaauaacaauggagucaaaggguucucauaccuagauggagucaacacuuggcuagggagaacaauaagcacagcuucgaggucuggguaugagaugcuaaaagugccaaaugcauugacagaugauagaucaaagcccauucaaggucagaccauuguauuaaacacugacuggagcgguuacaguggaucuuucauggacuauugggcugagggggacugcuaucgagcguguuuuuacguggaguugauacguggaagacccaaggaggauaaagugugguggaccagcaauaguauaguaucgauguguuccaguacagaauuccugggacaaugggacuggccugauggggcuaaaauagaguacuuccucuaa

SEQ ID NO: 55698 - RNA, 1413 nt, Artificial Sequence; identical to SEQ ID NO: 55697
  derived and/or modified CDS sequence (wt) from neuraminidase__InfluenzaA__AGQ81935

SEQ ID NO: 55699 - RNA, 1413 nt, Artificial Sequence; identical to SEQ ID NO: 55697
  derived and/or modified CDS sequence (wt) from neuraminidase__InfluenzaA__AGQ81936

SEQ ID NO: 55700 - RNA, 1413 nt, Artificial Sequence; identical to SEQ ID NO: 55697
  derived and/or modified CDS sequence (wt) from neuraminidase__InfluenzaA__AGQ81937

SEQ ID NO: 55701 - RNA, 1413 nt, Artificial Sequence; identical to SEQ ID NO: 55697
  derived and/or modified CDS sequence (wt) from neuraminidase__InfluenzaA__AGQ81938

SEQ ID NO: 55702 - RNA, 1413 nt, Artificial Sequence; identical to SEQ ID NO: 55697
  derived and/or modified CDS sequence (wt) from neuraminidase__InfluenzaA__AGQ81939

SEQ ID NO: 55703 - RNA, 1413 nt, Artificial Sequence
  derived and/or modified CDS sequence (wt) from neuraminidase__InfluenzaA__AGQ81940
augaauccaaaucagaagauucuaugcacuucagccacugcuaucauaauaggcgcaaucgcaguacucauaggaauagcaaaucuaggguugaacauaggacugcaucuaaaaccgagcugcaauugcucacacucacaaccugaaacaaccaacacaagccaaacaauaauaaacaacuauuauaaugaaacaaacaucacccaaauaaguaacaccaacauccaaauggaagagagagcaagcaaggguuucaauaacuuaacuaaagggcucuguacuauaaauucauggcacauauaugggaaagacaaugcaguaagaauuggagagagcucggauguuuuagucacaagagaacccuauguuucaugcgacccagaugaaugcagguucuaugcucucagccaaggaacaacaaucagagggaaacacucaaacggaacaauacacgauaggucccaguaucgcgcccugauaagcuggccacuaucaucaccgcccacaguguacaacagcaggguggaaugcauuggguggucaaguacuaguugccaugaugguaaauccaggaugucaauauguauaucaggaccaaacaacaaugcaucugcaguagugugguacaacagaaggccuguugcagaaauuaacacaugggcccgaaacauacuaagaacacaggaaucugaaugcgugugccacaacgguguaugcccaguaguguucaccgaugggucugccacuggaccugcagacacaagaauauacuauuucaaagagggaaaaauauugaaaugggagucucuggcuggaacugcuaagcauauugaagaaugcucauguuacggggaacgaacaggaauuaccugcacaugcagggacaauuggcagggcucaaauagaccaguaauucagauagauccaguagcaaugacacacacuagucaguauauaugcaguccuguucuuacagacaauccccgaccgaaugacccaaauauagguaaguguaaugacccuuauccagguaauaauaacaauggagucaagggguucucauaccuggauggggccaacacuuggcuagggaggacaauaagcacagccucgaggucuggauacgagaugcuaaaagugccaaaugcauugacagaugauagaucaaagcccauucaaggucagacaauuguauuaaacacugacuggagugguuacaguggaucuuucauggacuauugggcugagggggacugcuaucgagcguguuuuuauguggaguugauacguggaagacccaaggaggauaaagugugguggaccagcaauaguauaguaucgauguguuccaguacagaauuccugggacaauggaacuggccugauggggcuaaaauagaguacuuccucuaa

SEQ ID NO: 55704 - RNA, 1413 nt, Artificial Sequence
  derived and/or modified CDS sequence (wt) from neuraminidase__InfluenzaA__AGQ81941
augaauccaaaucagaagauucuaugcacuucagccacugcuaucauaauaggcacaaucgcagugcucauaggaguagcaaaucuaggguugaacauaggacugcaucuaaaaccggguugcaauugcucacacucacaaccugaagcaaccaacacaagccaaacaauaauaaacaacuauuauaaugaaacaaauaucacccaaauaaguaacacaaacauccaaauggaagagagaccaaacagggguuucaauaacuuaaccaaagggcucuguacuauaaauucauggcacauauaugggaaagacaaugcaguaagaauuggagagaacucagauguuuuaguuacaagagaacccuauguuucaugcgacccagaugaaugcagguucuaugcucucagccaaggaacaacaaucagagggaaacacucaaacggaacaauacacgauaggucccaguaucgcgcucugauaagcuggccacuaucaucaccgcccacaguauacaacagcaggguggaaugcauuggguggucaaguacuaguugccaugauggcaaauccaggaugucaauauguauaucaggaccaaauaacaaugcaucugcaguaguaugguacaacagaaggccuguugcagaaauuaacacaugggcccgaaacauacuaagaacacaggaaucugaauguguaugccacaacgguguaugcccaguaguguucacagaugggucugccacuggaccugcagacacaagaguauacuauuucagagagggaaaaauauugaaaugggaaucucugacuggaacugcuaggcauauugaagaaugcucauguuacggggaacgaacagggauuaccugcacaugcagagacaauuggcagggcucgaauagaccaguaauucagauagauccaguggcaaugacacacacuagucaauacauaugcaguccuguucucacagacaauccccgaccaaaugacccaaauguagguaaguguaacgacccuuauccagguaauaauaacaauggagucaaaggguucucauaccuggauggggucaacacuuggcuagggaggacaauaagcacagcuucgaggucuggauacgagaugcuaaaagugccaaaugcauuaacagaugauaggucaaagcccauucaaggucagacaaucguauuaaacacugacuggagugguuacaguggaucuuucauggacuauugggcugagggggacugcuaucgagcauguuuuuacguggaguugauacgcggaagacccaaggaggauaaagugugguggaccagcaauaguauaguaucgauguguuccaguacagaguuccugggacaaugggacuggccugauggggcuaaaauagaguacuuccucuaa

SEQ ID NO: 55705 - RNA, 1413 nt, Artificial Sequence
  derived and/or modified CDS sequence (wt) from neuraminidase__InfluenzaA__AGQ81942
augaauccaaaucagaagauucuaugcacuucagccacugcuaucauaauaggcacaaucgcagugcucauaggaguagcaaaucuaggguugaacauaggacugcaucuaaaaccggguugcaauugcucacacucacaaccugaagcaaccaacacaagccaaacaauaauaaacaacuauuauaaugaaacaaauaucacccaaauaaguaacacaaacauccaaauggaagagagaccaagcagggguuucaauaacuuaaccaaagggcucuguacuauaaauucauggcacauauauggaaaagacaaugcaguaagaauuggagagaacucagauguuuuaguuacaagagaacccuauguuucaugcgacccagaugaaugcagguucuaugcucucagccaaggaacaacaaucagagggaaacacucaaacggaacaauacacgauaggucccaguaucgcgcucugauaagcuggccacuaucaucaccgcccacaguauacaauagcaggguggaaugcauuggguggucaaguacuaguugccaugauggcaaauccaggaugucaauauguauaucaggaccaaauaacaaugcaucugcaauaguaugguacaacagaaggccuguugcagaaauuaacacaugggcccgaaauauauuaagaacacaggaaucugaauguguaugccacaacgguguaugcccaguaguguucacagaugggucugccacuggaccugcagacacaagaguauacuauuucagagagggaaaaauauugaaaugggaaucucugacuggaacugcuaggcauauugaagaaugcucauguuacggggaacgaacaggaauuaccugcacaugcagagacaauuggcagggcucgaauagaccaguaauucagauagauccaguggcaaugacacacacuagucaguacauaugcaguccuguucucacagacaauccccgaccaaaugacccaaauguagguaaguguaacgacccuuauccagguaauaauaacaauggaguuaaaggguuuucauaccuggauggggucaacacuuggcuagggaggacaauaagcacagcuucgagaucuggauacgagaugcuaaaagugccaaaugcauuaacagaugauaggucaaagcccauucaaggucagacaaucauauuaaacacugacuggagugguuacaguggaucuuucauggacuauugggcugagggggacugcuaucgagcauguuuuuacguggaguugauacgcggaagacccaaggaggauaaagugugguggaccagcaauaguauaguaucgauguguuccaguacagaguuccugggacaaugggacuggccugauggggcuaaaauagaguacuuccucuaa

SEQ ID NO: 55706 - RNA, 1413 nt, Artificial Sequence
  derived and/or modified CDS sequence (wt) from neuraminidase__InfluenzaA__AGQ81943
augaauccaaaucagaagauucuaugcacuucagccacugcuaucauaauaggcgcaaucgcaguacucauagggauagcaaaccuaggguugaacauaggacugcaucuaaaaccgagcugcaauugcucacacucacaaccugaaacaaccaacacaagccaaacaauaauaaacaacuauuauaaugaaacaaacaucacccaaauaaguaacaccaacauccaaauggaagagagaacaagcagggguuucaauaacuuaacuaaagggcucuguacuauaaauucauggcacauauaugggaaagacaaugcaauaagaauuggagagagcucggauguucuagucacaagagaacccuauguuucaugcgacccagaugaaugcagguucuaugcucucagccaaggaacaacaaucagagggaaacacucaaacggaacaauacacgauaggucccaguaucgcgcccugauaagcuggccacuaucaucaccgcccacaguguacaauagcaggguggaaugcauuggguggucaaguacuaguugccaugauggcaaauccaggaugucaauauguauaucaggaccaaacaacaaugcaucugcaguaguaugguacaacagaaggccuguugcagaaauuaacacaugggcccgaaacauacuaagaacacaggaaucugaaugugugugccacaacggcguaugcccaguaguguucaccgaugggucugccacuggaccugcagacacaagaauauacuauuucaaagaggggagaauauugaaaugggagucucugacuggaacugcuaagcauauugaagaaugcucauguuacggggaacgaacaggaauuaccugcacaugcagggacaauuggcagggcucaaauagaccagugauucagauagauccaguagcaaugacacacacuagucaguauauaugcaguccuguucuuacagacaauccccgaccgaaugacccaaauauagguaaguguaaugacccuuauccagguaauaauaacaauggagucaagggguucucauaccuggauggggcuaacacuuggcuagggaggacaauaagcacagccucgaggucuggauacgagaugcuaaaagugccaaaugcauugacagaugauagaucaaagcccauucaaggucagacaauuguauuaaacacugacuggagugguuacaguggaucuuucauggacuauugggcugagggggacugcuaucgagcguguuuuuauguggaguugauacguggaagacccaaggaggauaaagugugguggaccagcaauaguauaguaucgauguguuccaguacagaauuccugggacaauggaacuggccugauggggcuaaaauagaguacuuccucuaa

SEQ ID NO: 55707 - RNA, 1413 nt, Artificial Sequence; identical to SEQ ID NO: 55697
  derived and/or modified CDS sequence (wt) from neuraminidase__InfluenzaA__AGQ81944

SEQ ID NO: 55708 - RNA, 1413 nt, Artificial Sequence
  derived and/or modified CDS sequence (wt) from neuraminidase__InfluenzaA__AGQ81947
augaauccaaaucagaagauucuaugcacuucagccacugcucucguaauagguacaaucgcaguacucauaggaauagcaaaucuaggguugaauauaggacugcaucuaaaaccgagcugcaauugcucacacucacaaccugaagcaaccaacacaagccaaacaauaauaaacaacuauuacaaugaaacaaauaucacccaaauaagcaacaccaacauucaaauggaagagagagcaagcaggaguuucaauaacuuaacuaaagggcucuguacuauaaacucauggcacauauacgggaaagacaaugcaauaagaauuggagagaacucagauguuuuagucacaagagaacccuauguuucaugcgacccagaugaaugcagguucuaugcucucagccaaggaacaacaaucagagggaaacacucaaauggaacaauacacgauaggucccaguaucgcgcccugauaagcuggccacuaucaucaccgcccacaguauacaauagcaggguggaaugcauuggguggucaagcacuaguugccaugaugguaaauccaggaugucaauaugcauaucaggaccaaacaacaaugcaucugcaguaguaugguacaacagaagaccuguugcagaaauuaacacaugggcccggaacauacuaagaacacaggaaucugaauguguaugccacaacgguguaugcccaguaguguucacagaugggucugccacuggaccugcagacacaagaauauauuauuucaaagagggaaaaauauugaaaugggaaucucugacuggaacugccaagcauauugaggaaugcucauguuacggggaacgaacaggaauuaccugcacauguagagacaauuggcagggcucaaauagaccaguaauucaaauagauccaguggcaaugacacacacuagucaguauauaugcaguccuguucucacagacaauccccgaccaaaugacccaaauguagguaaguguaacgauccuuauccagguaauaauaacaauggagucaaaggguucucauaccuggaugggguuaacacguggcuagggaggacaauaagcacagcuucgaggucuggauaugagaugcuaaaagugccaaaugcauugacagaugauagaucaaagcccauucaaggucaaacaauuguauuaaacacugacuggagugguuacaguggaucuuucauggacuauugggcugagggggacugcuaucgagcguguuucuacguggaguuaauacguggaagacccaaggaggauaaagugugguggaccagcaauaguauaguaucgauguguuccaguacagaauuccugggacaguggaacuggccugauggggcuaaaauagaguacuuccucuaa

SEQ ID NO: 55709 - RNA, 1413 nt, Artificial Sequence
  derived and/or modified CDS sequence (wt) from neuraminidase__InfluenzaA__AGQ81948
augaauccaaaucagaagauucuaugcacuucagccacugcuaucauaauaggcgcaaucgcaguacucauaggaauagcaaaccuaggguugaacauaggacugcaucuaaaaccgagcugcaauugcucacacucacaaccugaaacaaccaacacaagccaaacaauaauaaacaacuauuacaaugaaacaaacaucacccaaauaaguaacaccaacauccaaauggaagagagaacaagcagggguuucaauaacuuaacuaaagggcucuguacuauaaauucauggcacauauaugggaaagacaaugcaauaagaauuggagagagcucggauguuuuagucacaagagaacccuauguuucaugcgacccagaugaaugcagguucuaugcucucagccaaggaacaacaaucagagggaaacauucaaacggaacaauacacgauaggucccaguaucgcgcccugauaagcuggccacuaucaucaccgcccacaguguacaauagcaggguggaaugcauuggauggucaaguacuaguugccaugacggcaaauccaggaugucaauauguauaucaggaccaaacaacaaugcaucugcaguaguaugguacaacagaaggccuguugcagaaauuaacacaugggcccgaaacauacuaagaacacaggaaucugaaugugugugccacaacggcguaugcccaguaguguucaccgaugggucugccacuggaccugcagacacaagaauauacuauuucaaagaggggagaauauugaaaugggagucucugacuggaacugcuaagcauauugaagaaugcucauguuacggggaacgaacaggaauuaccugcacaugcagggacaauuggcagggcucaaauagaccagugauucagauagauccaguagcaaugacacacacuagucaguauauaugcaguccuguucuuacagacaauccccgaccgaaugacccaaacauagguaaguguaaugacccuuauccagguaauaauaacaauggagucaagggguucucauaccuggauggggcuaacacuuggcuagggaggacaauaagcacagccucgaggucuggauacgagaugcuaaaagugccaaaugcauugacagaugauagaucaaagcccauucaaggucagacaauuguauuaaacacugacuggagugguuacaguggaucuuucauggacuauugggcugagggggaaugcuaucgagcguguuuuuauguggaguugauacguggaagacccaaggaggauaaagugugguggaccagcaauaguauaguaucgauguguuccaguacagaauuccugggacaauggaacuggccugauggggcuaaaauagaguacuuccucuaa

SEQ ID NO: 55710 - RNA, 1413 nt, Artificial Sequence
  derived and/or modified CDS sequence (wt) from neuraminidase__InfluenzaA__AGQ81951
augaauccaaaucagaagauucuaugcacuucagccacugcuaucguaauaggcacaaucgcaguacucauaggaguagcaaaucuaggguugaacauagggcugcaucuaaaaccggguugcaauugcucacaaucacaaccugaagcaaccaacacaagccaaacaauaauaaacaacuauuauaaugaaacaaauaucacccaaauaaguaacacgaacauccaaauggaagagagagcaaacagggguuucaacaacuuaaccaaagggcucuguacuauaaauucauggcacauauaugggaaagacaaugcaguaagaauuggagagaacucagauguuuuaguuacaagagaacccuauguuucaugcgauccagaugaaugcagguuuuaugcucucagccaaggaacaacaaucagagggaaacacucaaacggaacaauacacgauaggucccaguaucgcgcucugauaagcuggccacuaucaucaccacccacgguauacaacagcaggguggaaugcauuggguggucaaguacuaguugccaugauggcaaauccaggaugucaauauguauaucaggaccaaacaacaaugcaucugcaguaguaugguacaacagaaggccuguugcagaaauuaacacaugggcccgaaacauacuaagaacacaggaaucugaauguguaugccacaacgguguaugcccaguaguguucacagaugggucugccacuggaccugcagacacaagaguauacuacuucagagagggaaaaauauugaaaugggaaucucugacuggaacugcuaagcauauugaagaaugcucauguuacggggaacgaacaggaauuaccugcacaugcagagacaauuggcagggcucgaauagaccaguaauucagauagauccaguggcaaugacacacacuagucaguacauaugcagcccuguucucacagacaauccccgaccaaaugacccaaauguagguaaguguaacgacccuuauccagguaauaauaacaauggagucaaaggguucucauaccuggauggggucaacacuuggcuagggaggacaauaagcacagcuucgaggucuggauacgagaugcugaaagugccgaaugcauuaacagaugauaggucaaaacccauucaaggucagacaaucguauuaaacacugacuggaguggcuacaguggaucuuucauggacuauugggcugagggggacugcuaucgagcauguuuuuacguggaguugauacgcggaagacccaaggaggauaaagugugguggaccagcaauaguauaguaucgauguguuccaguacagaauuccugggacaauggaacuggccugauggggcuaaaauagaguacuuccucuaa

SEQ ID NO: 55711 - RNA, 1413 nt, Artificial Sequence
  derived and/or modified CDS sequence (wt) from neuraminidase__InfluenzaA__AGQ81952
augaauccaaaucagaagauucuaugcacuucagccacugcuaucguaauaggcacaaucgcaguacucauaggaguagcaaaucuaggguugaacauagggcugcaucuaaaaccggguugcaauugcucacacucacaaccugaagcaaccaacacaagccaaacaauaauaaacaacuauuauaaugaaacaaauaucacccaaauaaguaacacaaacauccaaauggaggagagagcaaacagagguuucaauaacuuaaccaaagggcucuguacuauaaauucauggcacauauaugggaaagacaaugcaguaagaauuggagagaacucagauguuuuaguuacaagagaacccuauguuucaugcgauccagaugaaugcagguucuaugcucucagccaaggaacaacaaucagagggaaacacucaaacggaacaauacacgauaggucccaguaucgcgcucugauaagcuggccacuaucaucaccgcccacaguauacaacagcaggguggaaugcauuggguggucaaguacuaguugccaugauggcaaauccaggaugucaauauguauaucaggaccaaacaacaaugcaucugcaguaguaugguacaacagaaggccuguugcagaaauuaacacaugggcccgaaacauacuaagaacacaggaaucugaauguguaugccacaacgguguaugcccaguaguguucacagaugggucugccacuggaccugcagacacaagaguauacuauuucagagagggaaaaauauugaaaugggaaucccugacuggaacugcuaagcauauugaagaaugcucauguuacggggaacgaacaggaauuaccugcacaugcagagacaauuggcagggcucgaauagaccaguaauucagauagauccaguggcaaugacacacacuagucaguacauaugcaguccuguucucacagacaauccccgaccaaaugacccaaauguagguaaguguaaugacccuuauccagguaauaauaacaauggagucaaaggguucucauaccuggauggggucaacacuuggcuagggaggacaauaagcacagcuucgaggucuggauacgagaugcuaaaagugccaaaugcauuaacagaugauaggucaaagcccauucaaggucagacaaucguauuaaacacugacuggagugguuacaguggaucuuucauggacuauugggcugagggggacugcuaucgagcauguuuuuacguggaguugauacgcggaagacccaaggaggauaaagugugguggaccagcaauaguauaguaucgauguguuccaguacagaauuccugggacaauggaacuggccugauggggcuaaaauagaguacuuccucuaa

SEQ ID NO: 55712 - RNA, 1413 nt, Artificial Sequence
  derived and/or modified CDS sequence (wt) from neuraminidase__InfluenzaA__AGQ81954
augaauccaaaucagaagauucuaugcacuucagccacugcuaucguaauaggcacaaucgcaguacucauaggaguagcaaaucuaggguugaacauaggacugcaucuaaaaccgagcugcaauugcucacacucacaaccugaagcaaccaacacaagccaaacaauaauaaacaacuauuauaaugaaacaaauaucacccaaauaaguaacaccaacauccaaauggaagagagagcaagcagggguuucaauaacuuaaccaaagggcucuguacuauaaauucauggcacauauaugggaaagacaaugcaguaagaauuggagagaacucagauguuuuagucacaagagaacccuauguuucaugcgacccagaugaaugcagguucuaugcucucagccaaggaacaacaaucagagggaaacacucaaacggaacaauacacgauaggucccaguaucgcgcucugauaagcuggccacuaucaucaccgcccacaguauacaacagcaggguggaaugcauuggguggucaaguacuagcugccaugauggcaaauccaggaugucaauauguauaucaggaccaaacaacaaugcaucugcaguaguaugguacaacagaaggccuguugcagaaauuaacacaugggcccgaaacauacuaagaacacaggaaucugaauguguaugccacaacgguguaugcccaguaguuuucacagaugggucugccacugggccugcagacacaagaguauacuauuucaaagagggaaaaauauugaaaugggaaucucugacuggaacugcuaagcauauugaagaaugcucauguuacggggaacgaacaggaauuaccugcacaugcagagacaauuggcagggcucaaauagaccaguaauucagauagauccaguggcaaugacacacacuagucaguauauaugcaguccuguucucacagacaauccccgaccgaaugacccaaauguagguaaguguaacgacccuuauccagguaauaauaacaauggagucaaaggguucucauaccuggaugggguuaacacuuggcuagggaggacaauaagcacagcuucgaggucuggauacgagaugcuaaaagugccaaaugcauuaacagaugauaggucaaagcccauucaaggucagacaaucguauuaaacacugacuggagugguuacaguggaucuuucauggacuauugggcugagggggacugcuaucgagcauguuuuuacguggaguugauacguggaagacccaaggaggauaaagugugguggaccagcaauaguauaguaucgauguguuccaguacagaauuccugggacaauggaacuggccugauggggcuaaaauagaguacuuccucuaa

SEQ ID NO: 55713 - RNA, 1413 nt, Artificial Sequence
  derived and/or modified CDS sequence (wt) from neuraminidase__InfluenzaA__AGQ81956
augaauccaaaucagaagauucuaugcacuucagccacugcuaucguaauaggcacaaucgcaguacucauaggaguagcaaaucuaggguugaacauaggacugcaucuaaaaccgagcugcaauugcucacacucacaaccugaagcaaccaacacaagccaaacaauaauaaacaacuauuauaaugaaacaaauaucacccaaauaaguaacaccaacauccaaauggaagagagagcaagcagggguuucaauaacuuaaccaaagggcucuguacuauaaauucauggcacauauaugggaaagacaaugcaguaagaauuggagagaacucagauguuuuagucacaagagaacccuauguuucaugcgacccagaugaaugcagguucuaugcucucagccaaggaacaacaaucagagggaaacacucaaacggaacaauacacgauaggucccaguaucgcgcucugauaagcuggccacuaucaucaccgcccacaguauacaacagcaggguggaaugcauuggguggucaaguacuagcugccaugauggcaaauccaggaugucaauauguauaucaggaccaaacaacaaugcaucugcaauaguaugguacaacagaaggccuguugcagaaauuaacacaugggcccgaaacauacuaagaacacaggaaucugaauguguaugccacaacgguguaugcccaguaguuuucacagaugggucugccacuggaccugcagacacaagaguauacuauuucaaagagggaaaaauauugaaaugggaaucucugacuggaacugcuaagcauauugaagaaugcucauguuacggggaacgaacaggaauuaccugcacaugcagagacaauuggcagggcucaaauagaccaguaauucagauagauccaguggcaaugacacacacuagucaguauauaugcaguccuguucucacagacaauccccgaccgaaugacccaaauguagguaaguguaacgacccuuauccagguaauaauaacaauggagucaaaggguucucauaccuggaugggguuaacacuuggcuagggaggacaauaagcacagcuucgaggucuggauacgagaugcuaaaagugccaaaugcauuaacagaugauaggucaaagcccauucaaggucagacaaucguauuaaacacugacuggagugguuacaguggaucuuucauggacuauugggcugagggggacugcuaucgagcauguuuuuacguggaguugauacguggaagacccaaggaggauaaagugugguggaccagcaauaguauaguaucgauguguuccaguacagaauuccugggacaauggaacuggccugauggggcuaaaauagaguacuuccucuaa

SEQ ID NO: 55714 - RNA, 1413 nt, Artificial Sequence
  derived and/or modified CDS sequence (wt) from neuraminidase__InfluenzaA__AGQ81957
augaauccaaaucagaagauucuaugcacuucagccacugcuaucguaauaggcacaaucgcaguacucauaggaauagcaaaucuaggguugaacauaggacugcaucuaaaaccgagcugcaauugcucacacucacaaccugaagcaaccaacacaagccaaauaauaauaaacaacuauuauaaugaaacaaauaucacccaaguaaguaacaccaacauccaaauggaagaaagggcaagcagagguuucaauaacuuaacuaaagggcucuguacuauaaauucauggcacauauaugggaaagacaaugcaguaagaauuggagagaacucagauguuuuagucacaagagaacccuauguuucaugcgacccagaugaaugcagguucuaugcucucagccaaggaacaacaaucagagggaaacacucaaacggaacaauacacgauaggucccaauaucgcgcccugauaagcuggccacuaucaucaccgcccacaguauacaauagcaggguggaaugcauuggguggucgagcacuaguugccaugauggcaaguccaggaugucaauauguauaucaggaccaaacaacaaugcaucugcaguaguaugguacaacagaaggcccguugcagaaauuaacacaugggcccgaaacauacuaagaacacaggaaucugaauguguaugccacaacggugugugcccaguaguguucacagaugggucugccacuggaccugcagacacaagaauauacuauuucaaagaaggaaaaauacugaaaugggaaucucugacuggaacugcuaagcacauugaagaaugcucauguuacggggaaagaacaggaauuaccugcacaugcagagacaauuggcagggcucaaauagaccaguaauucaaauagauccaguggcaaugacacacacuagccaguauauaugcaguccuguucucacagacaauccccgaccgaaugacccaaauguagguaaguguaacgacccuuauccagguaauaauaacaauggggucaaaggguucucauaccuggauggaguuaacacuugguuagggagaacaauaagcacagcuucgaggucuggauaugagaugcuaaaagugccaaaugcauugacagaugauagaucaaagcccguucaaggucagacgaucguauuaaacacugacuggagcgguuacaguggaucuuucauggacuauugggcugagggagacugcuauagagcguguuucuacguggaguugauacguggaagacccaaggaggauaaagugugguggaccagcaauagcauaguaucaauguguuccaguacagaauuccugggacaauggaacuggccugauggggcuaaaauagaguacuuccucuaa

SEQ ID NO: 55715 - RNA, 1413 nt, Artificial Sequence; identical to SEQ ID NO: 55697
  derived and/or modified CDS sequence (wt) from neuraminidase__InfluenzaA__AGQ81958

SEQ ID NO: 55716 - RNA, 1413 nt, Artificial Sequence; identical to SEQ ID NO: 55697
  derived and/or modified CDS sequence (wt) from neuraminidase__InfluenzaA__AGQ81959

SEQ ID NO: 55717 - RNA, 1413 nt, Artificial Sequence
  derived and/or modified CDS sequence (wt) from neuraminidase__InfluenzaA__AGQ81960
augaauccaaaucagaagauucuaugcacuucagccacugcuaucguaauaggcacaaucgcaguacucauaggaauagcaaaccuaggguuaaacauaggacugcaucuaaaaccgaacugcaauugcucacgcucacaaccugaaacaaccaacacaagccaaacaauaauaaacaacuauuauaaugaaacaaauaucacccaaauaaguaacaccaacauucaaauggaagaaagagcaagcagagauuucaauaacuugacuaaagggcucuguacuauaaauucauggcacauauaugggaaagacaaugcaguaagaauuggagagaacucagauguuuuagucacaagagaacccuauguuucaugcgacccaaaugaaugcagguucuaugcucucagccaaggaacaacaaucagagggaaacacucaaacggaacgauacacgauaggucccaauaccgcgcccugauaagcuggccacuaucaucaccgcccacaguauacaauagcaggguggaaugcauuggguggucaaguacuaguugccaugauggcaaguccaggaugucaauauguauaucaggaccaaacaacaaugcaucugcaguaguaugguacaacagaagaccuguugcagaaauuaacacaugggcccgaaacauacuaagaacacaggaaucugaauguguaugccacaacgguguaugcccaguaguguucacagaugggucugccacuggaccugcagacacaagaauauacuauuucaaagagggaaaaauauugaaaugggaaucucugacuggaacugcuaagcauauugaagaaugcucauguuacggggaacgaacagaaauuaccugcacaugcagagacaauuggcagggaucaaauagaccaguaauccagauagauccaguggcaaugacacauacuagucaguauauaugcagcccuguucucacagacaauccccggccgaaugacccaaauguagguaaguguaacgacccuuauccagguaauaauaacaauggagucaaaggguucucauaccuagauggagucaacacuuggcuagggagaacaauaagcacagcuucgaggucuggguaugagaugcuaaaagugccaaaugcauugacagaugauagaucaaagcccauucaaggucagaccauuguauuaaacacugacuggagcgguuacaguggaucuuucauggacuauugggcugagggggacugcuaucgagcguguuuuuacguggaguugauacguggaagacccaaggaggauaaagugugguggaccagcaauaguauaguaucgauguguuccaguacagaauuccugggacaaugggacuggccugauggggcuaaaauagaguacuuccucuaa

SEQ ID NO: 55718 - RNA, 1413 nt, Artificial Sequence
  derived and/or modified CDS sequence (wt) from neuraminidase__InfluenzaA__AGQ81961
augaauccaaaucagaagauucuaugcacuucagccacugcuaucguaauaggcacaaucgcaguacucauaggaguagcaaaucuaggguugaacauagggcugcaucuaaaaccggguugcaauugcucacaaucacaaccugaagcaaccaacacaagccaaacaauaauaaacaacuauuauaaugaaacaaauaucacccaaauaaguaacacgaacauccaaauggaagagagagcaaacagggguuucaacaacuuaaccaaagggcucuguacuauaaauucauggcacauauaugggaaagacaaugcaguaagaauuggagagaacucagauguuuuaguuacaagagaacccuauguuucaugcgauccagaugaaugcagguuuuaugcucucagccaaggaacaacaaucagagggaaacacucaaacggaacaauacacgauaggucccaguaucgcgcucugauaagcuggccacuaucaucaccacccacgguauacaacagcaggguggaaugcauuggguggucaaguacuaguugccaugauggcaaauccaggaugucaauauguauaucaggaccaaacaacaaugcaucugcaguaguaugguacaacagaaggccuguugcagaaauuaacacaugggcccgaaacauacuaagaacacaggaaucugaauguguaugccacaacgguguaugcccaguaguguucacagaugggucugccacuggaccugcagacacaagaguauacuacuucagagagggaaaaauauugaaaugggaaucucugacuggaacugcuaagcauauugaagaaugcucauguuacggggaacgaacaggaauuaccugcacaugcagagacaauuggcagggcucgaauagaccaguaauucagauagauccaguggcaaugacacacacuagucaguacauaugcagcccuguucucacagacaauccccgaccaaaugacccaaauguagguaaguguaacgacccuuauccagguaauaauaacaauggagucaaaggguucucauaccuggauggggucaacacuuggcuagggaggacaauaagcacagcuucaaggucuggauacgagaugcugaaagugccgaaugcauuaacagaugauaggucaaaacccauucaaggucagacaaucguauuaaacacugacuggaguggcuacaguggaucuuucauggacuauugggcugagggggacugcuaucgagcauguuuuuacguggaguugauacgcggaagacccaaggaggauaaagugugguggaccagcaauaguauaguaucgauguguuccaguacagaauuccugggacaauggaacuggccugauggggcuaaaauagaguacuuccucuaa

SEQ ID NO: 55719 - RNA, 1413 nt, Artificial Sequence; identical to SEQ ID NO: 55710
  derived and/or modified CDS sequence (wt) from neuraminidase__InfluenzaA__AGQ81962

SEQ ID NO: 55720 - RNA, 1413 nt, Artificial Sequence
  derived and/or modified CDS sequence (wt) from neuraminidase__InfluenzaA__AGQ81963
augaauccaaaucagaagauucuaugcacuucagccacugcuaucguaauaggcacaaucgcaguacucauaggaauagcaaaucuaggguugaacauaggacugcaucuaaaaccgagcuguaauugcucacacucacaaccugaagaaaccaacacaagccaaacaauaauaaacaacuauuauaaugaaacaaauaucacacaaauaaguaauaccaacauucaaauggaagaaagagcaagcagggguuuuaauaacuuaacuaaagggcucuguacuauaaauucauggcacauauaugggaaagacaaugcaguaagaauuggagagaacucagauguuuuagucaccagggaacccuauguuucaugcgacccaaaugaaugcagauucuaugcucucagccaaggaacaacaaucagagggaaacacucaaacgggacaauacacgauaggucccaauaucgcgcccugauaagcuggccacuaucaucaccgcccacgguauacaauagcaggguggaaugcauuggguggucaaguacuaguugccaugacggcaaguccaggaugucaguauguauaucaggaccaaacgacaaugcaucagcaguaguaugguacaacagaaggccuguugcagaaauuaacacaugggcccgaaacauacuaagaacacaggaaucugaauguguaugccauaacgguguaugcccaguaguguucacagaugggucugccacuggaccugcacacacaagaauauacuauuucaaagagggaaaaauauugaaaugggaaucucugacuggaacugccaagcauauugaagaaugcucauguuacggggaacgaacaggaauuaccugcacaugcagagacaauuggcagggcucaaauagaccaguaauucagauagauccaguggcaaugacacacacuagucaguauauaugcaguccuguucucacagacaacccccgaccgaaugacccaaauguagguaaguguaacgacccuuauccagguaauaauaacaauggagucaaaggguucucauaccuggauggaguuaacacuuggcuagggagaacaauaagcacagcuucgaggucuggauaugagaugcuaaaagugccaaaugcauugacagaugauagaucaaagcccauucaaggucagacaaucguauuaaacacugacuggagugguuacaguggaucuuucauggacuauuggacugagggggacugcuaucgagcguguuuuuacguagaguugauacguggaagacccaaggaggauaaagugugguggaccagcaauaguauaguaucgauguguuccaguacagaauuccugggacaaugggacuggccugauggggcuaaaauagaguacuuccucuaa

SEQ ID NO: 55721 - RNA, 1413 nt, Artificial Sequence
  derived and/or modified CDS sequence (wt) from neuraminidase__InfluenzaA__AGQ81964
augaauccaaaccagaagauucuaugcaccucagccacugcuaucguaauaggcacgauugcaguacucauagggauagcaaaucuaggguugaacauaggacugcaucuaaaaccgagcugcaauugcucacacucaaaaccugaggaaacuaaugcaagccaaacaauaauaaacaacuauuauaaugaaacaaauaucacccaaauaaguaacaccaacauccaaauggaagagagagcaagcagggguuucaauaacuuaacuaaagggcucuguacuauaaauucauggcacauauaugggaaagacaaugcaguaagaauuggagagagcucagauguucuggucacaagagaacccuauguuucaugcgacccagaugaaugcagguucuaugcucucagccaagggacaacaaucagagggaaacacucaaacggaacaauacacgauaggucccaguaucgcgcccugauaagcuggccacuaucaucaccgcccacaguauacaacagcaggguggaauguauuggguggucaaguacuaguugccaugauggcaaauccaggaugucaauauguauaucaggaccaaauaauaaugcaucugcaguagucugguacaacagaagaccuguugcagagauuaacacaugggcccgaaacauccuaagaacacaggaaucugaauguguaugccacaacgguguaugcccaguaguguucacagaugggucugccacuggaccugcagacacaagaauauacuauuucaaagaagggaaaauauugaaaugggaaucucugacuggaacugcuaagcauauugaagaaugcucauguuacggggaacgaacagggauuacuugcacaugcagagauaauuggcagggcucaaauagaccaguaauucagauagauccaguggcaaugacacacaccagucaguauauaugcaguccuguucucacagacaauccccgaccgaaugacccaaauguagguaaguguaacgacccuuacccagguaauaauaacaauggggucaaaggauucucauaccuggaugggguuaacacuuggcuagggaggacaacaagcacaacuucaaggucuggauacgagaugcuaaaggugccaaaugcauugacagaugauagaucaaagcccauccaaggucaaacaaucguauuaaacacugacuggaguggguacagugggucuuucauggauuauugggcugagggggacugcuaucgagcguguuuuuacguggaauugauacguggaagaccuaaggaagauaaagugugguggaccagcaauagcauaguaucgauguguuccaguacagaauuccugggacaauggaauuggccugauggggcuaaaauagaguacuuccucuaa

SEQ ID NO: 55722 - RNA, 1413 nt, Artificial Sequence
  derived and/or modified CDS sequence (wt) from neuraminidase__InfluenzaA__AGQ81966
augaauccaaaucagaggauucuaugcacuucagccacugcuaucguaauaggcacaaucgcaguacucauaggaguagcaaaucuaggguugaacauagggcugcaucuaaaaccggguugcaauugcucacacucacaaccugaagcaaccaacacaagccaaacaauaauaaacaacuauuauaaugaaacaaauaucacccaaauaaguaacacaaacauccaaauggaggagagagcaaacagagguuucaauaacuuaaccaaagggcucuguacuauaaauucauggcacauauaugggaaagacaaugcaguaagaauuggagagaacucagauguuuuaguuacaagagaacccuauguuucaugcgauccagaugaaugcagguucuaugcucucagccaaggaacaacaaucagagggaaacacucaaacggaacaauacacgauaggucccaguaucgcgcucugauaagcuggccacuaucaucaccgcccacaguauacaacagcaggguggaaugcauuggguggucaaguacuaguugccaugauggcaaauccaggaugucgauauguauaucaggaccaaacaacaaugcaucugcaguaguaugguacaacagaaggccuguugcagaaauuaacacaugggcccgaaacauacuaagaacacaggaaucugaauguguaugccacaacgguguaugcccaguaguguucacagaugggucugccacuggaccugcagacacaagaguauacuauuucagagagggaaaaauauugaaaugggaaucccugacuggaacugcuaagcauauugaagaaugcucauguuacggggaacgaacaggaauuaccugcacaugcagagacaauuggcagggcucgaauagaccaguaauucagauagauccaguggcaaugacacacacuagucaguacauaugcaguccuguucucacagacaauccccgaccaaaugacccaaauguagguaaguguaaugacccuuauccagguaauaauaacaauggagucaaaggguucucauaccuggauggggucaacacuuggcuagggaggacaauaagcacagcuucgaggucuggauacgagaugcuaaaagugccaaaugcauuaacagaugauaggucaaagcccauucaaggucagacaaucguauuaaacacugacuggagugguuacaguggaucuuucauggacuauugggcugagggggacugcuaucgagcauguuuuuacguggaguugauacgcggaagacccaaggaggauaaagugugguggaccagcaauaguauaguaucgauguguuccaguacagaauuccugggacaauggaacuggccugauggggcuaaaauagaguacuuccucuaa

SEQ ID NO: 55723 - RNA, 1413 nt, Artificial Sequence
  derived and/or modified CDS sequence (wt) from neuraminidase__InfluenzaA__AGQ81967
augaauccaaaucagaagauucuaugcacuucagccacugcuaucguaauaggcauaauugcaguacucauagggauagcaaaucugggguugaacauagggcuacaucuaaaaccgagcugcaauugcucacacucacaaccugaagcaaccaaugcgagccaaacaauaauaaacaacuauuauaaugaaacaaacaucacccaaauaaguaacaccaacauccaaauggaagagagagcaagcagggguuucaauaacuuaacuaaagggcucuguacuauaaauucauggcauauauaugggaaagacaaugcaguaagaauuggagagaacucagacguuuuagucacaagagaacccuauguuucaugcgacccagaugaaugcagguucuaugcucucagccaagggacaacaaucagagggaaacauucaaacggaacaauacacgauaggucccaguaucgcgcccugauaagcuggccacuaucaucaccgcccacaguauacaacagcagaguggaaugcauuggauggucaaguacuaguugccaugauggcaaauccaggaugucaauauguauaucaggaccaaacaacaaugcaucugcaguagucugguacaacagaagaccuguugcagaaauuaacacaugggcccgaaacauacuaagaacacaggaaucugaaugcguaugccacaacgguguaugcccagugguguucacagaugggucugcaacuggaccugcagaaacaagaauauacuacuucaaagaggggaaaauauugaaaugggaaucucugacuggaacugcuaagcauauugaagaaugcucauguuacggggaacgaacaggaauuacuugcacaugcagagauaauuggcaaggcucaaauagaccagugauucagauagauccaguggcgaugacacacacuagucaguauauaugcagcccuguucucacagacaauccucgaccgaaugacccaaauguagguaaguguaaugacccuuauccagguaauaacaacaauggagucaaaggguucucauaccuggaugggguuaacacuuggcuagggaggacaauaagcacagcuucaaggucuggauacgaaaugcuaaaggugccaaaugcauugacagaugauagaucaaagcccauccaaggucagauaauaguauuaaacacugacuggagugguuacaguggaucuuucauggacuacugggcugagggggacugcuaucgagcguguuuuuacguggaguugauacgggggagacccaaggaggauaaagugugguggaccagcaauagcauaguaucgauguguuccaguacagaauuccugggacaauggaacuggccugauggggcuaaaauagaguacuuccucuaa

SEQ ID NO: 55724 - RNA, 1413 nt, Artificial Sequence
  derived and/or modified CDS sequence (wt) from neuraminidase__InfluenzaA__AGQ81968
augaauccaaaucagaagauucuaugcacuucagccacugcuaucguaauaggcauaauugcaguacucauaggaauagcaaaucugggguugaacauagggcuacaucuaaaaccgagcugcaauugcucacacucacaaccugaagcaaccaaugcgagccaaacaauaauaaacaacuauuauaaugaaacaaacaucacccaaauaaguaacaccaacauccaaauggaagagagagcaagcagggguuucaauaacuuaacuaaagggcucuguacuauaaauucauggcauauauauggaaaagacaaugcaguaagaauuggagagaacucagacauuuuagucacaagagaacccuauguuucaugcgacccagaugaaugcagauucuaugcucucagccaagggacaacaaucagagggaaacauucaaacggaacaauacacgauaggucccaguaucgcucccugauaagcuggccacuaucaucaccgcccacaguauacaacagcaggguggaaugcauuggguggucaaguacuaguugccaugauggcaaauccaggaugucaauauguauaucaggaccaaacaacaaugcaucugcaguagucugguacaacagaagaccuguugcagaaauuaacacaugggcccgaaacauacuaagaacacaggaaucugaaugcguaugccacaacgguguaugcccagugguguucacagaugggucugccacuggaccugcagaaacaagaauauacuacuucaaagaggggaaaauauugaaaugggaaucucugacuggaacugcuaagcauauugaagaaugcucauguuacggggaacgaacaggaauuacuugcacaugcagagauaauuggcaaggcucaaauagaccaguaauucagauagauccaguggcgaugacacacacuagucaguauauaugcagcccuguucucacagacaauccucgaccgaaugacccaaauguagguaaguguaaugacccuuauccagguaauaacaacaauggagucaaaggguucucauaccuggaugggguuaacacuuggcuagggaggacaauaagcacagcuucaaggucuggauacgaaaugcuaaaggugccaaaugcauugacagaugauagaucaaagcccauccaaggucagacaauaguauuaaacacugacuggagugguuacaguggaucuuucauagacuacugggcugagggggacugcuaucgagcguguuuuuacguggaguugauacgggggagacccaaggaggauaaagugugguggaccagcaauagcauaguaucgauguguuccaguacagaauuccugggacaauggaacuggccugauggggcuaaaauagaguacuuccucuaa

SEQ ID NO: 55725 - RNA, 1413 nt, Artificial Sequence
  derived and/or modified CDS sequence (wt) from neuraminidase__InfluenzaA__AGQ81969
augaauccaaaucagaagauucuaugcacuucagccacugcuaucguaauaggcauaauugcaguacucauagggauagcaaaucugggguugaacauagggcuacaucuaaaaccgagcugcaauugcucacacucacaaccugaagaaaccaaugcgagccaaacaauaauaaacaacuauuauaaugaaacaaacaucacccaaauaaguaacaccaacauccaaauggaagagagagcaagcagggguuucaauaacuuaacuaaagggcucuguacuauaaauucauggcauauauaugggaaagacaaugcaguaagaauuggagagaacucagacguuuuagucacaagagaacccuauguuucaugcgacccagaugaaugcagauucuaugcucucagccaagggacaacaaucagagggaaacauucaaacggaacaauacacgauaggucccaguaucgcgcccugauaagcuggccacuaucaucaccacccacaguauacaacagcagaguggaaugcauuggauggucaaguacuaguugccaugauggcaaauccaggaugucaauauguauaucaggaccaaacaacaaugcaucugcaguagucugguacaacagaagaccuguugcagaaauuaacacaugggcccgaaacauacuaagaacacaggaaucugaaugcguaugccacaacgguguaugcccagugguguucacagaugggucugcaacuggaccugcagaaacaagaauauacuacuucaaagaggggaaaauauugaaaugggaaucucugacuggaacugcuaagcauauugaagaauguucauguuacggggaacgaacaggaauuacuugcacaugcagagauaauuggcaaggcucaaauagaccagugauucagauagauccaguggcgaugacacacacuagucaguauauaugcagcccuguucucacagacaauccucgaccgaaugacccaaauguagguaaguguaaugacccuuauccagguaauaacaacaauggagucaaaggguucucauaccuggaugggguuaacacuuggcuagggaggacaauaagcacagcuucaaggucuggauacgaaaugcuaaaggugccaaaugcauugacagaugauagaucaaagcccauccaaggucagauaauaguauuaaacacugacuggagugguuacaguggaucuuucauggacuacugggcugagggggacugcuaucgagcguguuuuuacguggaguugauacgggggagacccaaggaggauaaagugugguggaccagcaauagcauaguaucgauguguuccaguacagaauuccugggacaauggaacuggccugauggggcuaaaauagaguacuuccucuaa

SEQ ID NO: 55726 - RNA, 1413 nt, Artificial Sequence
  derived and/or modified CDS sequence (wt) from neuraminidase__InfluenzaA__AGQ81970
augaauccaaaucagaagauucuaugcaccucagccaccgcuaucguaauaggcacgauugcaguacucauaggaauagcaaaucuaggguugaacauaggacugcaucuaaaaccgagcugcaauugcucacacucacaaccugaggaaaccaaugcaagccaaacaauaauaaacaacuauuauaaugaaacaaauaucacccagauaagcaacaccaacauucaaauggaagagagagcaagcagggguuucaauaacuuaaccaaagggcucuguacuauaaauucauggcacauauacgggaaagacaaugcaguaagaauuggagaaaacucagauguucuggucacaagagaacccuauguuucaugcgacccagaugaaugcagguucuaugcucucagccaagggacaacaaucagagggaaacacucaaacggaacaauacaugauaggucccaguaucgcgcccugauaagcuggccacuaucaucaccgcccacaguauacaacagcaggguggaauguauuggguggucaaguacuaguugccaugauggcaaauccaggaugucaauauguauaucaggaccaaauaauaaugcaucugcaguagucugguacaacaaaaggccuguugcagaaauuaacacaugggcccgaaacauccuaagaacacaggaaucugaauguguaugccacaacgguguauguccuguaguguucacagaugggucugccacuggaccugcagacacaagaauauacuauuucaaagagggaaaaauauugaaaugggaaccucugacuggaacugccaagcauauugaagaaugcucauguuacggggaacgaacagggauuacuugcacaugcagagauaauuggcagggcucaaauagaccaguaauucagauagauccaguggcaaugacacacacuagccaguauaucugcaguccuguucucacagacaauccccgaccgaaugacccaaauguagguaaguguaaugacccuuacccagguaauaguaacaauggggucaaaggguucucauaccuggaugggguuaacacuuggcuggggaggacaauaagcacagcuucaaggucuggauacgagaugcuaaaggugccaaaugcauugacagaugauagaucaaagccuauccaaggccaaacaaucguauuaaacacugacuggaguggguacagugggucuuucauggacuauugggcugaaggggacugcuaucgagcguguuuuuacguggaauugauacguggaagaccuaaggaagauaaagugugguggaccagcaauagcauaguaucgauguguuccaguacagaauuccugggacaauggaacuggccugauggggcuaaaauagaguacuuccucuaa

SEQ ID NO: 55727 - RNA, 1413 nt, Artificial Sequence
  derived and/or modified CDS sequence (wt) from neuraminidase__InfluenzaA__AGQ81971
augaauccaaaucagaagauucuaugcacuucagccacugcuaucauaauaggcgcaaucgcaguacucauaggaauagcaaaccuaggguugaacauaggacugcaucuaaaaccgagcugcaauugcucacacucacaaccugaaacaaccaacacaagccaaacaauaauaaacaacuauuauaaugaaacaaacaucacccaaauaaguaacaccaacauccaaauggaagagagaacaagcagggguuucaauaacuuaacuaaagggcucuguacuauaaauucauggcacauauaugggaaagacaaugcaguaagaauuggagagagcucggauguuuuagucacaagagaacccuauguuucaugcgacccagaugaaugcagguucuaugcucucagccaaggaacaacaaucagagggaaacacucaaacggaacaauacacgauaggucccaguaucgcgcccugauaagcuggccacuaucaucaccgcccacaguguacaguagcaggguggaaugcauuggguggucaaguacuaguugccaugauggcaaauccaggaugucaauauguauaucaggaccaaacaacaaugcaucugcaguaguaugguacaacagaaggccuguugcagaaauuaacacaugggcccgaaacauacuaagaacacaggaaucugaaugugugugccacaacggcguaugcccaguaguguucaccgaugggucugccacuggaccugcagacacaagaauauacuauuucaaagaggggaaaauauugaaaugggagucucugacuggaacugcuaagcauauugaagaauguucauguuacggggaacgaacaggaauuaccugcacaugcagggacaacuggcagggcucaaauagaccagugauucagauagauccaguagcaaugacacacacuagucaguauauaugcaguccuguucuuacagacaauccccgaccgaaugacccaaauauagguaaguguaaugacccuuauccagguaauaauaacaauggagucaagggguucucauaccuggauggggcuaacacuuggcuagggaggacaauaagcacagccucgaggucuggauacgagaugcuaaaagugccaaaugcauugacagaugauagaucaaagcccauucaaggucagacaauuguauuaaacacugacuggagugguuacaguggaucuuucauggacuauugggcugagggggacugcuaucgagcguguuuuuauguggaguugauacguggaagacccaaagaggauaaagugugguggaccagcaauaguauaguaucgauguguuccaguacagaauuccugggacaauggaacuggccugauggggcuaaaauagaguacuuccucuaa

SEQ ID NO: 55728 - RNA, 1413 nt, Artificial Sequence
  derived and/or modified CDS sequence (wt) from neuraminidase__InfluenzaA__AGQ81972
augaauccaaaucagaagauucuaugcacuucagccacugcuaucauaauaggcgcaaucgcaguacucauaggaauagcaaaucuaggguugaacauaggacugcaucuaaaaccgagcugcaauugcucacacucacaaccugaaacaaccaacacaagccaaacaauaauaaacaacuauuauaaugaaacaaacaucacccaaauaaguaacaccaacauccaaauggaagagagagcaaguagggguuucaauaacuuaacuaaagggcucuguacuauaaauucauggcacauauaugggaaagacaaugcaguaagaauuggagagagcucggauguuuuagucacaagagaacccuauguuucaugcgacccagaugaaugcagguucuaugcucucagccagggaacaacaaucagagggaaacacucaaacggaacaauacacgauaggucccaguaucgcgcccugauaagcuggccacuaucaucaccgcccacaguguacaacagcaggguggaaugcauuggguggucaaguacuaguugccaugaugguaaauccaggaugucaauauguauaucaggaccaaacaacaaugcaucugcaguaguaugguacaacagaaggccuguugcagaaauuaacacaugggcccgaaacauacuaagaacacaggaaucugaaugcgugugccacaacgguguaugcccaguaguguucaccgaugggucugccacuggaccugcagacacaagaauauacuauuucaaagagggaaaaauauugaaaugggagucucugacuggaacugcuaagcauauugaagaaugcucauguuacggggaacgaacaggaaucaccugcacaugcagggacaauuggcagggcucaaauagaccaguaauucaaauagauccaguagcaaugacacacacuagucaguauauaugcaguccuguucuuacagacaauccccggccgaaugacccaaauauagguaaguguaaugacccuuauccagguaauaauaacaauggagucaagggguucucauaccuggauggggcuaacacuuggcuagggaggacaauaagcacagccucgaggucuggauacgagaugcuaaaagugccaaaugcauugacagaugauagaucaaagcccauucaaggucagacaauuguauuaaacacugacuggagugguuacaguggaucuuucauggauuauugggcugagggggacugcuaucgagcguguuuuuauguggaguugauacguggaagacccaaggaggauaaagugugguggaccagcaauaguauaguaucgauguguuccaguacagaauuccugggacaauggaacuggccugauggggcuaaaauagaguacuuccucuaa

SEQ ID NO: 55729 - RNA, 1413 nt, Artificial Sequence
  derived and/or modified CDS sequence (wt) from neuraminidase__InfluenzaA__AGQ81973
augaauccaaaucagaagauucuaugcacuucagccacugcuaucauaauaggcgcaaucgcaguacucauaggaauagcaaaccuaggguugaacauaggacugcaucuaaaaccgagcugcaauugcucacacucacaaccugaaacaaccaacacaagccaaacaauaauaaacaacuauuauaaugaaacaaacaucacccaaauaaguaacaccaacauccaaauggaagagagaacaagcagggguuucaauaacuuaacuaaagggcucuguacuauaaauucauggcacauauaugggaaagacaaugcaguaagaauuggagagagcucggauguuuuagucacaagagaacccuauguuucaugcgacccagaugaaugcagguucuaugcucucagccaaggaacaacaaucagagggaaacacucaaacggaacaauacacgauaggucccaguaucgcgcccugauaagcuggccacuaucaucaccgcccacaguguacaauagcaggguggaaugcauuggguggucaaguacuaguugccaugauggcaaauccaggaugucaauauguauaucaggaccaaacaacaaugcaucugcaguaguaugguacaacagaaggccuguugcagaaauuaacacaugggcccgaaacauacuaagaacacaggaaucugaaugugugugccacaacggcguaugcccaguaguguucaccgaugggucugccacuggaccugcagacacaagaauauacuauuucaaagaggggaaaauauugaaaugggagucucugacuggaacugcuaagcauauugaagaaugcucauguuacggggaacgaacaggaauuaccugcacaugcagggacaauuggcagggcucaaauagaccagugauucagauagauccaguagcaaugacacacacuagucaguauauaugcaguccuguucuuacagacaauccccgaccgaaugacccaaauauagguaaguguaaugacccuuauccagguaauaauaacaauggagucaagggguucucauaccuggauggggcuaacacuuggcuagggaggacaauaagcacagccucgaggucuggauacgagaugcuaaaagugccaaaugcauugacagaugauagaucaaagcccauucaaggucagacaauuguauuaaacacugacuggagugguuacaguggaucuuucauggacuauugggcugagggggacugcuaucgagcguguuuuuauguggaguugauacguggaagacccaaggaggauaaagugugguggaccagcaauaguauaguaucgauguguuccaguacagaauuccugggacaauggaacuggccugauggggcuaaaauagaguacuuccucuaa

SEQ ID NO: 55730 - RNA, 1413 nt, Artificial Sequence; identical to SEQ ID NO: 55710
  derived and/or modified CDS sequence (wt) from neuraminidase__InfluenzaA__AGQ81974

SEQ ID NO: 55731 - RNA, 1398 nt, Artificial Sequence
  derived and/or modified CDS sequence (wt) from neuraminidase__InfluenzaA__AGQ81975
augaauccaaaucagaagauucuaugcacuucagccacugcuaucauaauaggcgcaaucgcaguacucauuggaauagcaaaccuaggauugaacauaggacugcaucuaaaaccgggcugcaauugcucacacucacaaccugaaacaaccaacacaagccaaacaauaauaaacaacuauuauaaugaaacaaacaucaccaacauccaaauggaagagagaacaagcaggaauuucaauaacuuaacuaaauggcucuguacuauaaauucauggcacauauaugggaaagacaaugcaguaagaauuggagagaacucggauguuuuagucacaagagaacccuauguuucaugcgacccagaugaaugcagguucuaugcucucagccaaggaacaacaaucagagggaaacacucaaacggaacaauacacgauaggucccaguaucgcgcccugauaagcuggccacuaucaucaccgcccacaguguacaacagcaggguggaaugcauuggguggucaaguacuaguugccaugauggcaaauccaggaugucaauauguauaucaggaccaaacaacaaugcaucugcaguaguaugguacaacagaaggccuguugcagaaauuaacacaugggcccgaaacauacuaagaacacaggaaucugaauguguaugccacaacggcguaugcccaguaguguucaccgaugggucugccacuggaccugcagacacaagaauauacuauuuuaaagaagggaaaauauugaaaugggagucucugacuggaacugcuaagcauauugaagaaugcucauguuacggggaaagaacaggaauuaccugcacaugcagggacaauuggcagggcucaaauagaccagugauucagauagacccaguagcaaugacacacacuagucaauauauaugcaguccuguucuuacagacaauccccgaccggaugacccaaauauagguaaguguaaugacccuuauccagguaauaauaacaauggagucaagggauucucauaccuggauggggcuaacacuuggcuagggaggacaauaagcacagccucgaggucuggauacgagauguuaaaagugccaaaugcauugacagaugauagaucaaagcccauucaaggucagacaauuguauuaaacgcugacuggagugguuacaguggaucuuucauggacuauugggcugacggggacugcuaucgagcguguuuuuauguggaguugauacguggaagacccaaggaggauaaagugugguggaccagcaauaguauaguaucgauguguuccaguacagaauuccugggacaauggaacuggccugauggggcuaaaauagaguacuuccucuaa

SEQ ID NO: 55732 - RNA, 1398 nt, Artificial Sequence
  derived and/or modified CDS sequence (wt) from neuraminidase__InfluenzaA__AGQ81977
augaauccaaaucagaagauucuaugcacuucagccacugcuaucauaauaggcgcaaucgcaguacucauuggaauagcaaaccuaggauugaacauaggacugcaucuaaaaccgggcugcaauugcucacacucacaaccugaaacaaccaacacaagccaaacaauaauaaacaacuauuauaaugaaacaaacaucaccaacauccaaauggaagagagaacaagcaggaauuucaauaacuuaacuaaagggcucuguacuauaaauucauggcacauauaugggaaagacaaugcaguaagaauuggagagagcucggauguuuuagucacaagagaacccuauguuucaugcgacccagaugaaugcagguucuaugcucucagccaaggaacaacaaucagagggaaacacucaaacggaacaauacacgauaggucccaguaucgcgcccugauaagcuggccacuaucaucaccgcccacaguguacaauagcaggguggaaugcauuggguggucaaguacuaguugccaugauggcaaauccaggaugucaauauguauaucaggaccaaacaacaaugcaucugcaguaguaugguacaacagaaggccuguugcagaaauuaacacaugggcccgaaacauacuaagaacacaggaaucugaauguguaugccacaacggcguaugcccaguaguguucaccgaugggucugccacuggaccugcagacacaagaauauacuauuuuaaagaggggaaaauauugaaaugggagucucugacuggaacugcuaagcauauugaagaaugcucauguuacggggaacgaacaggaauuaccugcacaugcagggacaauuggcagggcucaaauagaccagugauucagauagacccaguagcaaugacacacacuagucaauauauaugcaguccuguucuaacagacaauccccgaccggaugacccaaauauagguaaauguaaugacccuuauccagguaauaauaacaauggagucaagggauucucauaccuggauggggcuaacacuuggcuagggaggacaauaagcacagccucgaggucuggauacgagauguuaaaagugccaaaugcauugacagaugauagaucaaagcccauucaaggucagacaauuguauuaaacgcugacuggagugguuacaguggaucuuucauggacuauugggcugacggggacugcuaucgagcguguuuuuauguggaguugauacguggaagacccaaggaggauaaagugugguggaccagcaauaguauaguaucgauguguuccaguacagaauuccugggacaauggaacuggccugauggggcuaaaauagaguacuuccucuaa

SEQ ID NO: 55733 - RNA, 1398 nt, Artificial Sequence
  derived and/or modified CDS sequence (wt) from neuraminidase__InfluenzaA__AGQ81979
augaauccaaaucagaagauucuaugcacuucagccacugcuaucauaauaggcgcaaucgcagcacucauuggaauagcaaaccuaggauugaacauaggacugcaucuaaaaccgggcugcaauugcucacacucacaaccugaaacaaccaacacaagccaaacaauaauaaacaacuauuauaaugaaacaaacaucaccaacauccaaauggaagagagaacaagcaggaauuucaauaacuuaacuaaagggcucuguacuauaaauucauggcacauauaugggaaagacaaugcaguaagaauuggagagagcucggauguuuuagucacaagagaacccuauguuucaugcgacccagaugaaugcagguucuaugcucucagccaaggaacaacaaucagagggaaacacucaaacggaacaauacacgauaggucccaguaucgcgcccugauaagcuggccacuaucaucaccgcccacaguguacaacagcaggguggaaugcauuggguggucaaguacuaguugccaugauggcaaauccaggaugucaauauguauaucaggaccaaacaacaaugcaucugcaguaguaugguacaacagaaggccuguugcagaaauuaacacaugggcccgaaacauacuaagaacacaggaaucugaauguguaugccacaacggcguaugcccaguaguguucaccgaugggucugccacuggaccugcagacacaagaauauacuauuuuaaagaggggaaaauauugaaaugggagucucugacuggaacugcuaagcauauugaagaaugcucauguuacggggaacgaacaggaauuaccugcacaugcagggacaauuggcagggcucaaauagaccagugauucagauagacccaguagcaaugacacacacuagucaauauauaugcaguccuguucuaacagacaauccccgaccggaugacccaaauauagguaaauguaaugacccuuauccagguaauaauaacaauggagucaagggauucucauaccuggauggggcuaacacuuggcuagggaggacaauaagcacagccucgaggucuggauacgagauguuaaaagugccaaaugcauugacagaugauagaucaaagcccauucaaggucagacaauuguauuaaacgcugacuggagugguuacaguggaucuuucauggacuauugggcugacggggacugcuaucgagcguguuuuuauguggaguugauacguggaagacccaaggaggauaaagugugguggaccagcaauaguauaguaucgauguguuccaguacagaauuccugggacaauggaacuggccugauggggcuaaaauagaguacuuccucuaa

SEQ ID NO: 55734 - RNA, 1398 nt, Artificial Sequence
  derived and/or modified CDS sequence (wt) from neuraminidase__InfluenzaA__AGQ81980
augaauccaaaucagaagauucuaugcacuucagccacugcuaucauaauaggcgcaaucgcaguacucauuggaauagcaaaccuaggauugaacauaggacugcaucuaaaaccgggcugcaauugcucacacucacaaccugaaacaaccaacacaagccaaacaauaauaaacaacuauuauaaugaaacaaacaucaccaacauccaaauggaagagagaacaagcaggaauuucaauaacuuaacuaaagggcucuguacuauaaauucauggcacauauaugggaaagacaaugcaguaagaauuggagagagcucggauguuuuagucacaagagaacccuauguuucaugcgacccagaugaaugcagguucuaugcucucagccaaggaacaacaaucagagggaaacacucaaacggaacaauacacgauaggucccaguaucgcgcccugauaagcuggccacuaucaucaccgcccacaguguacaacagcaggguggaaugcauuggguggucaaguacuaguugccaugauggcaaauccaggaugucaauauguauaucaggaccaaacaacaaugcaucugcaguaguaugguacaacagaaggccuguugcagaaauuaacacaugggcccgaaacauacuaagaacacaggaaucugaauguguaugccacaacggcguaugcccaguaguguucaccgaugggucugccacuggaccugcagacacaagaauauacuauuuuaaagaggggaaaauauugaaaugggagucucugacuggaacugcuaagcauauugaagaaugcucauguuacggggaacgaacaggaauuaccugcacaugcagggacaauuggcagggcucaaauagaccagugauucagauagacccaguagcaaugacacacacuagucaauauauaugcaguccuguucuaacagacaauccccgaccggaugacccaaauauagguaaauguaaugacccuuauccagguaauaauaacaauggagucaagggauucucauaccuggauggggcuaacacuuggcuagggaggacaauaagcacagccucgaggucuggauacgagauguuaaaagugccaaaugcauugacagaugauagaucaaagcccauucaaggucagacaauuguauuaaacgcugacuggagugguuacaguggaucuuucauggacuauugggcugacggggacugcuaucgagcguguuuuuauguggaguugauacguggaagacccaaggaggauaaagugugguggaccagcaauaguauaguaucgauguguuccaguacagaauuccugggacaauggaacuggccugauggggcuaaaauagaguacuuccucuaa

SEQ ID NO: 55735 - RNA, 1350 nt, Artificial Sequence
  derived and/or modified CDS sequence (wt) from neuraminidase__InfluenzaA__AGQ88501
augaauccaaaucagaagauaguaaccauuggaucaaucuguaugguaauuggaauagucagcuugauguuacagauugggaacaugaucucaauaugggucagucauucaauucaaacagggaaucaacaccaaacugaaccaaucagaaauacuaauuuucuuacugagaacgcuguggcuucaguagcauuaucuggcaauucaucucuuugccccauuagaggaugggcuguacacaguaaagacaacaguauaaggauuggguccaaaggggauguguuuguaauuagagagccguucaucucaugcuccaaucuggaaugcagaacuuucuuuuugacucagggagcuuuacugaaugacaagcacuccaacgggacugucaaagacaggagcccucacagaacgcuaaugaguuguccuauaggugaggcccccuccccauacaacucgagguuugagucuguugcuuggucggcaagugcuugccaugauggcaucaguugguugacaauuggaauuucugguccagacaauggggcuguggcgguauugaaauacaauggcauaauaacagacacuaucaagaguuggaggaauaacauacugaggacccaagagucugaauguacauguguaaauggcucuugcuuuacugugaugacagauggaccaaguaauggacaggcaucauauaagauuuucaaaauagaaaaagggaaaguaguuaagucagucgaauugaacgcuccuaauuaucacuaugaggaaugcuccuguuauccugaugcuggcgaaaucauaugugugugcagggauaauuggcauggcucaaacaggccauggguaucuuucaaucagaauuuggaguaucaaauaggauauauuugcaguggaguuuucggagacaauccacgaccaaaugauggggaagguaguugugguccaguguccccuaacggggcauaugggguaaaaggguuuucauuuaaauacggcaauggugucuggaucgggaggaccaaaagcacucauuccaggagcggcuuugaaaugauuugggauccaaauggguggacuggaacggacagugaauuuucgaugaaacaagauauaguagcaauaacugauuggucaggauauagcgggaguuuuguccagcacccagaacugacaggauuagauugcauaagaccuugcuucuggguugaguuaaucagagggcggcccaaagagagcacaauuuggacuagugggagcagcauaucuuuuugugguguaaauagugacacugugaguuggucuuggccagacggugcugaguugccauucaccauugacaaguag

SEQ ID NO: 55736 - RNA, 1401 nt, Artificial Sequence
  derived and/or modified CDS sequence (wt) from neuraminidase__InfluenzaA__AGR33906
augaauccaaaucagaagauacuagcaauuggcucuguuucucuaaccauugcgauaauauguuuccucaugcagauugccaucuuaacaacgacuaugacccuacauuucaagcaaaaugaaugcagcaacccaucaaauaaucaaguggugccaugugaaccaauccuaauagagaggaacacagugcauuugaauaguacuaccauagagaaggaaguuuguccuaaaguggcagaauacaagaauuggucaaaaccacaaugucaaauuacuggguucgcuccuuucucaaaggacaacucaauuaggcuuucugcagguggagauaucuggguaacaagagagccuuauguuucaugcagucuuggcaaauguuaucaauuugcacuugggcagggaaccacccugaaaaacaagcacucaaauggcaccacacaugauagaacuccucacagaacucuuuuaaugaaugaauuaggugucccauuccauuugggaaccaaacaagugugcauagcauggucuaguucaaguugcuaugauggaaaagcaugguuacauauuuguguuacuggggacgauaaaaaugccacugcuaguaucauuuaugaugggaugcuuguugacaguauugguucaugguccaaaaacauccucagaacccaggagucagaaugcguuugcaucaauggaacuugugcaguaguaaugacugauggaagugcaucaggaaaggcugacacuagaauauuauucauaagggaggggaaaauuguaaacauuagcccauugucagggagugcucagcacguugaggaaugcuccuguuacccccgguauccugaaguuagguguguuugcagagacaauuggaaaggcuccaauaggcccguucuauauauaaauauggcagauuauaguguugaguccaguuaugugugcucaggacuuguuggcgacacaccaagaaaugaugauagcuucagcagcagcaauugcagagacccuaauaacgaaagaggggccccaggagugaaaggaugggccuuugacgaugguaaugauguuuggaugggacgaacaaucagaaaugauucacgcucagguuaugagacuuuuaggguagucaaugguuggaccacggcuaauucaaagucacaaauaaauaggcaagucauaguugacagugaaagcuggucuggguauucugguaucuucucuguugaaggcaaaaacugcaucaacagguguuuuuauguggaguugauaagagggagaccacaggagccuagagugugguggacuucaaauagcaucauuguauucuguggaaccucagguacauauggaacaggcucauggccugauggagcgaauaucaacuucaugccuauauaa

SEQ ID NO: 55737 - RNA, 1401 nt, Artificial Sequence
  derived and/or modified CDS sequence (wt) from neuraminidase__InfluenzaA__AGR33908
augaauccaaaucagaagauaacagcaauuggcucuguuucucuaaucauugcgauaauaugucuccucaugcaaauugccaucuuaacaacgacuaugacauuacauuucagacagaaugaaugcaguaacccaucgaauaaucaagugaugccaugugaaccgaucauaauagagaggaacacagugcauuugaauaguacuaccauagagagggaaauuuguccuaaaguagcagaauacaagaauuggucaaaaccacaaugucaaauuacaggguucgcuccuuucucaaaggacaacucaauuaggcuuucugcagguggggauaucugggugacaagagaaccuuaugucucaugcagucccgacaaauguuaucaauuugcacuugggcagggaaccacccugaaaaacaagcacucaaauggcacuacacaugauagaaccccucacagaacucuuuuaaugaaugaguuaggugucccauuucauuugggaaccaaacaagugugcauagcauggucuaguucaagcugcuaugauggaaaagcaugguuacauauuuguguuacuggggaugauaaaaaugcuacugcuaguaucaucuaugaugggaugcuuguugacaguauuggcucaugguccaaaaacauccucagaacucaggagucagaaugcguuugcaucaauggaacuugugcagugguaaugaccgauggaagugcaucaggagaggccgacacuagaauauuauucauaagagaaggaaaaauuauaaauaucagcccauugucaggaagugcucagcacguugaggaaugcuccuguuauccccgguauccugaaguuagguguguuugcagagacaauuggaagggcuccaauaggcccauuauauauauaaacaugguugauuauagcauugagucccguuaugugugcucaggacuuguuggcgacacaccaagaaaugaugauagcaccagcagcagcaauugcagagacccuaauaacgaaagaggggccccaggagugaaagggugggccuuugacgacgggaaugauguuuggaugggacggacaaucaaaaauggcucacgcucagguuaugagacuuuuagggucaucaacgguuggaccauggcuaauucaaagucacagauaaauaggcaagucauaguugacagugacaacuggucuggguauuccggcaucuucucuguugaaggcaaaaaaugcaucaacagguguuuuuauguggaguugauaagagggagaccacaggaacccagagugugguggaccucaaauagcaucauuguauucuguggaaccucagguacauauggaacaggcucauggccugauggagcggauaucaacuucaugccuauauaa

SEQ ID NO: 55738 - RNA, 1401 nt, Artificial Sequence
  derived and/or modified CDS sequence (wt) from neuraminidase__InfluenzaA__AGR33910
augaauccaaaucagaagauaauagcaauuggcucuguuucucuaaccauugcgauaauauguuuccucaugcagauugccaucuuaacaacgacuaugacccuacauuucaagcaaaaugaaugcagcaaaccaucaaauaaucaaguggugccaugugaaccgauccuaauagagaggaacacagugcauuugaauaguacuaccauagagaaggaaguuuguccuaaaguggcagaauacaagaauuggucaaaaccacaaugucaaauuacaggguucgcuccuuucucaaaggacaacucaauuaggcuuucugcagguggagauaucuggguaacaagagaaccuuauguuucaugcaguuuuggcaaauguuaucaauuugcacuugggcagggaaccacccugaaaaacaagcacucaaauggcaccacacaugauagaacuccucacagaacucuuuuaaugaaugaguuaggugucccauuucauuugggaaccaaacaaguaugcauagcauggucuaguucaaguugcuaugauggaaaagcaugguuacauauuuguguuacuggggacgauaaaaaugcuacugcuaguaucauuuaugaugggaugcuuguugacaguauugguucaugguccaaaaacauccucagaacccaggagucagaaugcguuugcaucaauggaacuugugcaguaguaaugacugauggaagugcuucaggaaaggcugacacuagaauauuauucauaagagaggggaaaauuauaaacauuaggccauugucagggagugcucagcacguugaggaaugcuccuguuacccccgguauccugaaguuagguguguuugcagagacaauuggaaaggcuccaauaggcccguucuauauauaaauauggcagauuauaguguugaguccaguuaugugugcucaggacuuguuggcgacacaccaagaaaugaugauaguuccagcagcagcaauugcagagacccuaauaacgaaagaggggccccaggagugaaaggaugggccuuugacgaugguaaugauguuuggaugggacgaacaaucagaaaugauucacgcucagguuaugagacuuuuaggguagucaaugguuggaccacggcuaacucaaagucacaaauaaauaggcaagucauaguugacagugaaaacuggucuggguauucugguaucuucucuguugaaggaaaaaacugcauaaacagguguuuuuauguggaguugauaagagggagaccacaggagccuagagugugguggacuucaaauagcaucauuguauucuguggaaccucagguacauauggaacaggcucauggccugauggagcgaauaucaacuucaugccuauauaa

SEQ ID NO: 55739 - RNA, 1401 nt, Artificial Sequence
  derived and/or modified CDS sequence (wt) from neuraminidase__InfluenzaA__AGR33911
augaauccaaaucagaagauaauagcaauuggcucuguuucucuaaccauugcgauaauaugcuuccucaugcagauugccaucuuaacaacgacuaugacacuacauuucaagcaaaaugaaugcagcaacccaucaaauaaucaaguggugccaugugaaccgauccuaauagagaggaacacagugcauuugaauaguacuaccauagagaaggaaguuuguccuaaaguggcagaauacaagaauuggucaaaaccacaaugucaaauuacaggguucgcuccuuucucaaaggacaacucaauuaggcuuucugcagguggagauaucuggguaacaagagaaccuuauguuucaugcagucuuggcaaauguuaucaauuugcacuugggcagggaaccacccugaaaaacaaucacucaaauggcaccacacaugauagaacuccucacagaacucuuuuaaugaaugaguuaggugucccauuucauuugggaaccaaacaagugugcauagcauggucuaguucaaguugcuaugauggaaaagcaugguuacauauuuguguuacuggggaugauaaaaaugcuacugcuaguauuauuuaugaugggaugcuuguugacaguauugguucaugguccaaaaacauccucagaacccaggagucagaaugcguuugcaucaauggaacuugugcaguaguaaugacugaugggagugcaucaggaaaggcugacacuagaauauuauucauaagagaggggaaaauuauaaacauuagcccauuaucagggagugcucagcauguugaggaaugcucauguuauccccgguauccugaaguuagguguguuugcagagacaauuggaaaggcuccaauaggcccguucuauauauaaauauggcagauuauaguauugaguccaguuaugugugcucaggacuuguuggcgacacaccaagaaaugaugauagcuccagcagcagcaauugcagagacccuaauaacgaaagaggggccccaggagugaaaggaugggccuuugacgaugguaaugauguuuggaugggacgaacaaucagaaauaauucacgcucagguuaugagaccuuuaggguagucaaugguuggaccacggcuaauucaaagucacaaauaaauaggcaagucauaguugacagugaaaacuggucuggguauucugguaucuucucuguugaaggcaaaaacugcaucaacaggugcuuuuauguggagcugauaagagggaggccacaggagcccagagugugguggacuucaaauagcaucauuguauucuguggaaccucagguacauaugggacaggcucauggccugauggagcgaauaucaacuucaugccuauauaa

SEQ ID NO: 55740 - RNA, 1356 nt, Artificial Sequence; identical to SEQ ID NO: 55657
  derived and/or modified CDS sequence (wt) from neuraminidase__InfluenzaA__AGR33912

SEQ ID NO: 55741 - RNA, 1356 nt, Artificial Sequence; identical to SEQ ID NO: 55685
  derived and/or modified CDS sequence (wt) from neuraminidase__InfluenzaA__AGR33913

SEQ ID NO: 55742 - RNA, 1356 nt, Artificial Sequence
  derived and/or modified CDS sequence (wt) from neuraminidase__InfluenzaA__AGR33915
augaauccaaaucagaaacuauucgcauuauccggaguggcaauagcgcuuaguguacugaacuuauugauaggacucucaaaugucggauugaauguaucucuacaucuaaaagaaacaggacccaaacaggaagagaauuugacaugcaugacuaccaaagaaacugaauugggaacaccaagcuaucugcuguugaacaagagucuauguaauguugaggggugggucgugauagcaaaagacaaugcaguaagauuuggggaaagugagcaaaucauuauuaccagagaaccauacguaucaugugacccaaauggaugcaaaauguaugccuugcaucaagggacuaccauuaggaacaaacauucaaacggaacaauucacgacagaacagccuucagaggucucaucuccacuccauugggcacuccaccaaccguaaguaauagugauuuuauauguguuggauggucaagcacaacuugccaugauggaauuggcagaaugacuaucuguauacaagggaauaaugacaaugccacagcaacgguuuauuauaacagaaggcugaccacuaccauuaagaccugggcuagaaacauucugaggacucaagagucagaaugugugugccacaacggcacaugugcaguuguaaugaccgaugggucggcuaguagucaagcccauacaaaaguaauguauuuccacaagggguugguaguuaaggaggaggcauugaagggaucggccaaacauauugaggagugcuccuguuacgggcacaaucaaaaggugaccugugugugcagagauaauuggcagggagcaaacagaccuauuauagaaauugacaugaacacauuggaacacacaaguagauaugugugcaccggaauucucaccgauacuagcagacccggggacaaaccuacuggugauuguuccaauccaauaacuggaaguccuggcgcuccgggagugaagggauuuggauuucuaaauggggauaauacauggcuugguaggaccaucagucccagaucaagaaguggauuugaaaugcugaaaauaccuaacgcagguauugaucccaauucuagaauagcugagcggcaggaaauugucgacaacagcaauuggucaggcuauuccggaagcuuuauugacuauuggaaugauaacagugaguguuacaauccauguuucuacguagaguuaauuagagggagacccgaagaggcuaaauaugugugguggacaaguaacagucuaauugcccuauguggaagcccauucccaguuggguccgguuccuuccccgauggggcacagauccaauacuuuucguaa

SEQ ID NO: 55743 - RNA, 1356 nt, Artificial Sequence
  derived and/or modified CDS sequence (wt) from neuraminidase__InfluenzaA__AGR33916
augaauccaaaucagaaacuauucgcaucauccggaguggcaauagcgcuuaguguacugaacuuauugauaggacucucaaaugucggauugaauguaucucuacaucuaaaagaaacaggacccaaacaggaagagaauuugacaugcaugacuaccaaagaaacugaauugggaacaccaagcuaucugcuguugaacaagagucuauguaauguugaagggugggucgugauagcaaaagacaaugcaguaagauuuggggaaagugagcaaaucauuauuaccagagaaccauacguaucaugugacccaaauggaugcaaaauguaugccuugcaucaagggacuaccauuaggaacaaacauucaaacggaacaauucacgacagaacagccuucagaggucucaucucuacuccauugggcacuccaccaaccguaaguaauagugauuuuauauguguuggauggucaagcacaacuugccaugauggaauuggcagaaugacuaucuguauacaagggaauaaugacaaugcuacagcaacgguuuauuauaacagaaggcugaccacuaccauuaagaccugggcuagaaacauucugaggacucaagagucagaaugugugugccacaacggcacaugugcaguuguaaugaccgaugggucggcuaguagucaagcccauacaaaaguaauguauuuccacaagggguugguaguuaaggaggaggcauugaagggaucggccaaacauauugaggagugcuccuguuacgggcacaaucaaaaggugaccugugugugcagagauaauuggcagggagcaaacagaccuauuauagaaauugacaugaacacauuggaacacacaaguagauaugugugcaccggaauucucaccgauacuagcagacccggggacaaaccuacuggugauuguuccaauccaauaacuggaaguccuggcgcuccgggagugaagggauuuggauuucuaaauggggauaauacauggcuugguaggaccaucagccccagaucaagaaguggguuugaaaugcugaaaauaccuaacgcagguauugaucccaauucuagaauagcugagcggcaggaaauugucgacaacagcaauuggucaggcuauuccggaagcuuuauugacuauuggaaugauaacagugaguguuacaauccauguuucuacguagaguuaauuagagggagacccgaagaggcuaaauaugugugguggacaaguaacagucuaauugcccuauguggaagcccauucccaguuggguccgguuccuuccccgauggggcacagauccaauacuuuucguaa

SEQ ID NO: 55744 - RNA, 1356 nt, Artificial Sequence
  derived and/or modified CDS sequence (wt) from neuraminidase__InfluenzaA__AGR33917
augaauccaaaucagaaacuauucgcauuauccggaguggcaauagcgcuuaguguacugaacuuauugauaggacucucaaaugucggauugaauguaucucuacaucuaaaagaaacaggacccaaacaggaagagaauuugacaugcaugacuaccaaagaaacugaauugggaacaccaagcuaucugcuguugaacaagagucuaugcaauguugaggggugggucgugauagcaaaagacaaugcaguaagauuuggggaaagugagcaaaucauuauuaccagagaaccauacguaucaugugacccaaauggaugcaaaauguaugccuugcaucaagggacuaccauuaggaacaaacauucaaacggaacaauucacgacagaacagccuucagaggucucaucuccacuccauugggcacuccaccaaccguaaguaauagugauuuuauauguguuggauggucaagcacaacuugccaugauggaauuggcagaaugacuaucuguauacaagggaauaaugacaaugcuacagcaacgguuuauuauaacagaaggcugaccacuaccauuaagaccugggcuagaaacauucugaggacucaagagucagaaugugugugccacaacggcacaugugcaguuguaaugaccgaugggucggcuaguggucaagcccauacaaaaguaauguauuuccacaagggguugguaguuaaggaggaggcauugaagggaucggccaaacauauugaggagugcuccuguuacgggcacaaucaaaaggugaccugugugugcagagauaauuggcagggagcaaacagaccuauuauagaaauugacaugaacacauuggaacacacaaguagauaugugugcaccggaauucucaccgauacuagcagacccggggacaaaccuacuggugauuguuccaauccaauaacuggaaguccuggcgcuccgggagugaagggauuuggauuucuaaauggggauaauacauggcuugguaggaccaucagucccagaucaagaaguggauuugaaaugcugaaaauaccuaacgcagguauugaucccaauucuagaauagcugagcggcaggaaauugucgacaacagcaauuggucaggcuauuccggaagcuuuauugacuauuggaaugauaacagugaguguuacaauccauguuucuacguagaguuaauuagagggagacccgaagaggcuaaauaugugugguggacaaguaacagucuaauugcccuauguggaagcccauucccaguuggguccgguuccuuccccgauggggcacagauccaauacuuuucguaa

SEQ ID NO: 55745 - RNA, 1356 nt, Artificial Sequence; identical to SEQ ID NO: 55655
  derived and/or modified CDS sequence (wt) from neuraminidase__InfluenzaA__AGR33918

SEQ ID NO: 55746 - RNA, 1398 nt, Artificial Sequence; identical to SEQ ID NO: 55734
  derived and/or modified CDS sequence (wt) from neuraminidase__InfluenzaA__AGR33919

SEQ ID NO: 55747 - RNA, 1413 nt, Artificial Sequence
  derived and/or modified CDS sequence (wt) from neuraminidase__InfluenzaA__AGR45094
augaauccaaaucagaaaauaauaaccauuggaucaaucaguauggcaaucggaauaauuagucuaauauugcaaauaggaaauauuauuucaauaugggcuagccacucaauucaaacuggaagucaaaaccacacuggaauaugcaaccaaagaaucauuacauaugaaaauagcaccugggugaaucaaacauauguuaauauuaacaacacuaauguuguugcuggaaaggacaaaacuucagugacauuggccggcaauucaucucuuugcccuauccgugggugggcuauauacacaaaagacaacagcauaagaauugguuccaaaggagauguuuuugucauaagagagccuuuuauaucauguucucacuuggaaugcagaaccuuuuuucugacccaaggugcucuauuaaaugacaagcauucaaaugggaccguuaaggacagaagcccuuauagggccuuaaugagcuguccucuaggugaagcuccgucuccauacaauucaagauuugaaucgguugcuuggucagcaagcgcaugccaugauggcaugggcuggcuaacaaucggaauuucugguccagauaauggagcaguggcuguacuaaaauacaacggcauaauaacugaaaccauaaaaaguuggaagaagcgaauauuaagaacacaagagucugaaugugucugugugaacgguucauguuuuaccauaaugaccgauggcccgaguaaugggccggccucguacagaaucuucaaaaucgagaaggggaagauuacuaaaucaauagaguuggaugcacccaauuaucauuacgaggaauguuccuguuacccagacaccggcacagugaugugugugugcagggacaauuggcacgguucaaaucgaccuugggugucuuuuaaucaaaaccuggauuaucaaauaggauacaucugcagugggguguucggugacaauccgcgucccaaagauggagaaggcagcuguaauccagugacuguugauggagcagacggaguaaagggguuuucauacagauaugguaaugguguuuggauaggaaggacuaaaaguaacagcuccagaaagggauuugagaugauuugggauccuaauggauggacagauaccgacagugauuucucugugaaacaggaugucgugccaaugacugauuggucaggguacagcggaaguuucguucaacauccugagcuaacaggauuggacuguaugagaccuugcuucuggguugaauuaaucagagggcgaccuagagaaaauacaacaaucuggacuagugggagcagcauuucuuuuuguggcguaaauagcgauacugcaaacuggucuuggccagacgaugccgaguugccauugaccauugacaaguag

SEQ ID NO: 55748 - RNA, 1413 nt, Artificial Sequence
  derived and/or modified CDS sequence (wt) from neuraminidase__InfluenzaA__AGR49780
augaacccaaaucaaaagauaauaaccauuggaucaaucaguauagcaaucggaauaauuagucuaauguugcaaauaggaaguauuauuucaauaugggcuagucacucaauccaaacuggaagucaaaacaacacuggaauaugcaaccaaagaaucaucacauaugaaaacagcaccugggugaaucacacauauguuaauauuaacaacacuaauguuguugcuggagaggacaaaacgucagugacauuggccggcaauucaucucuuuguucuaucaguggaugggcuauauacacaaaagacaacagcauaagaauuggcuccaaaggagauguuuuugucauaagagaaccuuucauaucauguucucacuuggaaugcagaaccuuuuuucugacccaaggcgcucuauuaaaugacaaacauucaaaugggaccguaaaggacagaaguccuuauagggccuuaaugagcuguccucuaggugaagcuccguccccauacaauucaaaguucgaaucaguugcauggucagcaagcgcaugccaugauggcaugggcugguuaacaaucggaauuucugguccagacaauggagcuguggcuguacuaaaauacaacggaauaauaacuggaaccauaaaaaguuggaaaaagcaaauauuaagaacacaagagucugaaugugucuguaugaacgggucauguuucaccauaaugaccgauggcccgaguaauaaagccgccucguacaaaauuuucaagaucgaaaaggggaagguuacuaaaucaauagaguugaaugcacccaauuuuuauuaugaggaaugcuccuguuacccagacacuggcauagugauguguguaugcagggacaacuggcaugguucaaaucgaccuugggugucuuuuaaucaaaauuuggauuaucaaauaggauacaucugcaguggaguguuuggugacaauccgcgucccgaagauggagagggcagcugcaauccagugacuguagauggagcaaacggaguaaaaggguuuucauacaaauaugguaaugguguuuggauaggaaggaccaaaaguaacagacuuagaaagggguuugagaugauuugggauccuaauggauggacaaauaccgacagugauuucucagugaaacaggauguuguagcaauaacugauuggucaggguacagcggaaguuucguccaacauccugaauugacaggauuggacuguauaagaccuugcuucuggguugaguuagucagagggcugccuagagaaaauacaacaaucuggacuagugggagcaguauuucuuuuuguggcguuaauagugauacugcaaacuggucuuggccagacggugcugaguugccguucaccauugacaaguag

SEQ ID NO: 55749 - RNA, 1410 nt, Artificial Sequence
  derived and/or modified CDS sequence (wt) from neuraminidase__InfluenzaA__AGR49804
augaauccaaaccaaaagauaauaaccauugguucggucuguaugacaauuggaauggcuaacuuaauauuacaaauuggaaacauaaucucaauauggauuagccacucaauucaacuugggaaucaaaaucagauugaaacaugcaaucaaagcgucauuacuuaugaaaacaacacuuggguaaaucagacauauguuaacaucagcaacaccaacuuugcugcuggacagucagugguuuccgugaaauuaacgggcaauuccucucucugcccuguuaguggaugggcuauauacaguaaagacaacaguguaagaaucgguuccaagggggauguguuugucauaagggaaccauucauaucaugcucccccuuggaaugcagaaccuucuucuugacucaaggggccuugcuaaaugacaaacauuccaauggaaccauuaaagacaggagcccauaucgaacccuaaugagcuguccuauuggugaaguucccucuccauacaacucaagauuugagucagucgcuuggucagcaagugcuugucaugauggcaucaauuggcuaacaauuggaauuucuggcccagacaauggggcaguggcuguguuaaaguacaacggcauaauaacagacacuaucaagaguuggagaaacaauauauugagaacacaagagucugaaugugcauguguaaaugguucuugcuuuacuguaaugaccgauggaccaaguaauggacaggccucauacaagaucuucagaauagaaaagggaaagauagucaaaucagucgaaaugaaugccccuaauuaucacuaugaggaaugcuccuguuauccugauucuagugaaaucacaugugugugcagggauaacuggcauggcucgaaucgaccgugggugucuuucaaccagaaucuggaauaucagauaggauacauaugcagugggauuuucggagacaauccacgcccuaaugauaagacaggcaguugugguccaguaucgucuaauggagcaaauggaguaaaaggauuuucauucaaauacggcaaugguguuuggauagggagaacuaaaagcauuaguucaagaaacgguuuugagaugauuugggauccgaacggauggacugggacagacaauaacuucucaauaaagcaagauaucguaggaauaaaugaguggucaggauauagcgggaguuuuguucagcauccagaacuaacagggcuggauuguauaagaccuugcuucuggguugaacuaaucagagggcgacccaaagagaacacaaucuggacuagcgggagcagcauauccuuuugugguguaaacagugacacuguggguuggucuuggccagacggugcugaguugccauuuaccauugacaaguaa

SEQ ID NO: 55750 - RNA, 1413 nt, Artificial Sequence; identical to SEQ ID NO: 52253
  derived and/or modified CDS sequence (wt) from neuraminidase__InfluenzaA__AGR49820

SEQ ID NO: 55751 - RNA, 1410 nt, Artificial Sequence
  derived and/or modified CDS sequence (wt) from neuraminidase__InfluenzaA__AGR49832
augaauccaaaucaaaagauaauaacgauuggcucuguuucucucaccauuuccacaauaugcuucuucaugcaaauugccaucuugauaacuacuguaacauugcauuucaagcaauaugaauucaacucccccccaaacaaccaagugaugcugugugaaccaacaauaauagaaagaaacauaacagagauaguguaucugaccaacaccacaauagagaaggaaauaugccccaaacuagcagaauacagaaauuggucaaagccgcaaugugacauuacaggauuugcaccuuuuucuaaggacaauucgauuaggcuuuccgcugguggggacaucugggugacaagagaaccuuaugugucaugcgauccugacaaguguuaucaauuugcccuuggacagggaacaacacuaaacaacgugcauucaaaugacacaguucgugauaggaccccuuaucggacccuauugaugaaugaguuagguguuccuuuucaucuggggaccaagcaagugugcauagcaugguccagcucaaguugucacgauggaaaagcauggcugcauguuuguauaacgggggaugauaaaaaugcaacugcuagcuucauuuacaaugggaggcuuguagauaguauuguuucaugguccaaagaaauccucaggacccaggagucagaaugcguuuguaucaauggaacuuguacagugguaaugacugaugggagugcuucaggaaaagcugauacuaaaauacuauucauugaggaggggaaaaucguucauacuagcacauugucaggaagugcucagcaugucgaggaaugcuccugcuauccucgauauccuggugucagaugugucugcagagacaacuggaaaggcuccaauaggcccaucguagauauaaacauaaaggaucauagcauuguuuccaguuauguguguucaggacuuguuggagacacacccagaaaaaacgacagcuccagcaguggccauuguuuggauccuaacaaugaagaagguggucauggagugaaaggcugggccuuugaugauggaaaugacguguggaugggaagaacgaucagcgagaagucacgcuuaggguaugaaaccuucaaagucauugaaggcugguccaacccuaaguccaaauugcagauaaauaggcaagucauaguugacagagguaauagguccgguuauucugguauuuucucuguugaaggcaaaagcugcaucaaucggugcuuuuauguggaguugauaaggggaagaaaagaggaaacugaagucuuguggaccucaaacaguauuguuguguuuuguggcaccucagguacauauggaacaggcucauggccugauggggcggacaucaaucucaugccuauauaa

SEQ ID NO: 55752 - RNA, 1413 nt, Artificial Sequence; identical to SEQ ID NO: 51950
  derived and/or modified CDS sequence (wt) from neuraminidase__InfluenzaA__AGR49844

SEQ ID NO: 55753 - RNA, 1413 nt, Artificial Sequence; identical to SEQ ID NO: 52253
  derived and/or modified CDS sequence (wt) from neuraminidase__InfluenzaA__AGR49856

SEQ ID NO: 55754 - RNA, 1413 nt, Artificial Sequence
  derived and/or modified CDS sequence (wt) from neuraminidase__InfluenzaA__AGR49868
augaacccaaaucaaaagauaauaaccauuggaucaaucaguauagcaauuggaauaauuagucuaauguugcaaauaggaaguauuauuucaauaugggcuagucacucaauccaaacuggaagucaaaacaacacuggaauaugcaaccaaagaaucaucacauaugaaaacagcaccugggugaaucacacauauguuaauauuaacaacacuaauguuguugcuggagaggacaaaacgucagugacauuggccggcaauucaucucuuuguucuaucaguggaugggcuauauacacaaaagacaacagcauaagaauuggcuccaaaggagauguuuuugucauaagagaaccuuucauaucauguucucacuuggaaugcagaaccuuuuuucugacccaaggcgcucuauuaaaugacaaacauucaaaugggaccguaaaggacagaaguccuuauagggccuuaaugagcuguccucuaggugaagcuccguccccauacaauucaaaguucgaaucaguugcauggucagcaagcgcaugccaugauggcaugggcugguuaacaaucggaauuucugguccagacaauggagcuguggcuguacuaaaauacaacggaauaauaacuggaaccauaaaaaguuggaaaaagcaaauauuaagaacacaagagucugaaugugucuguaugaacgggucauguuucaccauaaugaccgauggcccgaguaauaaagccgccucguacaaaauuuucaagaucgaaaaggggaagguuacuaaaucaauagaguugaaugcacccaauuuuuauuaugaggaaugcuccugcuacccagacacuggcauagugauguguguaugcagggacaacuggcaugguucaaaucgaccuugggugucuuuuaaucaaaauuuggauuaucaaauaggauacaucugcaguggaguguuuggugacaauccgcgucccgaggauggagagggcagcugcaauccagugacuguugauggagcaaacggaguaaaaggguuuucauacaaauaugguaaugguguuuggauaggaaggaccaaaaguaacagacuuagaaagggguuugagaugauuugggauccuaauggauggacaaauaccgacagugauuucucagugaaacaggauguuguagcaauaacugauuggucaggguacagcggaaguuucguccaacauccugaguugacaggauuggacuguauaagaccuugcuucuggguugaguuagucagagggcugccuagagaaaauacaacaaucuggacuagugggagcagcauuucuuuuuguggcguuaauagugauacugcaaacuggucuuggccagacggugcugaguugccguucaccauugacaaguag

SEQ ID NO: 55755 - RNA, 1410 nt, Artificial Sequence; identical to SEQ ID NO: 48749
  derived and/or modified CDS sequence (wt) from neuraminidase__InfluenzaA__AGR49880

SEQ ID NO: 55756 - RNA, 1410 nt, Artificial Sequence; identical to SEQ ID NO: 51254
  derived and/or modified CDS sequence (wt) from neuraminidase__InfluenzaA__AGR49891

SEQ ID NO: 55757 - RNA, 1410 nt, Artificial Sequence
  derived and/or modified CDS sequence (wt) from neuraminidase__InfluenzaA__AGR49903
augaauccaaaucagaagauaauaacgauuggcucuguuucucucaccauuuccacaauaugcuucuucaugcaaauugccaucuugauaacuacuguaacauugcauuucaagcaauaugaauucaacucccccccaaacaaccaagugaugcugugugaaccaacaauaauagaaagaaacauaacagagauaguguaucugaccaacaccaccauagagaaggaaauaugccccaaacuagcagaauacagaaauuggucaaagccgcaaugugacauuacaggauuugcaccuuuuucuaaggacaauucgauuaggcuuuccgcugguggggacaucugggugacaagagaaccuuaugugucaugcgauccugacaaguguuaucaauuugcccuuggacagggaacaacacuaaacaacgugcauucaaaugacacaguacaugauaggaccccuuaucggacccuauugaugaaugaguuagguguucccuuucaucuggggaccaagcaagugugcauagcaugguccagcucaaguugucacgauggaaaagcauggcugcauguuuguauaacgggggaugauaaaaaugcaacugcuagcuucauuuacaaugggaggcuuguagauaguauuguuucaugguccaaggaaauccucaggacccaggagucagaaugcguuuguaucaauggaacuuguacaguaguaaugacugaugggagugcuucaggaaaagcugauacuaaaauacuauucauugaggaggggaaaaucguucauacuagcacauugucaggaagugcucagcaugucgaggagugcuccugcuauccucgauauccuggugucagaugugucugcagagacaacuggaaaggcuccaauaggcccaucguagauauaaacauaaaggaucacagcauuguuuccaguuauguguguucaggacuuguuggagacacacccagaaaaaacgacagcuccagcaguggccauuguuuggauccuaacaaugaagaagguggucauggagugaaaggcugggccuuugaugauggaaaugacguguggaugggaagaacgaucagcgagaagucacgcuuaggguaugaaaccuucaaagucauugaaggcugguccaacccuaaguccaaauugcagauaaauaggcaagucauaguugacagagguaauagguccgguuauucugguauuuucucuguugaaggcaaaagcugcaucaaucggugcuuuuauguggaguugauaaggggaagaaaagaggaaacugaagucuuguggaccucaaacaguauuguuguguuuuguggcaccucagguacauauggaacaggcucauggccugauggagcggacaucaaucucaugccuauauaa

SEQ ID NO: 55758 - RNA, 1410 nt, Artificial Sequence
  derived and/or modified CDS sequence (wt) from neuraminidase__InfluenzaA__AGR49915
augaauccaaaucaaaagauaauaacgauuggcucuguuucucucaccauuuccacaauaugcuucuucaugcaaauugccaucuugauaacuacuguaacauugcauuucaagcaauaugaauucaacucccccccaaacaaccaagugaugcugugugaaccaacaauaauagaaagaaacauaacagagauaguguaucugaccaacaccaccauagagaaggaaauaugccccaaacuagcagaauacagaaauuggucaaagccgcaaugugacauuacaggauuugcaccuuuuucuaaggacaauucgauuaggcuuuccgcugguggggacaucugggugacaagagaaccuuaugugucaugcgauccugacaaguguuaucaauuugcccuuggacagggaacaacacuaaacaacgugcauucaaaugacacaguucgugauaggaccccuuaucggacccuauugaugaaugaguuagguguuccuuuucaucuggggaccaagcaagugugcauagcaugguccagcucaaguugucacgauggaaaagcauggcugcauguuuguauaacgggggaugauaaaaaugcaacugcuagcuucauuuacaaugggaggcuuguagauaguauuguuucaugguccaaagaaauccucaggacccaggagucagaaugcguuuguaucaauggaacuuguacaguaguaaugacugaugggagugcuucaggaaaagcugauacuaaaauacuauucauugaggaggggaaaaucguucauacuagcacauugucaggaagugcucagcaugucgaggaaugcuccugcuauccucgauauccuggugucagaugugucugcagagacaacuggaaaggcuccaauaggcccaucguagauauaaacauaaaggaucauagcauuguuuccaguuauguguguucaggacuuguuggagacacacccagaaaaaacgacagcuccagcaguggccauuguuuggauccuaacaaugaagaagguggucauggagugaaaggcugggccuuugaugauggaaaugacguguggaugggaagaacgaucagcgagaagucacgcuuaggguaugaaaccuucaaagucauugaaggcugguccaacccuaaguccaaauugcagauaaauaggcaagucauaguugacagagguaauagguccgguuauucugguauuuucucuguugaaggcaaaagcugcaucaaucggugcuuuuauguggaguugauaaggggaagaaaagaggaaacugaagucuuguggaccucaaacaguauuguuguguuuuguggcaccucagguacauauggaacaggcucauggccugauggggcggacaucaaucucaugccuauauaa

SEQ ID NO: 55759 - RNA, 1410 nt, Artificial Sequence
  derived and/or modified CDS sequence (wt) from neuraminidase__InfluenzaA__AGR49927
augaauccaaaucaaaagauaauaacgauuggcucuguuucucucaccauuuccacaauaugcuucuucaugcaaauugccaucuugauaacuacuguaacauugcauuucaagcaauaugaauucaacucccccccaaacaaccaagugaugcugugugaaccaacaauaauagaaagaaacauaacagagauaguguaucugaccaacaccaccauagagaaggaaauaugccccaaacuagcagaauacagaaauuggucaaagccgcaaugugacauuacaggauuugcaccuuuuucuaaggacaauucgauuaggcuuuccgcugguggggacaucugggugacaagagaaccuuaugugucaugcgauccugacaaguguuaucaauuugcccuuggacagggaacaacacuaaacaacgugcauucaaaugacacaguucgugauaggaccccuuaucggacccuauugaugaaugaguuagguguuccuuuucaucuggggaccaagcaagugugcauagcaugguccagcucaaguugucacgauggaaaagcauggcugcauguuuguauaacgggggaugauaaaaaugcaacugcuagcuucauuuacaaugggaggcuuguagauaguauuguuucaugguccaaagaaauccucaggacccaggagucagaaugcguuuguaucaauggaacuuguacaguaguaaugacugaugggagugcuucaggaaaagcugauacuaaaauacuauucauugaggaggggaaaaucguucauacuagcacauugucaggaagugcucagcaugucgaggaaugcuccugcuauccucgauauccuggugucagaugugucugcagagacaacuggaaaggcuccaauaggcccaucguagauauaaacauaaaggaucauagcauuguuuccaguuauguguguucaggacuuguuggagacacacccagaaaaaacgacagcuccagcaguggccauuguuuggauccuaacaaugaagaagguggucauggagugaaaggcugggccuuugaugauggaaaugacguguggaugggaagaacgaucagcgagaagucacgcuuaggguaugaaaccuucaaagucauugaaggcugguccaacccuaaguccaaauugcagauaaauaggcaagucauaguugacagagguaauagguccgguuauucugguauuuucucuguugaaggcaaaagcugcaucaaucggugcuuuuauguagaguugauaaggggaagaaaagaggaaacugaagucuuguggaccucaaacaguauuguuguguuuuguggcaccucagguacauauggaacaggcucauggccugauggggcggacaucaaucucaugccuauauaa

SEQ ID NO: 55760 - RNA, 1410 nt, Artificial Sequence
  derived and/or modified CDS sequence (wt) from neuraminidase__InfluenzaA__AGR49939
augaauccaaauaaaaagauaauaacgauuggcucuguuucucucaccauuuccacaauaugcuucuucaugcaaauugccaucuugauaacuacuguaacauugcauuucaagcaauaugaauucaacucccccccaaacaaccaagugaugcugugugaaccaacaauaauagaaagaaacauaacagagauaguguaucugaccaacaccaccauagagaaggaaauaugccccaaacuagcagaauacagaaauuggucaaagccgcaaugugacauuacaggauuugcaccuuuuucuaaggacaauucgauuaggcuuuccgcugguggggacaucugggugacaagagaaccuuaugugucaugcgauccugacaaguguuaucaauuugcccuuggacagggaacaacacuaaacaacgugcauucaaaugacacaguacgugauaggaccccuuaucggacccuauugaugaaugaguuagguguuccuuuucaucuggggaccaagcaagugugcauagcaugguccagcucaaguugucacgauggaaaagcauggcugcauguuuguauaacgggggaugauaaaaaugcaacugcuagcuucauuuacaaugggaggcuuguagauaguauuguuucaugguccaaagaaauccucaggacccaggagucagaaugcguuuguaucaauggaacuuguacaguaguaaugacugaugggagugcuucaggaaaagcugauacuaaaauacuauucauugaggaggggaaaaucguucauacuagcacauugucaggaagugcucagcaugucgaggaaugcuccugcuauccucgauauccuggugucagaugugucugcagagacaacuggaaaggcuccaauaggcccaucguagauauaaacauaaaggaucauagcauuguuuccaguuauguguguucaggacuuguuggagacacacccagaaaaaacgacagcuccagcaguggccauuguuuggauccuaacaaugaagaagguggucauggagugaaaggcugggccuuugaugauggaaaugacguguggaugggaagaacgaucagcgagaagucacgcuuaggguaugaaaccuucaaagucauugaaggcugguccaacccuaaguccaaauugcagauaaauaggcaagucauaguugacagagguaauagguccgguuauucugguauuuucucuguugaaggcaaaagcugcaucaaucggugcuuuuauguggaguugauaaggggaagaaaagaggaaacugaagucuuguggaccucaaacaguauuguuguguuuuguggcaccucagguacauauggaacaggcucauggccugauggggcggacaucaaucucaugccuauauaa

SEQ ID NO: 55761 - RNA, 1410 nt, Artificial Sequence
  derived and/or modified CDS sequence (wt) from neuraminidase__InfluenzaA__AGR49951
augaauccaaaucaaaagauaauaacgauuggcucuguuucucucaccauuuccacaauaugcuucuucaugcaaauugccaucuugauaacuacuguaacauugcauuucaagcaauaugaauucaacucccccccaaacaaccaagugaugcugugugaaccaacaauaauagaaagaaacauaacagagauaguguaucugaccaacaccaccauagagaaggaaauaugccccaaacuagcagaauacagaaauuggucaaagccgcaaugugacauuacaggauuugcaccuuuuucuaaggacaauucgauuaggcuuucugcugguggggacaucugggugacaagagaaccuuaugugucaugcgauccugacaaguguuaucaauuugcccuuggacagggaacaacacuaaacaacgugcauucaaaugacacaguacgugauaggaccccuuaucggacccuauugaugaaugaguuagguguuccuuuucaucuggggaccaagcaagugugcauagcaugguccagcucaaguugucacgauggaaaagcauggcugcauguuuguauaacgggggaugauaaaaaugcaacugcuagcuucauuuacaaugggaggcuuguagauaguauuguuucaugguccaaagacauccucaggacccaggagucagaaugcguuuguaucaauggaacuuguacaguaguaaugacugaugggagugcuucaggaaaagcugauacuaaaauacuauucauugaggaggggaaaaucguucauacuagcacauugucaggaagugcucagcaugucgaggagugcuccugcuauccucgauauccuggugucagaugugucugcagagacaacuggaaaggcuccaauaggcccaucguagauauaaacauaaaggaucauagcauuguuuccaguuauguguguucaggacuuguuggagacacacccagaaaaaacgacagcuccagcaguggccauuguuuggauccuaacaaugaagaagguggucauggagugaaaggcugggccuuugaugauggaaaugacguguggaugggaagaacgaucagcgagaagucacgcuuaggguaugaaaccuucaaagucauugaaggcugguccaacccuaaguccaaauugcagauaaauaggcaagucauaguugacagagguaauagguccgguuauucugguauuuucucuguugaaggcaaaagcugcaucaaucggugcuuuuauguggaguugauaaggggaagaaaagaggaaacugaagucuuguggaccucaaacaguauuguuguguuuuguggcaccucagguacauauggaacaggcucauggccugauggggcugaaaucaaucucaugccuauauaa

SEQ ID NO: 55762 - RNA, 1410 nt, Artificial Sequence
  derived and/or modified CDS sequence (wt) from neuraminidase__InfluenzaA__AGR49963
augaauccaaauaaaaagauaauaacgauuggcucuguuucucucaccauuuccacaauaugcuucuucaugcaaauugccaucuugauaacuacuguaacauugcauuucaagcaauaugaauucaacucccccccaaacaaccaagugaugcugugugaaccaacaauaauagaaagaaacauaacagagauaguguaucugaccaacaccaccauagagaaggaaauaugccccaaacuagcagaauacagaaauuggucaaagccgcaaugugacauuacaggauuugcaccuuuuucuaaggacaauucgauuaggcuuuccgcugguggggacaucugggugacaagagaaccuuaugugucaugcgauccugacaaguguuaucaauuugcccuuggacagggaacaacacuaaacaacgugcauucaaaugacacaguacgugauaggaccccuuaucggacccuauugaugaaugaguuagguguuccuuuucaucuggggaccaagcaagugugcauagcaugguccagcucaaguugucacgauggaaaagcauggcugcauguuuguauaacgggggaugauaaaaaugcaacugcuagcuucauuuacaaugggaggcuuguagauaguauuguuucaugguccaaagaaauccucaggacccaggagucagaaugcguuuguaucaauggaacuuguacaguaguaaugacugaugggagugcuucaggaaaagcugauacuaaaauacuauucauugaggaggggaaaaucguucauacuagcacauugucaggaagugcucagcaugucgaggaaugcuccugcuauccucgauauccuggugucagaugugucugcagagacaacuggaaaggcuccaauaggcccaucguagauauaaacauaaaggaucauagcauuguuuccaguuauguguguucaggacuuguuggagacacacccagaaaaaacgacagcuccagcaguggccauuguuuggauccuaacaaugaagaagguggucauggagugaaaggcugggccuuugaugauggaaaugacguguggaugggaagaacgaucagcaagaagucacgcuuaggguaugaaaccuuuaaagucauugaaggcugguccaacccuaaguccaaauugcagauaaauaggcaagucauaguugacagagguaauagguccgguuauucugguauuuucucuguugaaggcaaaagcugcaucaaucggugcuuuuauguggaguugauaaggggaagaaaagaggaaaccgaagucuuguggaccucaaacaguauuguuguguuuuguggcaccucagguacauauggaacaggcucauggccugauggggcggacaucaaucucaugccuauauaa

SEQ ID NO: 55763 - RNA, 1410 nt, Artificial Sequence
  derived and/or modified CDS sequence (wt) from neuraminidase__InfluenzaA__AGR49975
augaauccaaaccaaaagauaauaaccauugguucggucuguaugacaauuggaauggcuaacuuaauauuacaaauuggaaacauaaucucaauauggauuagucacucaauucaacuugggaaucaaaaucagauugaaacaugcaaucaaagcgucauuacuuaugaaaacaacacuuggguaaaucagacauauguuaacaucagcaacaccaacuuugcugcuggacagucagugguuuccgugaaauuagcgggcaauuccucucucugcccuguuaguggaugggcuauauacaguaaagacaacaguguaagaaucgguuccaagggggauguguuugucauaagggaaccauucauaucaugcucccccuuggaaugcagaaccuucuucuugacucaaggggccuugcuaaaugacaaacauuccaauggaaccauuaaagacaggagcccauaucgaacccuaaugagcuguccuauuggugaaguucccucuccauacaacucaagauuugagucagucgcuuggucagcaagugcuugucaugauggcaucaauuggcuaacaauuggaauuucuggcccagacaauggggcaguggcuguguuaaaguacaacggcauaauaacagacacuaucaagaguuggagaaacaauauauugagaacacaagagucugaaugugcauguguaaaugguucuugcuuuacuguaaugaccgauggaccaaguaauggacaggccucauacaagaucuucagaauagaaaagggaaaaauagucaaaucagucgaaaugaaugccccuaauuaucacuaugaggaaugcuccuguuauccugauucuagugaaaucacaugugugugcagggauaacuggcauggcucgaaucgaccgugggugucuuucaaccagaaucuggaauaucagauaggauacauaugcagugggauuuucggagacaauccacgcccuaaugauaagacaggcaguugugguccaguaucgucuaauggagcaaauggaguaaaaggauuuucauucaaauacggcaaugguguuuggauagggagaacuaaaagcauuaguucaagaaacgguuuugagaugauuugggauccgaacggauggacugggacagacaauaacuucucaauaaagcaagauaucguaggaauaaaugaguggucaggauauagcgggaguuuuguucagcauccagaacuaacagggcuggauuguauaagaccuugcuucuggguugaacuaaucagagggcgacccaaagagaacacaaucuggacuagcgggagcagcauauccuuuugugguguaaacagugacacuguggguuggucuuggccagacggugcugaguugccauuuaccauugacaaguaa

SEQ ID NO: 55764 - RNA, 1413 nt, Artificial Sequence
  derived and/or modified CDS sequence (wt) from neuraminidase__InfluenzaA__AGR49986
augaacccaaaucaaaagauaauaaccauuggaucaaucaguauagcaaucggaauaauuagucuaauguugcaaauaggaaguauuauuucaauaugggcuagucacucaauccaaacuggaagucaaaacaacacuggaauaugcaaccaaagaaucaucacauaugaaaacagcaccugggugaaucacacauauguuaauauuaacaacacuaauguuguugcuggagaggacaaaacgucagugacauuggccggcaauucaucucuuuguucuaucaguggaugggcuauauacacaaaagacaacagcauaagaauuggcuccaaaggagauguuuuugucauaagagaaccuuucauaucauguucucacuuggaaugcagaaccuuuuuucugacccaaggcgcucuauuaaaugacaaacauucaaaugggaccguaaaggacagaaguccuuauagggccuuaaugagcuguccucuaggugaagcuccguccccauacaauucaaaguucgaaucaguugcauggucagcaagcgcaugccaugauggcaugggcugguugacaaucggaauuucugguccagacaauggagcuguggcuguacuaaaauacaacggaauaauaacuggaaccauaaaaaguuggaaaaagcaaauauuaagaacacaagagucugaaugugucuguaugaacgggucauguuucaccauaaugaccgauggcccgaguaauaaagccgccucguacaaaauuuucaagaucgaaaaggggaagguuacuaaaucaauagaguugaaugcacccaauuuuuauuaugaggaaugcuccuguuacccagacacuggcauagugauguguguaugcagggacaacuggcaugguucaaaucgaccuugggugucuuuuaaucaaaauuuggauuaucaaauaggauacaucugcaguggaguguuuggugacaauccgcgucccgaagauggagagggcagcugcaauccagugacuguagauggagcaaacggaguaaaaggguuuucauacaaauaugguaaugguguuuggauaggaaggaccaaaaguaacagacuuagaaagggguuugagaugauuugggauccuaauggauggacaaauaccgacagugauuucucagugaaacaggauguuguagcaauaacugauuggucaggguacagcggaaguuucguccaacauccugaauugacaggauuggacuguauaagaccuugcuucuggguugaguuagucagagggcugccuagagaaaauacaacaaucuggacuagugggagcagcauuucuuuuuguggcguuaauagugauacugcaaacuggucuuggccagacggugcugaguugccguucaccauugacaaguag

SEQ ID NO: 55765 - RNA, 1413 nt, Artificial Sequence; identical to SEQ ID NO: 55764
  derived and/or modified CDS sequence (wt) from neuraminidase__InfluenzaA__AGR49998

SEQ ID NO: 55766 - RNA, 1410 nt, Artificial Sequence; identical to SEQ ID NO: 48749
  derived and/or modified CDS sequence (wt) from neuraminidase__InfluenzaA__AGR50010

SEQ ID NO: 55767 - RNA, 1410 nt, Artificial Sequence; identical to SEQ ID NO: 48749
  derived and/or modified CDS sequence (wt) from neuraminidase__InfluenzaA__AGR50021

SEQ ID NO: 55768 - RNA, 1410 nt, Artificial Sequence; identical to SEQ ID NO: 48750
  derived and/or modified CDS sequence (wt) from neuraminidase__InfluenzaA__AGR50032

SEQ ID NO: 55769 - RNA, 1410 nt, Artificial Sequence
  derived and/or modified CDS sequence (wt) from neuraminidase__InfluenzaA__AGR50043
augaauccaaaucaaaagauaauaacgauuggcucuguuucucucaccauuuccacaauaugcuucuucaugcaaauugccaucuugauaacuacuguaacauugcauuucaagcaauaugaauucaacucccccccaaacaaccaagugaugcugugugaaccaacaauaauagaaagaaacauaacagagauaguguaucugaccaacaccaccauagagaaggaaauaugucccaaacuagcagaauacagaaauuggucaaagccgcaaugugacauuacaggauuugcaccuuuuucuaaggacaauucgauuaggcuuuccgcugguggggacaucugggugacaagagaaccuuaugugucaugcgauccugacaaguguuaucaauuugcccuuggacagggaacaacacuaaacaacgugcauucaaauaacacaguacgugauaggaccccuuaucggacccuauugaugaaugaguuagguguuccuuuucaucuggggaccaagcaagugugcauagcaugguccagcucaaguugucacgauggaaaagcauggcugcauguuuguauaacgggggaugauaaaaaugcaacugcuagcuucauuuacaaugggaggcuuguagauaguguuguuucaugguccaaagacauccucaggacccaggagucagaaugcguuuguaucaauggaacuuguacaguaguaaugacugaugggagugcuucaggaaaagcugauacuaaaauacuauucauugaggaggggaaaaucguucauacuagcacacugucaggaagugcucagcaugucgaggagugcuccugcuauccucgauauccuggugucagaugugucugcagagacaacuggaaaggcuccaauaggcccaucguagauauaaacauaaaggaucauagcauuguuuccaguuauguguguucaggacuuguuggagacacacccagaaaaaacgacagcuccagcaguagccauuguuuggauccuaacaaugaagaagguggucauggagugaaaggcugggccuuugaugauggaaaugacguguggaugggaagaacgaucagcgagaagucacgcuuaggguaugaaaccuucaaagucauugaaggcugguccaacccuaaguccaaauugcagauaaauaggcaagucauaguugacagagguaauagguccgguuauucugguauuuucucuguugaaggcaaaagcugcaucaaucggugcuuuuauguggaguugauaaggggaagaaaagaggaaacugaagucuuguggaccucaaacaguauuguuguguuuuguggcaccucaggcacauauggaacaggcucauggccugauggggcggaccucaaucucaugccuauauaa

SEQ ID NO: 55770 - RNA, 1410 nt, Artificial Sequence
  derived and/or modified CDS sequence (wt) from neuraminidase__InfluenzaA__AGR50055
augaauccaaaccaaaagauaauaaccauugguucggucuguaugacgauuggaauggcuaacuuaauauuacaaauuggaaacauaaucucaauauggauuagccacucaauucaacuugggaaucaaaaucagauugaaacaugcaaucaaagcgucauuacuuaugaaaacaacacuuggguaaaucagacauauguuaacaucagcaacaccaacuuugcugcuggacagucagugguuuccgugaaauuagcgggcaauuccucucucugcccuguuaguggaugggcuauauacaguaaagacaacaguguaagaaucgguuccaagggggauguguuugucauaagggaaccauucauaucaugcucccccuuggaaugcagaaccuucuucuugacucaaggggccuugcuaaaugacaaacauuccaauggaaccauuaaagacaggagcccauaucgaacccuaaugagcuguccuauuggugaaguucccucuccauacaacucaagauuugagucagucgcuuggucagcaagugcuugucaugauggcaucaauuggcuaacaauuggaauuucuggcccagacaauggggcaguggcuguguuaaaguacaacggcauaauaacagacacuaucaagaguuggagaaacaauauauugagaacacaagagucugaaugugcauguguaaaugguucuugcuuuacuguaaugaccgauggaccaaguaauggacaggccucauacaagaucuucagaauagaaaagggaaagauagucaaaucagucgaaaugaaugccccuaauuaucacuaugaggaaugcuccuguuauccugauucuagugaaaucacaugugugugcagggauaacuggcauggcucgaaucgaccgugggugucuuucaaccagaaucuggaauaucagauaggauacauaugcagugggauuuucggagacaauccacgcccuaaugauaagacaggcaguugugguccaguaucgucuaauggagcaaauggaguaaaaggauuuucauucaaauacggcaaugguguuuggauagggagaacuaaaagcauuaguucaagaaacgguuuugagaugauuugggauccgaacggauggacugggacagacaauaacuucucaauaaagcaagauaucguaggaauaaaugaguggucaggauauagcgggaguuuuguucagcauccagaacuaacagggcuggauuguauaagaccuugcuucuggguugaacuaaucagagggcgacccaaagagaacacaaucuggacuagcgggagcagcauauccuuuugugguguaaacagugacacuguggguuggucuuggccagacggugcugaguugccauuuaccauugacaaguaa

SEQ ID NO: 55771 - RNA, 1410 nt, Artificial Sequence
  derived and/or modified CDS sequence (wt) from neuraminidase__InfluenzaA__AGR50066
augaauccaaaccaaaagauaauaaccauugguucggucuguaugacaauuggaauggcuaacuuaauauuacaaauuggaaacauaaucucaauauggauuagccacucaauucaacuugggaaucaaaaucagauugaaacaugcaaucaaagcgucauuacuuaugaaaacaacacuuggguaaaucagacauauguuaacaucagcaacaccaacuuugcugcuggacagucagugguuuccgugaaauuagcgggcaauuccucucucugcccuguuaguggaugggcuauauacaguaaagacaacaguguaagaaucgguuccaagggggauguguuugucauaagggaaccauucauaucaugcucccccuuggaaugcagaaccuucuucuugacucaaggggccuugcuaaaugacaaacauuccaauggaaccauuaaagacaggagcccauaucgaacccuaaugagcuguccuauuggugaaguucccucuccauacaacucaagauuugagucagucgcuuggucagcaagugcuugucaugauggcaucaauuggcugacaauuggaauuucuggcccagacaauggggcaguggcuguguuaaaguacaacggcauaauaacagacacuaucaagaguuggagaaacaauauauugagaacacaagagucugaaugugcauguguaaaugguucuugcuuuacuguaaugaccgauggaccaaguaauggacaggccucauacaagaucuucaaaauagaaaagggaaagauagucaaaucagucgaaaugaaugccccuaauuaucacuaugaggaaugcuccuguuauccugauucuagugaaaucacaugugugugcagggauaacuggcauggcucgaaucgaccgugggugucuuucaaccagaaucuggaauaucagauaggauacauaugcagugggauuuucggagacaauccacgcccuaaugauaagacaggcaguugugguccaguaucgucuaauggagcaaauggaguaaaaggauuuucauucaaauacggcaaugguguuuggauagggagaacuaaaagcauuaguucaagaaacgguuuugagaugauuugggauccgaacggauggacugggacagacaauaacuucucaauaaagcaagauaucguaggaauaaaugaguggucaggauauagcgggaguuuuguucagcauccagaacuaacagggcuggauuguauaagaccuugcuucuggguugaacuaaucagagggcgacccaaagagaacacaaucuggacuagcgggagcagcauauccuuuugugguguaaacagugacacuguggguuggucuuggccagacggugcugaguugccauuuaccauugacaaguaa

SEQ ID NO: 55772 - RNA, 1410 nt, Artificial Sequence; identical to SEQ ID NO: 48749
  derived and/or modified CDS sequence (wt) from neuraminidase__InfluenzaA__AGR50077

SEQ ID NO: 55773 - RNA, 1410 nt, Artificial Sequence; identical to SEQ ID NO: 48783
  derived and/or modified CDS sequence (wt) from neuraminidase__InfluenzaA__AGR50088

SEQ ID NO: 55774 - RNA, 1410 nt, Artificial Sequence; identical to SEQ ID NO: 48749
  derived and/or modified CDS sequence (wt) from neuraminidase__InfluenzaA__AGR50099

SEQ ID NO: 55775 - RNA, 1410 nt, Artificial Sequence; identical to SEQ ID NO: 48783
  derived and/or modified CDS sequence (wt) from neuraminidase__InfluenzaA__AGR50110

SEQ ID NO: 55776 - RNA, 1410 nt, Artificial Sequence
  derived and/or modified CDS sequence (wt) from neuraminidase__InfluenzaA__AGR50121
augaauccaaaccaaaagauaauaaccauugguucggucuguaugacaauuggaauggcuaacuuaauauuacaaauuggaaacauaaucucaauauggauuagccacucaauucaacuugggaaucaaaaucagauugaaacaugcaaucaaagcgucauuacuuaugaaaacaacacuuggguaaaucagacauauguuaacaucagcaacaccaacuuugcugcuggacagucagugguuuccgugaaauuagcgggcaauuccucucucugcccuguuaguggaugggcuauauacaguaaagacaacaguguaagaaucgguuccaagggggauguguuugucauaagggaaccauucauaucaugcucccccuuggaaugcagaaccuucuucuugacucaaggggccuugcuaaaugacaaacauuccaauggaaccauuaaagacaggagcccauaucgaacccuaaugagcuguccuauuggugaaguucccucuccauacaacucaagauuugagucagucgcuuggucagcaagugcuugucaugauggcaucaauuggcuaacaauuggaauuucuggcccagacaauggggcaguggcuguguuaaaguacaacggcauaauaacagacacuaucaagaguuggagaaacaauauauugagaacacaagagucugaaugugcauguguaaaugguucuugcuuuacuguaaugaccgauggaccaaguaauggacaggccucauacaagaucuucagaauagaaaagggaaagauagucaaaucagucgaaaugaaugccccuaauuaucacuaugaggaaugcuccuguuauccugauucuagugaaaucacaugugugugcagggauaacuggcauggcucgaaucgaccgugggugucuuucaaccagaaucuggaauaucagauaggauacauaugcagugggauuuucggagacaauccacgcccuaaugauaagacaggcaguugugguccaguaccgucuaauggagcaaauggaguaaaaggauuuucauucaaauacggcaaugguguuuggauagggagaacuaaaagcauuaguucaagaaacgguuuugagaugauuugggauccgaacggauggacugggacagacaauaacuucucaauaaagcaagauaucguaggaauaaaugaguggucaggauauagcgggaguuuuguucagcauccagaacuaacagggcuggauuguauaagaccuugcuucuggguugaacuaaucagagggcgacccaaagagaacacaaucuggacuagcgggagcagcauauccuuuugugguguaaacagugacacuguggguuggucuuggccagacggugcugaguugccauuuaccauugacaaguaa

SEQ ID NO: 55777 - RNA, 1410 nt, Artificial Sequence
  derived and/or modified CDS sequence (wt) from neuraminidase__InfluenzaA__AGR50132
augaauccaaaccaaaagauaauaaccauugguucggucuguaugacaauuggaauggcuaacuuaauauuacaaauuggaaacauaaucucaauauggauuagccacucaauucaacuugggaaucaaaaucagauugaaacaugcaaucaaagcgucauuacuuaugaaaacaacacuuggguaaaucagacauauguuaacaucagcaacaccaacuuugcugcuggacagucagugguuuccgugaaauuagcgggcaauuccucucucugcccuguuaguggaugggcuauauacaguaaagacaacaguguaagaaucgguuccaagggggauguguuugucauaagggaaccauucauaucaugcucccccuuggaaugcagaaccuucuucuugacucaaggggccuugcuaaaugacaaacauuccaauggaaccauuaaagacaggagcccauaucgaacccuaaugagcuguccuauuggugaaguucccucuccauacaacucaagauuugagucagucgcuuggucagcaagugcuugucaugauggcaucaauuggcuaacaauuggaauuucuggcccagacaauggggcaguggcuguguuaaaguacaacggcauaauaacagacacuaucaagaguuggagaaacaauauauugagaacacaagagucugaaugugcaugugcaaaugguucuugcuuuacuguaaugaccgauggaccaaguaauggacaggccucauacaagaucuucagaauagaaaagggaaaaauagucaaaucagucgaaaugaaugccccuaauuaucacuaugaggaaugcuccuguuauccugauucuagugaaaucacaugugugugcagggauaacuggcauggcucgaaucgaccgugggugucuuucaaccagaaucuggaauaucagauaggauacauaugcagugggauuuucggagacaauccacgcccuaaugauaagacaggcaguugugguccaguaucgucuaauggagcaaauggaguaaaaggauuuucauucaaauacggcaaugguguuuggauagggagaacuaaaagcauuaguucaagaaacgguuuugagaugauuugggauccgaacggauggacugggacagacaauaacuucucaauaaagcaagauaucguaggaauaaaugaguggucaggauauagcgggaguuucguucagcauccagaacuaacagggcuggauuguauaagaccuugcuucuggguugaacuaaucagagggcgacccaaagagaacacaaucuggacuagcgggagcagcauauccuuuugugguguaaacagugacacuguggguuggucuuggccagacggugcugaguugccauuuaccauugacaaguaa

SEQ ID NO: 55778 - RNA, 1410 nt, Artificial Sequence
  derived and/or modified CDS sequence (wt) from neuraminidase__InfluenzaA__AGR50143
augaauccaaaccaaaagauaauaaccauugguucggucuguaugacaauuggaauggcuaacuuaauauuacaaauuggaaacauaaucucaauauggauuagccacucaauucaacuugggaaucaaaaucagauugaaacaugcaaucaaagcgucauuacuuaugaaaacaacacuuggguaaaucagacauauguuaacaucagcaacaccaacuuugcugcuggacagucagugguuuccgugaaauuagcgggcaauuccucucucugcccuguuaguggaugggcuauauacaguaaagacaacaguguaagaaucgguuccaagggggauguguuugucauaagggaaccauucauaucaugcucccccuuggaaugcagaaccuucuucuugacucaaggggccuugcuaaaugacaaacauuccaauggaaccauuaaagacaggagcccauaucgaacccuaaugagcuguccuauuggugaaguucccucuccauacaacucaagauuugagucagucgcuuggucagcaagugcuugucaugauggcaucaauuggcuaacaauuggaauuucuggcccagacaauggggcaguggcuguguuaaaguacaacggcauaauaacagacacuaucaagaguuggagaaacaauauauugagaacacaagagucugaaugugcauguguaaaugguucuugcuuuacuguaaugaccgauggaccaaguaauggacaggccucauacaagaucuucagaauagaaaagggaaagauagucaaaucagucgaaaugaaugccccuaauuaucacuaugaggaaugcuccuguuauccugauucuagugaaaucacaugugugugcagagauaacuggcauggcucgaaucgaccgugggugucuuucaaccagaaucuggaauaucagauaggauacauaugcagugggauuuucggagacaauccacgcccuaaugauaagacaggcaguugugguccaguaucgucuaauggagcaaauggaguaaaaggauuuucauucaaauacggcaaugguguuuggauagggagaacuaaaagcauuaguucaagaaacgguuuugagaugauuugggauccgaacggauggacugggacagacaauaacuucucaauaaagcaagauaucguaggaauaaaugaguggucaggauauagcgggaguuuuguucagcauccagaacuaacagggcuggauuguauaagaccuugcuucuggguugaacuaaucagagggcgacccaaagagaacacaaucuggacuagcgggagcagcauauccuuuugugguguaaacagugacacuguggguuggucuuggccagacggugcugaguugccauuuaccauugacaaguaa

SEQ ID NO: 55779 - RNA, 1410 nt, Artificial Sequence
  derived and/or modified CDS sequence (wt) from neuraminidase__InfluenzaA__AGR50154
augaauccaaaccaaaagauaauaaccauugguucggucuguaugacaauuggaauggcuaacuuaauauuacaaauuggaaacauaaucucaauauggauuagccacucaauucaacuugggaaucaaaaucagauugaaacaugcaaucaaagcgucauuacuuaugaaaacaacacuuggguaaaucagacauauguuaacaucagcaacaccaacuuugcugcuggacagucagugguuuccgugaaauuagcgggcaauuccucucucugcccuguuaguggaugggcuauauacaguaaagacaacaguguaagaaucgguuccaagggggauguguuugucauaagggaaccauucauaucaugcucccccuuggaaugcagaaccuucuucuugacucaaggggcuuugcuaaaugacaaacauuccaauggaaccauuaaagacaggagcccauaucgaacccuaaugagcuguccuauuggugaaguucccucuccauacaacucaagauuugagucagucgcuuggucagcaagugcuugucaugauggcaucaauuggcuaacaauuggaauuucuggcccagacaauggggcaguggcuguguuaaaguacaacggcauaauaacagacacuaucaagaguuggagaaacaauauauugagaacacaagagucugaaugugcauguguaaaugguucuugcuuuacuguaaugaccgauggaccaaguaauggacaggccucauacaagaucuucagaauagaaaagggaaagauagucaaaucagucgaaaugaaugccccuaauuaucacuaugaggaaugcuccuguuauccugauucuagugaaaucacaugugugugcagggauaacuggcauggcucgaaucgaccgugggugucuuucaaccagaaucuggaauaucagauaggauacauaugcagugggauuuucggagacaauccacgcccuaaugauaagacaggcaguugugguccaguaucgucuaauggagcaaauggaguaaaaggauuuucauucaaauacggcaaugguguuuggauagggagaacuaaaagcauuaguucaagaaacgguuuugagaugauuugggauccgaacggauggacugggacagacaauaacuucucaauaaagcaagauaucguaggaauaaaugaguggucaggauauagcgggaguuuuguucagcauccagaacuaacagggcuggauuguauaagaccuugcuucuggguugaacuaaucagagggcgacccaaagagaacacaaucuggacuagcgggagcagcauauccuuuugugguguaaacagugacacuguggguuggucuuggccagacggugcugaguugccauuuaccauugacaaguaa

SEQ ID NO: 55780 - RNA, 1413 nt, Artificial Sequence; identical to SEQ ID NO: 55764
  derived and/or modified CDS sequence (wt) from neuraminidase__InfluenzaA__AGR50165

SEQ ID NO: 55781 - RNA, 1410 nt, Artificial Sequence; identical to SEQ ID NO: 48749
  derived and/or modified CDS sequence (wt) from neuraminidase__InfluenzaA__AGR50177

SEQ ID NO: 55782 - RNA, 1410 nt, Artificial Sequence; identical to SEQ ID NO: 48749
  derived and/or modified CDS sequence (wt) from neuraminidase__InfluenzaA__AGR50188

SEQ ID NO: 55783 - RNA, 1410 nt, Artificial Sequence
  derived and/or modified CDS sequence (wt) from neuraminidase__InfluenzaA__AGR50199
augaauccaaaccaaaagauaauaaccauugguucggucuguaugacaauuggaauggcuaacuuaauauuacaaauuggaaacauaaucucaauauggauuagccacucaauucaacuugggaaucaaaaucagauugaaacaugcaaucaaagcgucauuacuuaugaaaacaacacuuggguaaaucagacauauguuaacaucagcaacaccaacuuugcugcuggacagucagugguuuccgugaaauuagcgggcaauuccucucucugcccuguuaguggaugggcuauauacaguaaagacaacaguguaagaaucgguuccaagggggauguguuugucauaagggaaccauucauaucaugcucccccuuggagugcagaaccuucuucuugacucaaggggccuugcuaaaugacaaacauuccaauggaaccauuaaagacaggagcccauaucgaacccuaaugagcuguccuauuggugaaguucccucuccauacaacucaagauuugagucagucgcuuggucagcaagugcuugucaugauggcaucaauuggcuaacaauuggaauuucuggcccagacaauggggcaguggcuguguuaaaguacaacggcauaauaacagacacuaucaagaguuggagaaacaauauauugagaacacaagagucugaaugugcauguguaaaugguucuugcuuuacuguaaugaccgauggaccaaguaauggacaggccucauacaaaaucuucagaauagaaaagggaaagauagucaaaucagucgaaaugaaugccccuaauuaucacuaugaggaaugcuccuguuauccugauucuagugaaaucacaugugugugcagggauaacuggcauggcucgaaucgaccgugggugucuuucaaccagaaucuggaauaucagauaggauacauaugcagugggauuuucggagacaauccacgcccuaaugauaagacaggcaguugugguccaguaucgucuaauggagcaaauggaguaaaaggauuuucauucaaauacggcaaugguguuuggauagggagaacuaaaagcauuaguucaagaaacgguuuugagaugauuugggauccgaacggauggacugggacagacaauaacuucucaauaaagcaagauaucguaggaauaaaugaguggucaggauauagcgggaguuuuguucagcauccagaacuaacagggcuggauuguauaagaccuugcuucuggguugaacuaaucagagggcgacccaaagagaacacaaucuggacuagcgggagcagcauauccuuuugugguguaaacagugacacuguggguuggucuuggccagacggugcugaguugccauuuaccauugacaaguaa

SEQ ID NO: 55784 - RNA, 1410 nt, Artificial Sequence; identical to SEQ ID NO: 48749
  derived and/or modified CDS sequence (wt) from neuraminidase__InfluenzaA__AGR50210

SEQ ID NO: 55785 - RNA, 1410 nt, Artificial Sequence
  derived and/or modified CDS sequence (wt) from neuraminidase__InfluenzaA__AGR50221
augaauccaaaccaaaagauaauaaccauugguucggucuguaugacaauuggaauggcuaacuuaauauuacaaauuggaaacauaaucucaauauggauuagccacucaauucaacuugggaaucaaaaucagauugaaacaugcaaucaaagcgucauuacuuaugaaaacaacacuuggguaaaucagacauauguuaacaucagcaacaccaacuuugcugcuggacagucagugguuuccgugaaauuagcgggcaauuccucucucugcccuguuaguggaugggcuauauacaguaaagacaacaguguaagaaucgguuccaagggggauguguuugucauaagggaaccauucauaucaugcucccccuuggaaugcagaaccuucuucuugacucaaggggccuugcuaaaugacaaacauuccaauggaaccauuaaagacaggagcccauaucgaacccuaaugagcuguccuauuggugaaguucccucuccauacaacucaagauuugagucagucgcuuggucagcaagugcuugucaugauggcaucaauuggcuaacaauuggaauuucuggcccagacaauggggcaguggcuguguuaaaguacaacggcauaauaacagacacuaucaagaguuggagaaacaauauauugagaacacaagagucugaaugugcauguguaaaugguucuugcuuuacuguaaugaccgauggaccaaguaauggacaggccucauacaagaucuucagaauagaaaagggaaagauagucaaaucagucgaaaugaaugccccuaauuaucacuaugaggaaugcuccuguuauccugauucuagugaaaucacaugugugugcagggauaacuggcauggcucaaaucgaccgugggugucuuucaaccagaaucuggaauaucagauaggauacauaugcagugggauuuucggagacaauccacgcccuaaugauaagacaggcaguugugguccaguaucgucuaauggagcaaauggaguaaaaggauuuucauucaaauacggcaaugguguuuggauaggaagaacuaaaagcauuaguucaagaaacgguuuugagaugauuugggauccgaacggauggacugggacagacaauaacuucucaauaaagcaagauaucguaggaauaaaugaguggucaggauauagcgggaguuuuguucagcauccagaacuaacagggcuggauuguauaagaccuugcuucuggguugaacuaaucagagggcgacccaaagagaacacaaucuggacuagcgggagcagcauauccuuuugugguguaaacagugacacuguggguuggucuuggccagacggugcugaguugccauuuaccauugacaaguaa

SEQ ID NO: 55786 - RNA, 1410 nt, Artificial Sequence
  derived and/or modified CDS sequence (wt) from neuraminidase__InfluenzaA__AGR50232
augaauccaaaccaaaagauaauaaccauugguucggucuguaugacaauuggaauggcuaacuuaauauuacaaauuggaaacauaaucucaauauggauuagccacucaauucaacuugggaaucaaaaucagauugaaacaugcaaucaaagcgucauuacuuaugaaaacaacacuuggguaaaucagacauauguuaacaucagcaacaccaacuuugcugcuggacagucagugguuuccgugaaauuagcgggcaauuccucucucugcccuguuaguggaugggcuauauacaguaaagacaacaguguaagaaucgguuccaagggggauguguuugucauaagggaaccauucauaucaugcucccccuuggaaugcagaaccuucuucuugacucaaggggccuugcuaaaugacaaacauuccaauggaaccauuaaagacaggagcccauaucgaacccuaaugagcuguccuauuggugaaguucccucuccauacaacucaagauuugagucagucgcuuggucagcaagugcuugucaugauggcaucaauuggcuaacaauuggaauuucuggcccagacaauggggcaguggcuguguuaaaguacaacggcauaauaacagacacuaucaagaguuggagaaacaauauauugagaacacaagagucugaaugugcauguguaaaugguucuugcuuuacuguaaugaccgauggaccaaauaauggacaggccucauacaagaucuucagaauagaaaagggaaagauagucaaaucagucgaaaugaaugccccuaauuaucacuaugaggaaugcuccuguuauccugauucuagugaaaucacaugugugugcagggauaacuggcauggcucgaaucgaccgugggugucuuucaaccagaaucuggaauaucagauaggauacauaugcagugggauuuucggagacaauccacgcccuaaugauaagacaggcaguugugguccaguaucgucuaauggagcaaauggaguaaaaggauuuucauucaaauacggcaaugguguuuggauagggagaacuaaaagcauuaguucaagaaacgguuuugagaugauuugggauccgaacggauggacugggacagacaauaacuucucaauaaagcaagauaucguaggaauaaaugaguggucaggauauagcgggaguuuuguucagcauccagaacuaacagggcuggauuguauaagaccuugcuucuggguugaacuaaucagagggcgacccaaagagaacacaaucuggacuagcgggagcagcauauccuuuugugguguaaacagugacacuguagguuggucuuggccagacggugcugaguugccauuuaccauugacaaguaa

SEQ ID NO: 55787 - RNA, 1410 nt, Artificial Sequence
  derived and/or modified CDS sequence (wt) from neuraminidase__InfluenzaA__AGR50243
augaauccaaaccaaaagauaauaaccauugguucggucuguaugacaauuggaauggcuaacuuaauauuacaaauuggaaacauaaucucaauauggauuagccacucaauucaacuugggaaucaaaaucagauugaaacaugcaaucaaagcgucauuacuuaugaaaacaacacuuggguaaaucagacauauguuaacaucagcaacaccaacuuugcugcuggacagucagugguuuccgugaaauuagcgggcaauuccucucucugcccuguuaguggaugggcuauauacaguaaagacaacaguguaagaaucgguuccaagggggauguguuugucauaagggaaccauucauaucaugcucccccuuggaaugcagaaccuucuucuugacucaaggggccuugcuaaaugacaaacauuccaauggaaccauuaaagacaggagcccauaucgaacccuaaugagcuguccuauuggugaaguucccucuccauacaacucaagauuugagucagucgcuuggucagcaagugcuugucaugauggcaucaauuggcuaacaauuggaauuucuggcccagacaauggggcaguggcuguguuaaaguacaacggcauaauaacagacacuaucaagaguuggagaaacaauauauugagaacacaagagucugaaugugcauguguaaaugguucuugcuuuacuguaaugaccgauggaccaaguaauggacaggccucauacaagaucuucagaauagaaaagggaaagauagucaaaucagucgaaaugaaugccccuaauuaucacuaugaggaaugcuccuguuauccugauucuagugaaaucacaugugugugcagggauaacuggcauggcucgaaucgaccgugggugucuuucaaccagaaucuggaauaucagauaggauacauaugcagugggauuuucggagacaauccacgcccuaaugauaagacaggcaguugugguccaguaucgucuaauggagcaaauggaguaaaaggauuuucauucaaauacggcaaugguguuuggauagggagaacuaaaagcauuaguucaagaaacgguuuugagaugauuugggauccgaacggauggacugggacagacaauaacuucucaauaaagcaagauaucguaggaauaaaugaguggucaggauauagcgggaguuuuguucagcauccagaacuaacagggcuggauuguauaagaccuugcuucuggguugaacuaaucagagggcgacccaaagagaacacaaucuggacuagcgggaguagcauauccuuuugugguguaaacagugacacuguggguuggucuuggccagacggugcugaguugccauuuaccauugacaaguaa

SEQ ID NO: 55788 - RNA, 1410 nt, Artificial Sequence; identical to SEQ ID NO: 48749
  derived and/or modified CDS sequence (wt) from neuraminidase__InfluenzaA__AGR50254

SEQ ID NO: 55789 - RNA, 1410 nt, Artificial Sequence; identical to SEQ ID NO: 48749
  derived and/or modified CDS sequence (wt) from neuraminidase__InfluenzaA__AGR50265

SEQ ID NO: 55790 - RNA, 1410 nt, Artificial Sequence
  derived and/or modified CDS sequence (wt) from neuraminidase__InfluenzaA__AGR50276
augaauccaaaccaaaagauaauaaccauugguucggucuguaugacaauuggaauggcuaacuuaauauuacaaauuggaaacauaaucucaauauggauuagccacucaauucaacuugggaaucaaaaucagauugaaacaugcaaucaaagcgucauuacuuaugaaaacaacacuuggguaaaucagacauauguuaacaucagcaacaccaacuuugcugcugaacagucagugguuuccgugaaauuagcgggcaauuccucucucugcccuguuaguggaugggcuauauacaguaaagacaacaguguaagaaucgguuccaagggggauguguuugucauaagggaaccauucauaucaugcucccccuuggaaugcagaaccuucuucuugacucaaggggccuugcuaaaugacaaacauuccaauggaaccauuaaagacaggagcccauaucgaacccuaaugagcuguccuauuggugaaguucccucuccauacaacucaagauuugagucagucgcuuggucagcaagugcuugucaugauggcaucaauuggcuaacaauuggaauuucuggcccagacaauggggcaguggcuguguuaaaguacaacggcauaauaacagacacuaucaagaguuggagaaacaauauauugagaacacaagagucugaaugugcauguguaaaugguucuugcuuuacuguaaugaccgauggaccaaguaauggacaggccucauacaagaucuucagaauagaaaagggaaagauagucaaaucagucgaaaugaaugccccuaauuaucacuaugaggaaugcuccuguuauccugauucuagugaaaucacaugugugugcagagauaacuggcauggcucgaaucgaccgugggugucuuucaaccagaaucuggaauaucagauaggauacauaugcagugggauuuucggagacaauccacgcccuaaugauaagacaggcaguugugguccaguaucgucuaauggagcaaauggaguaaaaggauuuucauucaaauacggcaaugguguuuggauagggagaacuaaaagcauuaguucaagaaacgguuuugagaugauuugggauccgaacggauggacugggacagacaauaacuucucaauaaagcaagauaucguaggaauaaaugaguggucaggauauagcgggaguuuuguucagcauccagaacuaacagggcuggauuguauaagaccuugcuucuggguugaacuaaucagagggcgacccaaagagaacacaaucuggacuagcgggagcagcauauccuuuugugguguaaacagugacacuguggguuggucuuggccagacggugcugaguugccauuuaccauugacaaguaa

SEQ ID NO: 55791 - RNA, 1410 nt, Artificial Sequence; identical to SEQ ID NO: 48749
  derived and/or modified CDS sequence (wt) from neuraminidase__InfluenzaA__AGR50287

SEQ ID NO: 55792 - RNA, 1410 nt, Artificial Sequence
  derived and/or modified CDS sequence (wt) from neuraminidase__InfluenzaA__AGR50298
augaauccaaaccaaaagauaauaaccauugguucggucuguaugacaauuggaauggcuaacuuaauauuacaaauuggaaacacaaucucaauauggauuagccacucaauucaaccugggaaucaaaaucagauugaaacaugcaaucaaagcgucauuacuuaugaaaacaacacuuggguaaaucagacauauguuaacaucagcaacaccaacuuugcugcuggacagucagugguuuccgugaaauuagcgggcaauuccucucucugcccuguuaguggaugggcuauauacaguaaagacaacaguauaagaaucgguuccaagggggauguguuugucauaagggaaccauucauaucaugcucccccuuggaaugcagaaccuucuucuugacucaaggggccuugcuaaaugacaaacauuccaauggaaccauuaaagacaggagcccauaucgaacccuaaugagcuguccuauuggugaaguucccucuccauacaacucaagauuugagucagucgcuuggucagcaagugcuugucaugauggcaucaauuggcuaacaauuggaauuucuggcccagacaauggggcaguggcuguguuaaaguacaacggcauaauaacagacacuaucaagaguuggagaaacaauauauugagaacacaagagucugaaugugcauguguaaaugguucuugcuuuacuguaaugaccgauggaccaagugauggacaggccucauacaagaucuucagaauagaaaagggaaagauagucaaaucagucgaaaugaaugccccuaauuaucacuaugaggaaugcuccuguuauccugauucuagugaaaucacaugugugugcagggauaacuggcauggcucgaaucgaccgugggugucuuucaaccagaaucuggaauaucagauaggauacauaugcagugggauuuucggagacaauccacgcccuaaugauaagacaggcaguugugguccaguaucgucuaauggagcaaauggaguaaaaggauuuucauucaaauacggcaaugguguuuggauagggagaacuaaaagcauuaguucaagaaacgguuuugagaugauuugggauccgaacggauggacugggacagacaauaacuucucaauaaagcaagauaucguaggaauaaaugaguggucaggauauagcgggaguuuuguucagcauccagaacuaacagggcuggauuguauaagaccuugcuucuggguugaacuaaucagagggcgacccaaagagaacacaaucuggacuagcgggagcagcaucuccuuuugugguguaaacagugacacuguggguuggucuuggccagacggugcugaguugccauuuaccauugacaaguaa

SEQ ID NO: 55793 - RNA, 1410 nt, Artificial Sequence
  derived and/or modified CDS sequence (wt) from neuraminidase__InfluenzaA__AGR50309
augaauccaaaccaaaagauaauaaccauugguucggucuguaugacaauuggaauggcuaacuuaauauuacaaauuggaaacauaaucucaauauggauuagccacucaauucaacuugggaaucaaaaucagauugaaacaugcaaucaaagcgucauuacuuaugaaaacaacacuuggguaaaucagacauauguuaacaucagcaacaccaacuuugcugcuggacagucagugguuuccgugaaauuagcgggcaauuccucucucugcccuguuaguggaugggcuauauacaguaaagacaacaguguaagaaucgguuccaagggggauguguuugucauaagggaaccauucauaucaugcucccccuuggaaugcagaaccuucuucuugacucaaggggccuugcuaaaugacaaacauuccaauggaaccauuaaagacaggagcccauaucgaacccuaaugagcuguccuauuggugaaguucccucuccauacaacucaagauuugagucagucgcuuggucagcaagugcuugucaugauggcaucaauuggcuaacaauuggaauuucuggcccagacaauggggcaguggcuguguuaaaguacaacggcauaauaacagacacuaucaagaguuggagaaacaauauauugagaacacaagagucugaaugugcauguguaaaugguucuuguuuuacuguaaugaccgauggaccaaguaauggacaggccucauacaagaucuucagaauagaaaagggaaagauagucaaaucagucgaaaugaaugccccuaauuaucacuaugaggaaugcuccuguuauccugauucuagugaaaucacaugugugugcagggauaacuggcauggcucgaaucgaccgugggugucuuucaaccagaaucuggaauaucagauaggauacauaugcagugggauuuucggagacaauccacgcccuaaugauaagacaggcaguugugguccaguaucgucuaauggagcaaauggaguaaaaggauuuucauucaaauacggcaaugguguuuggauagggagaacuaaaagcauuaguucaagaaacgguuuugagaugauuugggauccaaacggauggacugggacagacaauaacuucucaauaaagcaagauaucguaggaauaaaugaguggucaggauauagcgggaguuuuguucagcauccagaacuaacagggcuggauuguauaagaccuugcuucuggguugaacuaaucagagggcgacccaaagagaacacaaucuggacuagcgggagcagcauauccuuuugugguguaaacagugacacuguggguuggucuuggccagacggugcugaguugccauuuaccauugacaaguaa

SEQ ID NO: 55794 - RNA, 1410 nt, Artificial Sequence; identical to SEQ ID NO: 48749
  derived and/or modified CDS sequence (wt) from neuraminidase__InfluenzaA__AGR50320

SEQ ID NO: 55795 - RNA, 1410 nt, Artificial Sequence; identical to SEQ ID NO: 48783
  derived and/or modified CDS sequence (wt) from neuraminidase__InfluenzaA__AGR50331

SEQ ID NO: 55796 - RNA, 1410 nt, Artificial Sequence
  derived and/or modified CDS sequence (wt) from neuraminidase__InfluenzaA__AGR50342
augaauccaaaccaaaagauaauaaccauugguucggucuguaugacaauuggaauggcuaacuuaauauuacaaauuggaaacauaaucucaauauggauuagccacucaauucaacuugggaaucaaaaucagauugaaacaugcaaucaaagcgucauuacuuaugaaaacaacacuuggguaaaucagacauauguuaacaucagcaacaccaacuuugcugcuggacagucagugauuuccgugaaauuagcgggcaauuccucucucugcccuguuaguggaugggcuauauacaguaaagacaacaguguaagaaucgguuccaagggggauguguuugucauaagggaaccauucauaucaugcucccccuuggaaugcagaaccuucuucuugacucaaggggccuugcuaaaugacaaacauuccaauggaaccauuaaagacaggagcccauaucgaacccuaaugagcuguccuauuggugaaguucccucuccauacaacucaagauuugagucagucgcuuggucagcaagugcuugucaugauggcaucaauuggcuaacaauuggaauuucuggcccagacaauggggcaguggcuguguuaaaguacaacggcauaauaacagacacuaucaagaguuggagaaacaauauauugagaacacaagagucugaaugugcauguguaaaugguucuugcuuuacuguaaugaccgauggaccaaguaauggacaggccucauacaagaucuucagaauagaaaagggaaagauagucaaaucagucgaaaugaaugccccuaauuaucacuaugaggaaugcuccuguuauccugauucuagugaaaucacaugugugugcagggauaacuggcauggcucgaaucgaccgugggugucuuucaaccagaaucuggaauaucagauaggauacauaugcagugggauuuucggagacaauccacgcccuaaugauaagacaggcaguugugguccaguaucgucuaauggagcaaauggaguaaaaggauuuucauucaaauacggcaaugguguuuggauagggagaacuaaaagcauuaguucaagaaacgguuuugagaugauuugggauccgaacggauggacugggacagacaauaacuucucaauaaagcaagauaucguaggaauaaaugaguggucaggauauagcgggaguuuuguucagcauccagaacuaacagggcuggauuguauaagaccuugcuucuggguugaacuaaucagagggcgacccaaagagaacacaaucuggacuagcgggagcagcauauccuuuugugguguaaacagugacacuguggguuggucuuggccagacggugcugaguugccauuuaccauugacaaguaa

SEQ ID NO: 55797 - RNA, 1410 nt, Artificial Sequence; identical to SEQ ID NO: 48749
  derived and/or modified CDS sequence (wt) from neuraminidase__InfluenzaA__AGR50353

SEQ ID NO: 55798 - RNA, 1413 nt, Artificial Sequence
  derived and/or modified CDS sequence (wt) from neuraminidase__InfluenzaA__AGR50364
augaacccaaaucaaaagauaauaaccauuggaucaaucaguauagcaaucggaauaauuagucuaauguugcaaauaggaaguauuauuucaauaugggcuagucacucaauccaaacuggaagucaaaacaacacuggaauaugcaaccaaagaaucaucacauaugaaaacagcaccugggugaaucacacauauguuaauauuaacaacacuaauguuguugcuggagaggacaaaacgucagugacauuggccggcaauucaucucuuuguucuaucaguggaugggcuauauacacaaaagacaacagcauaagaauuggcuccaaaggagauguuuuugucauaagagaaccuuucauaucauguucucacuuggaaugcagaaccuuuuuucugacccaaggcgcucuauuaaaugacaaacauucaaaugggaccguaaaggacagaaguccuuauagggccuuaaugagcuguccucuaggugaagcuccauccccauacaauucaaaguucgaaucaguugcauggucagcaagcgcaugccaugauggcaugggcugguuaacaaucggaauuucugguccagacaauggagcuguggcuguacuaaaauacaacggaauaauaacuggaaccauaaaaaguuggaaaaagcaaauauuaagaacacaagagucugaaugugucuguaugaacgggucauguuucaccauaaugaccgauggcccgaguaauaaagccgccucguacaaaauuuucaagaucgaaaaggggaagguuacuaaaucaauagaguugaaugcacccaauuuuuauuaugaggaaugcuccuguuacccagacacuggcauagugauguguguaugcagggacaacuggcaugguucaaaucgaccuugggugucuuuuaaucaaaauuuggauuaucaaauaggauacaucugcaguggaguguuuggugacaauccgcgucccgaagauggagagggcagcugcaauccagugacuguagauggagcaaacggaguaaaaggguuuucauacaaauaugguaaugguguuuggauaggaaggaccaaaaguaacagacuuagaaagggguuugagaugauuugggauccuaauggauggacaaauaccgacagugauuucucagugaaacaggauguuguagcaauaacugauuggucaggguacagcggaaguuucguccaacauccugaauugacaggauuggacuguauaagaccuugcuucuggguugaguuagucagagggcugccuagagaaaauacaacaaucuggacuagugggagcaguauuucuuuuuguggcguuaauagugauacugcaaacuggucuuggccagacggugcugaguugccguucaccauugacaaguag

SEQ ID NO: 55799 - RNA, 1410 nt, Artificial Sequence
  derived and/or modified CDS sequence (wt) from neuraminidase__InfluenzaA__AGR55170
augaauccaaaucaaaagauaauaacgauuggcucuguuucucucaccauuuccacaauaugcuucuucaugcaaauugccaucuugauaacuacuguaacauugcauuucaagcaauaugaauucaacucccccccaaacaaccaagugaugcugugugaaccaacaauaauagaaagaaacauaacagagauaguguaucugaccaacaccaccauagagaaggaaauaugccccaaacuagcagaauacagaaauuggucaaagccgcaaugugacauuacaggauuugcaccuuuuucuaaggacaauucgauuaggcuuuccgcugguggggacaucugggugacaagagaaccuuaugugucaugcgauccugacaaguguuaucaauuugcccuuggacagggaacaacacuaaacaacgugcauucaaaugacacaguacgugauaggaccccuuaucggacccuauugaugaaugaguuagguguuccuuuucaucuggggaccaagcaagugugcauagcaugguccagcucaaguugucacgauggaaaagcauggcugcauguuuguauaacgggggaugauaaaaaugcaacugcuagcuucauuuacaaugggaggcuuguagauaguauuguuucaugguccaaagaaauccucaggacccaggagucagaauguguuuguaucaauggaacuuguacaguaguaaugacugaugggagugcuucaggaaaagcugauacuaaaauacuauucauugaggaggggaaaaucguucauacuagcacauugucaggaagugcucagcaugucgaggagugcuccugcuauccucgauauccuggugucagaugugucugcagagacaacuggaaaggcuccaauaggcccaucguagauauaaacauaaaggaucauagcauuguuuccaguuauguguguucaggacuuguuggagacacacccagaaaaaacgacagcuccagcaguagccauuguuuggauccuaacaaugaagaagguggucauggagugaaaggcugggccuuugaugauggaaaugacguguggaugggaagaacgaucagcgagaagucacgcuuaggauaugaaaccuucaaagucauugaaggcugguccaacccuaauuccaaauugcagauaaauaggcaaaucauaguugacagagguaauagguccgguuauucugguauuuucucuguugaaggcaaaagcugcaucaaucgguguuuuuauguggaguugauaaggggaagaaaagaggaaacugaagucuuguggaccucaaacaguauuguuguguuuuguggcaccucagguacauauggaacaggcucauggccugauggggcggacaucaaucucaugccuauauaa

SEQ ID NO: 55800 - RNA, 1410 nt, Artificial Sequence
  derived and/or modified CDS sequence (wt) from neuraminidase__InfluenzaA__AGR55180
augaauccaaaucaaaagauaauaacaauuggcucuguuucucucaccauugccacaauaugcuuccuuaugcaaauugccauccugguaacuacuguaacauugcauuucaagcagcaugaaugcaacucccccccaaacaaccaaguaaugcugugugaaccaacaauaauagaaagaaacauaacagagauaguguaucugaccaacaccaccauagagaaggaaauaugccccaaacuagcagaauacagaaauuggucaaagccgcaauguaacauuacaggauuugcaccuuuuucuaaggacaauucgauucggcuuuccgcugguggggacaucugggugacaagagaaccuuaugugucaugcgauccugacaaguguuaucaauuugcccuugggcagggaacaacacuaaacaacgggcauucaaaugacacaguacaugauaggaccccuuaccggacccuauugaugaaugaauuggguguuccauuucauuugggaaccaggcaagugugcauagcaugguccagcucaaguugucacgauggaaaagcauggcugcauguuuguguaacuggggaugauaaaaaugcaacugcuagcuucauuuacaaugggaggcuuguagauaguauugguucaugguccaaaaaaauacucagaacccaggagucggaaugcguuuguaucaauggaacuuguacaguaguaaugacugaugggagcgcuucaggaaaagcugauacuaaaauacuauucauugaggaggggaaaaucguucauauuagcacauugucaggaagugcucagcaugucgaggagugcuccuguuauccucgauauccuggugucagaugugucugcagagacaacuggaaaggcuccaauaggcccauuguagauauaaauguaaaggauuauagcauuguuuccaguuaugugugcucaggacuuguuggagacacacccagaaaaaacgacagcuucagcaguagccauugccuagauccuaacaaugaggaagguggucauggagugaaaggcugggccuuugaugauggaaaugacguguggaugggaagaacgaucagcgagaaguuacgcucagguuaugaaaccuucaaagucaucgaaggcugguccaaaccuaacuccaaauuacagauaaauaggcaaguuauaguugaaagagguaacagguccgguuauucugguauuuucuccguugaaggcaaaagcugcaucaaucggugcuuuuauguggaguugauaaggggaaggaaagaggaaacugaagucugguggaccucaaacaguauuguuguguuuuguggcacaucagguacauauggaacaggcucauggccugauggggcggauaucaaucucaugccuauauaa

SEQ ID NO: 55801 - RNA, 1410 nt, Artificial Sequence
  derived and/or modified CDS sequence (wt) from neuraminidase__InfluenzaA__AGR55181
augaauccaaaucaaaagauaauaacaauuggcucuguuucucucaccauugccacaauaugcuuccuuaugcaaauugccauccugguaacuacuguaacauugcauuucaagcagcaugaaugcaacucccccccaaacaaccaaguaaugcugugugaaccaacaauaauagaaagaaacauaacagagauaguguaucugaccaacaccaccauagagaaggaaauaugccccaaacuagcagaauacagaaauuggucaaagccgcaauguaacauuacaggauuugcaccuuuuucuaaggacaauucgauucggcuuuccgcugguggggacaucugggugacaagagaaccuuaugugucaugugauccugacaaguguuaucaauuugcccuugggcagggaacaacacuaaacaacgggcauucaaaugacacaguacaugauaggaccccuuaccggacccuauugaugaaugaauuggguguuccauuucauuugggaaccaggcaagugugcauagcaugguccagcucaaguugucacgauggaaaagcauggcugcauguuuguguaacuggggaugauaaaaaugcaacugcuagcuucauuuacaaugggaggcuuguagauaguauugguucaugguccaaaaaaauacucagaacccaggagucggaaugcguuuguaucaauggaacuuguacaguaguaaugacugaugggagcgcuucaggaaaagcugauacuaaaauacuauucauugaggaggggaaaaucguccauauuagcacauugucaggaagugcucagcaugucgaggagugcuccuguuauccucgauauccuggugucagaugugucugcagagacaacuggaaaggcuccaauaggcccauuguagauauaaauguaaaggauuauagcauuguuuccaguuaugugugcucaggacuuguuggagacacacccagaaaaaacgacagcuucagcaguagccauugccuagauccuaacaaugaggaagguggucauggagugaaaggcugggccuuugaugauggaaaugacguguggaugggaagaacgaucagcgagaaguuacgcucagguuaugaaaccuucaaagucaucgaaggcugguccaaaccuaacuccaaauuacagauaaauaggcaaguuauaguugaaagagguaacagguccgguuauucugguauuuucuccguugaagguaaaagcugcaucaaucggugcuuuuauguggaguugauaaggggacggaaagaggaaacugaagucugguggaccucaaacaguauuguuguguuuuguggcaccucggguacauauggaacaggcucauggccugauggggcggauaucaaucucaugccuauauaa

SEQ ID NO: 55802 - RNA, 1410 nt, Artificial Sequence
  derived and/or modified CDS sequence (wt) from neuraminidase__InfluenzaA__AGR55183
augaauccaaaucaaaagauaauaacaauuggcucuguuucucucaccauugccacaauaugcuuccuuaugcaaauugccauccugguaacuacuguaacauugcauuucaagcagcaugaaugcaacucccccccaaacaaccaaguaaugcugugugaaccaacaauaauagaaagaaacauaacagagauaguguaucugaccaacaccaccauagagaaggaaauaugccccaaacuagcagaauacagaaauuggucaaagccgcaauguaacauuacaggauuugcaccuuuuucuaaggacaauucgauucggcuuuccgcugguggggacaucugggugacaagagaaccuuaugugucaugcgauccugacaaguguuaucaauuugcccuagggcagggaacaacacuaaacaacgggcauucaaaugacacaguacaugauaggaccccuuaccggacccuauugaugaaugaauuggguguuccauuucauuugggaaccaggcaagugugcauagcaugguccagcucaaguugucacgauggaaaagcauggcugcauguuuguguaacuggggaugauaaaaaugcaacugcuagcuucauuuacaaugggaggcuuguagauaguauugguucaugguccaaaaaaauacucagaacccaggagucggaaugcguuuguaucaauggaacuuguacaguaguaaugacugaugggagcgcuucaggaaaagcugauacuaaaauacuauucauugaggaggggaaaaucguucauauuagcacauugucaggaagugcucagcaugucgaggagugcuccuguuauccucgauauccuggugucagaugugucugcagagacaacuggaaaggcuccaauaggcccauuguagauauaaauguaaaggauuauagcauuguuuccaguuaugugugcucaggacuuguuggagacacacccagaaaaaacgacagcuucagcaguagccauugccuagauccuaacaaugaggaagguggucauggagugaaaggcugggccuuugaugauggaaaugacguguggaugggaagaacgaucagcgagaaguuacgcucagguuaugaaaccuucaaagucaucgaaggcugguccaaaccuaacuccaaauuacagauaaauaggcaaguuauaguugaaagagguaacagguccgguuauucugguauuuucuccguugaaggcaaaagcugcaucaaucggugcuuuuauguggaguugauaaggggaaggaaagaggaaacugaagucugguggaccucaaacaguauuguuguguuuuguggcaccucagguacauauggaacaggcucauggccugauggggcggauaucaaucucaugccuauauaa

SEQ ID NO: 55803 - RNA, 1410 nt, Artificial Sequence
  derived and/or modified CDS sequence (wt) from neuraminidase__InfluenzaA__AGR55184
augaauccaaaucaaaagauaauaacaauuggcucuguuucucucaccauugccacaauaugcuuccuuaugcaaauugccauccugguaacuacuguaacauugcauuucaagcagcaugaaugcaacucccccccaaaaaaccaaguaaugcugugugaaccaacaauaauagaaagaaacauaacagagauaguguaucugaccaacaccaccauagagaaggaaauaugccccaaacuagcagaauacagaaauuggucaaagccgcaauguaacauuacaggauuugcaccuuuuucuaaggacaauucgauucggcuuuccgcugguggggacaucugggugacaagagaaccuuaugugucaugcgauccugacaaguguuaucaauuugcccuugggcagggaacaacacuaaacaacgggcauucaaaugacacaguacaugauaggaccccuuaccggacccuauugaugaaugaauuggguguuccauuucauuugggaaccaggcaagugugcauagcaugguccagcucaaguugucacgauggaaaagcauggcugcauguuuguguaacuggggaugauaaaaaugcaacugcuagcuucauuuacaaugggaggcuuguagauaguauugguucaugguccaaaaaaauacucagaacccaggagucggaaugcguuuguaucaauggaacuuguacaguaguaaugacugaugggagcgcuucaggaaaagcugauacuaaaauacuauucauugaggaggggaaaaucguucauauuagcacauugucaggaagugcucagcaugucgaggagugcuccuguuauccucgauauccuggugucagaugugucugcagagacaacuggaaaggcuccaauaggcccauuguagauauaaauguaaaggauuauagcauuguuuccaguuaugugugcucagggcuuguuggagacacacccagaaaaaacgacagcuucagcaguagccauugccuagauccuaacaaugaggaagguggucauggagugaaaggcugggccuuugaugauggaaaugacguguggaugggaagaacgaucagcgagaaguuacgcucagguuaugaaaccuucaaagucaucgaaggcugguccaaaccuaacuccaaauuacagauaaauaggcaaguuauaguugaaagagguaacagguccgguuauucugguauuuucuccguugaaggcaaaagcugcaucaaucggugcuuuuauguggaguugauaaggggaaggaaagaggaaacugaagucugguggaccucaaacaguauuguuguguuuuguggcaccucagguacauauggaacaggcucauggccugauggggcggacaucaaucucaugccuauauaa

SEQ ID NO: 55804 - RNA, 1410 nt, Artificial Sequence
  derived and/or modified CDS sequence (wt) from neuraminidase__InfluenzaA__AGR55185
augaauccaaaucaaaagauaauaacaauuggcucuguuucucucaccauugccacaauaugcuuccuuaugcaaauugccauccugguaacuacuguaacauugcauuucaagcagcaugaaugcaacucccccccaaaaaaccaaguaaugcugugugaaccaacaauaauagaaagaaacauaacagagauaguguaucugaccaacaccaccauagagaaggaaauaugccccaaacuagcagaauacagaaauuggucaaagccgcaauguaacauuacaggauuugcaccuuuuucuaaggacaauucgauucggcuuuccgcugguggggacaucugggugacaagagaaccuuaugugucaugcgauccugacaaguguuaucaauuugcccuugggcagggaacaacacuaaacaacgggcauucaaaugacacaguacaugauaggaccccuuaccggacccuauugaugaaugaauuggguguuccauuucauuugggaaccaggcaagugugcauagcaugguccagcucaaguugucacgauggaaaagcauggcugcauguuuguguaacuggggaugauaaaaaugcaacugcuagcuucauuuacaaugggaggcuuguagauaguauugguucaugguccaaaaaaauacucagaacccaggagucggaaugcguuuguaucaauggaacuuguacaguaguaaugacugaugggagcgcuucaggaaaagcugauacuaaaauacuauucauugaggaggggaaaaucguucauauuagcacauugucaggaagugcucagcaugucgaggagugcuccuguuauccucgauauccuggugucagaugugucugcagagacaacuggaaaggcuccaauaggcccauuguagauauaaauguaaaggauuauagcauuguuuccaguuaugugugcucagggcuuguuggagacacacccagaaaaaacgacagcuucagcaguagccauugccuagauccuaacaaugaggaagguggucauggagugaaaggcugggccuuugaugauggaaaugacguguggaugggaagaacgaucagcgagaaguuacgcucagguuaugaaaccuucaaagucaucgaaggcugguccaaaccuaacuccaaauuacagauaaauaggcaaguuauaguugaaagagguaacagguccgguuauucugguauuuucuccguugaaggcaaaagcugcaucaaucggugcuuuuauguggaguugauaaggggaaggaaagaggaaacugaagucugguggaccucaaacaguauuguuguguuuuguggcaccucacguacauauggaacaggcucauggccugauggggcggacaucaaucucaugccuauauaa

SEQ ID NO: 55805 - RNA, 1410 nt, Artificial Sequence
  derived and/or modified CDS sequence (wt) from neuraminidase__InfluenzaA__AGR55186
augaauccaaaucaaaagauaauaacgauuggcucuguuucucucaccauuuccacaauaugcuucuucaugcaaauugccauccugauaacuacuguaacauugcauuucaagcaauaugaauucaacucccccccaaacaaccaagugaugcugugugaaccaacaauaauagaaagaaacauaacagagauaguguaucugaccaacaccaccauagagaaggaaauaugccccaaacuagcagaauacagaaauuggucaaagccgcaaugugacauuacaggauuugcaccuuuuucuaaggacaauucgauucggcuuuccgcugguggggacaucugggugacaagagaaccuuaugugucaugcgauccugacaaguguuaucaauuugcccuuggacagggaacaacacuaaacaacgugcauucaaaugacacaguacaugauaggaccccuuaucggacccuauugaugaaugaguuagguguuccauuucaucuggggaccaagcaagugugcauagcaugguccagcucaaguugucacgauggaaaagcauggcugcauguuuguguaacgggggaugauaaaaaugcaacugcuagcuucauuuacaaugggaggcuuguagauaguauuguuucaugguccaaaaaaauccucaggacccaggagucagaaugcguuuguaucaauggaacuuguacaguaguaaugacugaugggagugcuucaggaaaagcugauacuaaaauauuauucauugaggaggggaaaauuguucauacuagcacauugucaggaagugcucagcaugucgaggagugcuccuguuauccucgauauccuggugucagaugugucugcagagacaacuggaaaggcuccaauaggcccaucguagauauaaacauaaaggauuauagcauuguuuccaguuaugugugcucaggacuuguuggagacacacccagaaaaaacgacagcuccagcaguagccauugcuuggaaccuaacaaugaggaagguggucauggagugaaaggcugggccuuugaugauggaaaugacguguggaugggaagaacgaucagcgagaaguuacgcucaggauaugaaaccuucaaagucauugaaggcugguccaacccuaauuccaaauugcagauaaauaggcaagucauaguugacagagguaauagguccgguuauucugguauuuucucuguugaaggcaaaagcugcaucaaucggugcuuuuauguggaguugauaaggggaagaaaacaggaaacugaagucuuguggaccucaaacaguauuguuguguuuuguggcaccucagguacauauggaacaggcucauggccugauggggcggacaucaaucucaugccuauauaa

SEQ ID NO: 55806 - RNA, 1410 nt, Artificial Sequence
  derived and/or modified CDS sequence (wt) from neuraminidase__InfluenzaA__AGR55187
augaauccaaaucaaaagauaauaacaauuggcucuguuucucucaccauugccacaauaugcuuccuuaugcaaauugccauccugguaacuacuguaacauugcauuucaagcagcaugaaugcaacucccccccaaacaaccaaguaaugcugugugaaccaacaauaauagaaagaaacauaacagagauaguguaucugaccaacaccaccauagagaaggaaauaugccccaaacuagcagaauacagaaauuggucaaagccgcaauguaacauuacaggauuugcaccuuuuucuaaggacaauucgauucggcuuuccgcugguggggacaucugggugacaagagaaccuuaugugucaugcgauccugacaaguguuaucaauuugcccuagggcagggaacaacacuaaacaacgggcauucaaaugacacaguacaugauaggaccccuuaccggacccuauugaugaaugaauuggguguuccauuucauuugggaaccaggcaagugugcauagcaugguccagcucaaguugucacgauggaaaagcauggcugcauguuuguguaacuggggaugauaaaaaugcaacugcuagcuucauuuacaaugggaggcuuguagauaguauugguucaugguccaaaaaaauacucagaacccaggagucggaaugcguuuguaucaauggaacuuguacaguaguaaugacugaugggagcgcuucaggaaaagcugauacuaaaauacuauucauugaggaggggaaaaucguccauauuagcacauugucaggaagugcucagcaugucgaggagugcuccuguuauccucgauauccuggugucagaugugucugcagagacaacuggaaaggcuccaauaggcccauuguagauauaaauguaaaggauuauagcauuguuuccaguuaugugugcucaggacuuguuggagacacacccagaaaaaacgacagcuucagcaguagccauugccuagauccuaacaaugaggaagguggucauggagugaaaggcugggccuuugaugauggaaaugacguguggaugggaagaacgaucagcgagaaguuacgcucagguuaugaaaccuucaaagucaucgaaggcugguccaaaccuaacuccaaauuacagauaaauaggcaaguuauaguugaaagagguaacagguccgguuauucugguauuuucuccguugaagguaaaagcugcaucaaucggugcuuuuauguggaguugauaaggggaaggaaagaggaaacugaagucugguggaccucaaacaguauuguuguguuuuguggcaccucagguacauauggaacaggcucauggccugauggggcggauaucaaucucaugccuauauaa

SEQ ID NO: 55807 - RNA, 1410 nt, Artificial Sequence; identical to SEQ ID NO: 54242
  derived and/or modified CDS sequence (wt) from neuraminidase__InfluenzaA__AGR55192

SEQ ID NO: 55808 - RNA, 1410 nt, Artificial Sequence
  derived and/or modified CDS sequence (wt) from neuraminidase__InfluenzaA__AGR55195
augaauccaaaucaaaagauaauaacgauuggcucuguuucucucaccauuuccacaauaugcuucuucaugcaaauugccaucuugauaacuacuguaacauugcauuucaagcaauaugaauucaacucccccccaaacaaccaagugaugcugugugaaccaacaauaauagaaagaaacauaacagagauaguguaucugaccaacaccaccauagagaaggaaauaugccccaaacuagcagaauacagaaauuggucaaagccgcaaugugacauuacaggauuugcaccuuuuucuaaggacaauucgauuaggcuuuccgcugguggggacaucugggugacaagagaaccuuaugugucaugcgauccugacaaguguuaucaauuugcccuuggacagggaacaacacuaaacaacgugcauucaaaugacacaguacaugauaggaccccuuaucggacccuauugaugaaugaguuagguguuccauuucaucuggggaccaagcaagugugcauagcaugguccagcucaaguugucacgauggaaaagcauggcugcauguuuguguaacgggggaugauaaaaaugcaacugcuagcuucauuuacaauggaaggcuuguagauaguauuguuucaugguccaaagaaauccucaggacccaggagucagaaugcguuuguaucaauggaacuuguacaguaguaaugacugaugggagugcuucaggaaaagccgauacuaaaauacuauucauugaggaggggaaaaucguucauacuagcacauugucaggaagugcucagcaugucgaggagugcuccugcuauccucgauauccuggugucagaugugucugcagagaccacuggaaaggcuccaauaggcccaucguagauauaaacauaaaggauuauagcauuguuuccaguuaugugugcucaggacuuguuggagacacacccagaaaaaacgacagcuccagcaguagccauugcuuggauccuaacaaugaagaagguggucauggagugaaaggaugggccuuugaugauggaaaugacguguggaugggaagaacgaucagcgagaaguuacgcuuaggauaugaaaccuucaaagucauugaaggcugguccaacccuaauuccaaauugcagauaaauaggcaagucauaguugacagagguaauagguccgguuauucugguauuuucucuguugaaggcaaaagcugcaucaaucggugcuuuuauguggaguugauaaggggaagaaaagaggaaacugaagucuuguggaccucaaacaguauuguuguguuuuguggcaccucagguacauauggaacaggcucauggccugauggggcggacaucaaucucaugccuauauaa

SEQ ID NO: 55809 - RNA, 1410 nt, Artificial Sequence
  derived and/or modified CDS sequence (wt) from neuraminidase__InfluenzaA__AGR55204
augaauccaaaucaaaagauaauaacgauuggcucuguuucucucaccauuuccacaauaugcuucuucaugcaaauugccaucuugauaacuacuguaacauugcauuucaagcaauaugaauucaacucccccccaaacaaccaagugaugcugugugaaccaacaauaauagaaagaaacauaacagagauaguguaucugaccaacaccaccauagagaaggaaauaugccccaaacuagcagaauacagaaauuggucaaagccgcaaugugacauuacaggauuugcaccuuuuucuaaggacaauucgauuaggcuauccgcugguggggacaucugggugacaagagaaccuuaugugucaugcgauccugacaaguguuaucaauuugcccuuggacagggaacaacacuaaacaacgugcauucaaaugacacaguacgugauaggaccccuuaucggacccuauugaugaaugaguuagguguuccuuuucaucuggggaccaagcaagugugcauagcaugguccagcucaaguugucacgauggaaaagcauggcugcauguuuguauaacgggggaugauaaaaaugcaacugcuagcuucauuuacaaugggaggcuuguagauaguauuguuucaugguccaaagaaauccucaggacccaggagucagaaugcguuuguaucaauggaacuuguacaguaguaaugacugaugggagugcuucaggagaagcugauacuaaaauacuauucauugaggaggggaaaaucguucauacuagcacauugucaggaagugcucagcauguagaggagugcuccugcuauccucgauauccuggugucagaugugucugcagagacaacuggaaaggcuccaauaggcccaucguagauauaaacauaaaggaucauagcauuguuuccaguuauguguguucaggacuuguuggagacacacccagaaaaaacgacagcuccagcaguagccauuguuuggauccuaacaaugaagaagguggucauggagugaaaggcugggccuuugaugauggaaaugacguguggaugggaagaacgaucagcgagaagucacgcuuaggguaugaaaccuucaaagucauugaaggcugguccaacccuaaguccaaauugcagauaaauaggcaagucauaguugacagagguaauagguccgguuauucugguauuuucucuguugaaggcaaaagcugcaucaaucggugcuuuuauguggaguugauaaggggaagaaaagaggaaacugaagucuuguggaccucaaacaguauuguuguguuuuguggcaccucacguacauauggaacaggcucauggccugauggggcggacaucaaucucaugccuauauaa

SEQ ID NO: 55810 - RNA, 1410 nt, Artificial Sequence
  derived and/or modified CDS sequence (wt) from neuraminidase__InfluenzaA__AGR55218
augaauccaaaucaaaagauaauaacgauuggcucuguuucucucaccauuuccacaauaugcuucuucaugcaaauugccaucuugauaacuacuguaacauugcauuucaagcaauaugaauucaacucccccccaaacaaccaaguggugcugugugaaccaacaauaauagaaagaaacauaacagagauaguguaucugaccaacaccaccauagagaaggaaauaugcccuaaacuagcagaauacagaaauuggucaaagccgcaaugugacaucacaggauuugcaccuuuuucuaaggacaauucgauuaggcuuuccgcugguggggacaucugggugacaagagaaccuuaugugucaugcgauccugacaaguguuaucaauuugcccucggacagggaacaacacuaaacaacgugcauucaaauaacacaguacgugauaggaccccuuaccggacccuauugaugaaugaguuagguguuccuuuucaucuggggaccaagcaagugugcauagcaugguccagcucaaguugucacgauggaaaagcauggcugcauguuuguauaacgggggaugauaaaaaugcaacugcuagcuucauuuacaaugggaggcuuguagauaguauuguuucaugguccaaagaaauccucaggacccaggagucagaaugcguuuguaucaauggaacuuguacaguaguaaugacugaugggagugcuucaggaaaagcugauacuaaaauacuauucauugaggaggggaaaaucguucauacuagcacauugucaggaagugcucagcaugucgaggagugcuccugcuauccucgauauccuggugucagaugugucugcagagacaacuggaaaggcuccaauaggcccaucguagauauaaacauaaaggaucauagcauuguuuccaguuauguguguucaggacuuguuggagacacacccagaaaaaacgacagcuccagcaguagccauuguuuggauccuaacaaugaagaagguggucauggagugaaaggcugggccuuugaugauggaaaugacguguggaugggaagaacgaucagcgagaagucacgcuuaggguaugaaaccuucaaagucauugaaggcugguccaacccuaaguccaaauugcagauaaauaggcaagucauaguugacagagguaauagguccgguuauucugguauuuucucuguugaaggcaaaagcugcaucaaucggugcuuuuauguggaguugauaaggggaagaaaagaggaaacugaagucuuguggaccucaaacaguauuguuguguuuuguggcaccucagguacauauggaacaggcucauggccugauggggcggacaucaaucucaugccuauauaa

SEQ ID NO: 55811 - RNA, 1410 nt, Artificial Sequence
  derived and/or modified CDS sequence (wt) from neuraminidase__InfluenzaA__AGT18726
augaauccaaaccaaaagauaauaaccauugguucggucuguaugacaauuggaauggcuaacuuaauauuacaaauuggaaacauaaucucaauauggauuagccacucaauucaacuugggaaucaaagucagauugaaacaugcaaucaaagcgucauuacuuaugaaaacaacacuuggguaaaucagacauauguuaacaucagcaacaccaacuuugcugcuggacagucagugguuuccgugaaauuagcgggcaauuccucucucugcccuguuaguggaugggcuauauacaguaaagacaacaguguaagaaucgguuccaagggggauguguuugucauaagggaaccauucauaucaugcucccccuuggaaugcagaaccuucuucuugacucaaggggccuugcuaaaugacaaacauuccaauggaaccauuaaagacaggagcccauaucgaacccuaaugagcuguccuauuggugaaguucccucuccauacaacucaagauuugagucggucgcuuggucagcaagugcuugucaugauggcaucaauuggcuaacaauuggaauuucuggcccagacaguggggcaguggcuguauuaaaguacaauggcauaauaacagacacuaucaagaguuggagaaacaauauauugagaacacaagagucugaaugugcauguguaaaugguucuugcuuuaccauaaugaccgauggaccaagugauggacaggccucauacaagaucuucagaauagaaaagggaaagauagucaaaucagucgaaaugaaugccccuaauuaucacuaugaggaaugcuccuguuauccugauucuagugaaaucacaugugugugcagggauaacuggcauggcucgaaucgaccgugggugucuuucaaccagaaucuggaauaucagauaggauacauaugcagugggauuuuuggagacaauccacguccuaaugauaagacaggcaguugugguccaguaucgucuaauggagcaaauggaguaaaaggauuuucauucaaauacggcaaugguguuuggauagggagaacuaaaagcauuaguucaagaaaagguuuugagaugauuugggauccaaauggauggacugggacagacaauaacuucucaauaaagcaagauaucguaggaauaaaugaguggucaggauauagcgggaguuuuguucagcauccagaacuaacagggcuggauuguauaagaccuugcuucuggguugaacuaaucagagggcgacccaaagagaacacaaucuggacuagcgggagcagcauauccuuuugugguguaaacagugacacuguggguuggucuuggccagacggugcugaguugccauuuaccauugacaaguaa

SEQ ID NO: 55812 - RNA, 1410 nt, Artificial Sequence
  derived and/or modified CDS sequence (wt) from neuraminidase__InfluenzaA__AGT18727
augaauccaaaccaaaagauaauaaccauugguucggucuguaugacaauuggaauggcuaacuuaauauuacaaauuggaaacauaaucucaauauggauuagccacucaauucaacuugggagucaaaaucagauugaaacaugcaaucaaagcgucauuacuuaugaaaacaacacuuggguaaaucagacauauguuaacaucagcaacaccaacuuugcugcuggacagucagugguuuccgugaaauuagcgggcaauuccucucucugcccuguuaguggaugggcuauauacaguaaagacaacaguguaagaaucgguuccaagggggauguguuugucauaagggaaccauucauaucaugcucccccuuggaaugcagaaccuucuucuugacucaaggggccuugcuaaaugacaaacauuccaauggaaccauuaaagacaggagcccauaucgaacccuaaugagcuguccuauuggugaaguucccucuccauacaacucaagauuugagucggucgcuuggucagcaagugcuugucaugauggcaucaauuggcuaacaauuggaauuucuggcccagacaguggggcaguggcuguauuaaaguacaauggcauaauaacagacacuaucaagaguuggagaaacaauauauugagaacacaagagucugaaugugcauguguaaaugguucuugcuuuaccauaaugaccgauggaccaagugauggacaggccucauacaagaucuucagaauagaaaagggaaagauagucaaaucagucgaaaugaaugccccuaauuaucacuaugaggaaugcuccuguuauccugauucuagugaaaucacaugugugugcagggauaacuggcauggcucgaaucgaccgugggugucuuucaaccagaaucuggaauaucagauaggauacauaugcagugggauuuucggagacaauccacgcccuaaugauaagacaggcaguugugguccaguaucgucuaauggagcaaaugggguaaaaggauuuucauucaaauacggcaaugguguuuggauagggagaacuaaaagcauuaguucaagaaaagguuuugagaugauuugggauccaaauggauggucugggacagacaauaacuucucaauaaagcaagauaucguaggaauaaaugaguggucaggauauagcgggaguuuuguucagcauccagaacuaacagggcuggauuguauaagaccuugcuucuggguugaacuaaucagagggcgacccaaagagaacacaaucuggacuagcgggagcagcauauccuuuugugguguaaacagugacacuguggguuggucuuggccagacggugcugaguugccauuuaccauugacaaguaa

SEQ ID NO: 55813 - RNA, 1410 nt, Artificial Sequence
  derived and/or modified CDS sequence (wt) from neuraminidase__InfluenzaA__AGT18728
augaauccaaaccaaaagauaauaaccauugguucggucuguaugacaauuggaauggcuaacuuaauauuacaaauuggaaacauaaucucaauauggauuagccacucaauucaacuugggaaucaaagucagauugaaacaugcaaucaaagcgucauuacuuaugaaaacaacacuuggguaaaucagacauauguuaacaucagcaacaccaacuuugcugcuggacagucagugguuuccgugaaauuagcgggcaauuccucucucugcccuguuaguggaugggcuauauacaguaaagacaacaguguaagaaucgguuccaagggggauguguuugucauaagggaaccauucauaucaugcucccccuuggaaugcagaaccuucuucuugacucaaggggccuugcuaaaugacaaacauuccaauggaaccauuaaagacaggagcccauaucgaacccuaaugagcuguccuauuggugaaguucccucuccauacaacucaagauuugagucggucgcuuggucagcaagugcuugucaugauggcaucaauuggcuaacaauuggaauuucuggcccagacaguggggcaguggcuguauuaaaguacaauggcauaauaacagacacuaucaagaguuggagaaacaauauauugagaacacaagagucugaaugugcauguguaaaugguucuugcuuuaccauaaugaccgauggaccaagugauggacaggccucauacaagaucuucagaauagaaaagggaaagauagucaaaucagucgaaaugaaugccccuaauuaucacuaugaggaaugcuccuguuauccugauucuagugaaaucacaugugugugcagggauaacuggcauggcucgaaucgaccgugggugucuuucaaccagaaucuggaauaucagauaggauacauaugcagugggauuuucggagacaauccacgcccuaaugauaagacaggcaguugugguccaguaucgucuaauggagcaaauggaguaaaaggauuuucauucaaauacggcaaugguguuuggauagggagaacuaaaagcauuaguucaagaaaagguuuugagaugauuugggauccaaauggauggacugggacagacaauaacuucucaauaaagcaagauaucguaggaauaaaugaguggucaggauauagcgggaguuuuguucagcauccagaacuaacagggcuggauuguauaagaccuugcuucuggguugaacuaaucagagggcgacccaaagagaacacaaucuggacuagcgggagcagcauauccuuuugugguguaaacagugacacuguggguuggucuuggccagacggugcugaguugccauuuaccauugacaaguaa

SEQ ID NO: 55814 - RNA, 1410 nt, Artificial Sequence
  derived and/or modified CDS sequence (wt) from neuraminidase__InfluenzaA__AGT18729
augaauccaaaccaaaagauaauaaccauuggacaggucuguaugacaauuggaauggcuaacuuaauauuacaaauuggaaacauaaucucaauauggauuagccacucaauucaacuugggagucaaaaucagauugaaacaugcaaucaaagcgucauuacuuaugaaaacaacacuuggguaaaucagacauauguuaacaucagcaacaccaacuuugcugcuggacagucagugguuuccgugaaauuagcgggcaauuccucucucugcccuguuaguggaugggcuauauacaguaaagacaacaguguaagaaucgguuccaagggggauguguuugucauaagggaaccauucauaucaugcucccccuuggaaugcagaaccuucuucuugacucaaggggccuugcuaaaugacaaacauuccaauggaaccauuaaagacaggagcccauaucgaacccuaaugagcuguccuauuggugaaguucccucuccauacaacucaagauuugagucggucgcuuggucagcaagugcuugucaugauggcaucaauuggcuaacaauuggaauuucuggcccagacaguggggcaguggcuguauuaaaguacaauggcauaauaacagacacuaucaagaguuggagaaacaauauauugagaacacaagagucugaaugugcauguguaaaugguucuugcuuuaccauaaugaccgauggaccaagugauggacaggccucauacaagaucuucagaauagaaaagggaaagauagucaaaucagucgaaaugaaugccccuaauuaucacuaugaggaaugcuccuguuauccugauucuagugaaaucacaugugugugcagggauaacuggcauggcucgaaucgaccgugggugucuuucaaccagaaucuggaauaucagauaggauacauaugcagugggauuuucggagacaauccacgcccuaaugauaagacaggcaguugugguccaguaucgucuaauggagcaaauggaguaaaaggauuuucauucaaauacggcaaugguguuuggauagggagaacuaaaagcauuaguucaagaaaagguuuugagaugauuugggauccaaauggauggacugggacagacaauaacuucucaauaaagcaagauaucguaggaauaaaugaguggucaggauauagcgggaguuuuguucagcauccagaacuaacagggcuggauuguauaagaccuugcuucuggguugaacuaaucagagggcgacccaaagagaacacaaucuggacuagcgggagcagcauauccuuuugugguguaaacagugacacuguggguuggucuuggccagacggugcugaguugccauuuaccauugacaaguaa

SEQ ID NO: 55815 - RNA, 1410 nt, Artificial Sequence
  derived and/or modified CDS sequence (wt) from neuraminidase__InfluenzaA__AGT18730
augaauccaaaccaaaagauaauaaccauugguucggucuguaugacaauuggaauggcuaacuuaauauuacaaauuggaaacauaaucucaauauggauuagccacucaauucaacuugggaaucaaagucagauugaaacaugcaaucaaagcgucauuacuuaugaaaacaacacuuggguaaaucagacauauguuaacaucagcaacaccaacuuugcugcuggacagucagugguuuccgugaaauuagcgggcaauuccucucucugcccuguuaguggaugggcuauauacaguaaagacaacaguguaagaaucgguuccaagggggauguguuugucauaagggaaccauucauaucaugcucccccuuggagugcagaaccuucuucuugacucaaggggccuugcuaaaugacaaacauuccaauggaaccauuaaagacaggagcccauaucgaacccuaaugagcuguccuauuggugaaguucccucuccauacaacucaagauuugagucggucgcuuggucagcaagugcuugucaugauggcaucaauuggcuaacaauuggaauuucuggcccagacaguggggcaguggcuguauuaaaguacaauggcauaauaacagacacuaucaagaguuggagaaacaauauauugagaacacaagagucugaaugugcauguguaaaugguucuugcuuuaccauaaugacugauggaccaagugauggacaggccucauacaagaucuucagaauagaaaagggaaagauagucaaaucagucgaaauuaaugccccuaauuaucacuaugaggaaugcuccuguuauccugauucuagugaaaucacaugugugugcagggauaacuggcauggcucgaaucgaccgugggugucuuucaaccagaaucuggaauaccagauaggauacauaugcagugggauuuucggagacaauccacgcccuaaugauaagacaggcaguugugguccaguaucgucuaauggagcaaauggaguaaaaggauuuucauucaaauacggcaaugguguuuggauagggagaacuaaaagcauuaguucaagaaaagguuuugagaugauuugggauccaaauggauggacugggacagacaauaacuucucaauaaagcaagauaucguaggaauaaaugaguggucaggauauagcgggaguuuuguucagcauccagaacuaacagggcuggauuguauaagaccuugcuucuggguugaacuaaucagagggcgacccaaagagaacacaaucuggacuagcgggagcagcauauccuuuugugguguaaacagugacacuguggguuggucuuggccagacggugcugaguugccauuuaccauugacaaguaa

SEQ ID NO: 55816 - RNA, 1410 nt, Artificial Sequence
  derived and/or modified CDS sequence (wt) from neuraminidase__InfluenzaA__AGT18731
augaauccaaaccaaaagauaauaaccauugguucggucuguaugacaauuggaauggcuaacuuaauauuacaaauuggaaacauaaucucaauauggauuagccacucaauucaacuugggaaucaaagucagauugaaacaugcaaucaaagcgucauuacuuaugaaaacaacacuuggguaaaucagacauauguuaacaucagcaacaccaacuuugcugcuggacagucagugguuuccgugaaauuagcgggcaauuccucucucugcccuguuaguggaugggcuauauacaguaaagacaacaguguaagaaucgguuccaagggggauguguuugucauaagggaaccauucauaucaugcucccccuuggaaugcagaaccuucuucuugacucaaggggccuugcuaaaugacaaacauuccaauggaaccauuaaagacaggagcccauaucgaacccuaaugagcuguccuauuggugaaguucccucuccauacaacucaagauuugagucggucgcuuggucagcaagugcuugucaugauggcaucaauuggcuaacaauuggaauuucuggcccagacaguggggcaguggcuguauuaaaguacaauggcauaauaacagacacuaucaagaguuggagaaacaauauauugagaacacaagagucugaaugugcauguguaaaugguucuugcuuuaccauaaugaccgauggaccaagugauggacaggccucauacaagaucuucagaauagaaaagggaaagauagucaaaucagucgaaaugaaugccccuaauuaucacuaugaggaaugcuccuguuauccugauucuagugaaaucacaugugugugcagggauaacuggcauggcucgaaucgaccgugggugucuuucaaccagaaucuggaauaucagauaggauacauaugcagugggauuuucggagacaauccacgcccuaaugauaagacaggcaguugugguccaguaucgucuaauggagcaaauggaguaaaaggauuuucauucaaauacggcaaugguguuuggauagggagaacuaaaagcauuaguucaagaaaagguuuugagaugauuugggauccaaauggauggacugggacagacaauaacuucucaauaaagcaagauaucguaggaauaaaugaguggucaggauauagcgggaguuuuguucagcauccagaacuaacagggcuggauuguauaagaccuugcuucuggguugaacuaaucagagggcgacccaaagagaacacaaucuggacuagcgggagcagcauauccuucugugguguaaacagugacacuguggguuggucuuggccagacggugcugaguugccauuuaccauugacaaguaa

SEQ ID NO: 55817 - RNA, 1410 nt, Artificial Sequence
  derived and/or modified CDS sequence (wt) from neuraminidase__InfluenzaA__AGT18732
augaauccaaaccaaaagauaauaaccauugguucggucuguaugacaauuggaauggcuaacuuaauauuacaaauuggaaacauaaucucaauauggauuagccacucaauucaacuugggaaucaaagucagauugaaacaugcaaucaaagcgucauuacuuaugaaaacaacacuuggguaaaucagacauauguuaacaucagcaacaccaacuuugcugcuggacagucagugguuuccgugaaauuagcgggcaauuccucucucugcccuguuaguggaugggcuauauacaguaaagacaacaguguaagaaucgguuccaagggggauguguuugucauaagggaaccauucauaucaugcucccccuuggaaugcagaaccuucuucuugacucaaggggccuugcuaaaugacaaacauuccaauggaaccauuaaagacaggagcccauaucgaacccuaaugagcuguccuauuggugaaguucccucuccauacaacucaagauuugagucggucgcuuggucagcaagugcuugucaugauggcaucaauuggcuaacaauuggaauuucuggcccagacaguggggcaguggcuguauuaaaguacaauggcauaauaacagacacuaucaagaguuggagaaacaauauauugagaacacaagagucugaaugugcauguguaaaugguucuugcuuuaccauaaugaccgauggaccaagugauggacaggccucauacaagaucuucagaauagaaaagggaaagauagucaaaucagucgaaaugaaugccccuaauuaucacuaugaggaaugcuccuguuauccugauucuagugaaaucacaugugugugcagggauaacuggcauggcucgaaucgaccgugggugucuuucaaccagaaucuggaauaucagauaggauacauaugcagugggauuuucggagacaauccacgcccuaaugauaagacaggcaguugugguccaguaucgucuaauggagcaaauggaguaaaaggauuuucauucaaauacggcaaugguguuuggauagggagaacuaaaagcauuaguucaagaaaagguuuugagaugauuugggauccaaauggauggacugggacagacaauaacuucucaauaaagcaagauaucguaggaauaaaugaguggucaggauauagcgggaguuuuguucagcauccagaacuaacagggcuggauuguauaagaccuugcuucuggguugaacuaaucagagggcgacccaaagagaacacaaucuggacuagaggaagcagcauauccuuuugugguguaaacagugacacuguggguuggucuuggccagacggugcugaguugccauuuaccauugacaaguaa

SEQ ID NO: 55818 - RNA, 1410 nt, Artificial Sequence
  derived and/or modified CDS sequence (wt) from neuraminidase__InfluenzaA__AGT18733
augaauccaaaccaaaagauaauaaccauugguucggucuguaugacaauuggaauggcuaacuuaauauuacaaauuggaaacauaaucucaauauggauuagccacucaauucaacuugggaaucaaagucagauugaaacaugcaaucaaagcgucauuacuuaugaaaacaacacuuggguaaaucagacauauguuaacaucagcaacaccaacuuugcugcuggacagucagugguuuccgugaaauuagcgggcaauuccucucucugcccuguuaguggaugggcuauauacaguaaagacaacaguguaagaaucgguuccaagggggauguguuugucauaagggaaccauucauaucaugcucccccuuggaaugcagaaccuucuucuugacucaaggggccuugcuaaaugacaaacauuccaauggaaccauuaaagacaggagcccauaucgaacccuaaugagcuguccuauuggugaaguucccucuccauacaacucaagauuugagucggucgcuuggucagcaagugcuugucaugauggcaucaauuggcuaacaauuggaauuucuggcccagacaguggggcaguggcuguauuaaaguacaauggcauaauaacagacacuaucaagaguuggagaaacaauauauugagaacacaagagucugaaugugcauguguaaaugguucuugcuuuaccauaaugaccgauggaccaagugauggacaggccucauacaagaucuucagaauagaaaagggaaagauagucaaaucagucgaaaugaaugccccuaauuaucacuaugaggaaugcuccuguuauccugauucuagugaaagcacaugugugugcagggauaacuggcauggcucgaaucgaccgugggugucuuucaaccagaaucuggaauaucagauaggauacauaugcagugggauuuucggagacaauccacgcccuaaugauaagacaggcaguugugguccaguaucgucuaauggagcaaauggaguaaaaggauuuucauucaaauacggcaaugguguuuggauagggagaacuaaaagcauuaguucaagaaaagguuuugagaugauuugggauccaaauggauggacugggacagacaauaacuucucaauaaagcaagauaucguaggaauaaaugaguggucaggauauagcgggaguuuuguucagcauccagaacuaacagggcuggauuguauaagaccuugcuucuggguugaacuaaucagagggcgacccaaagagaacacaaucuggacuagcggaagcagcagauccuuuugugguguaaacagugacacuguggguuggucuuggccagacggugcugaguugccauuuaccauugacaaguaa

SEQ ID NO: 55819 - RNA, 1410 nt, Artificial Sequence
  derived and/or modified CDS sequence (wt) from neuraminidase__InfluenzaA__AGT18762
augaauccaaaucaaaagauaauaacgauuggcucuguuucucucaccauuuccacaauaugcuucuucaugcaaauugccaucuugauaacuacuguaacauugcauuucaagcaauaugaauucaacucccccccaaacaaccaagugacacugugugaaccaauaauaauagaaagaaacauaacagagauaguguaucugaccaacaccaccauagagaaggaaauaugccccaaaccagcagaauacagaaauuggucaaaaccgcaauguggcauuacaggauuugcaccuuucucuaaggacaauucgauuaggcuuuccgcugguggggacaucugggugacaagagaaccuuaugugucaugcgauccugacaaguguuaucaauuugcccuuggacagggaacaacacuaaacaacgugcauucaaauaacacaguacgugauaggaccccuuaucggacucuauugaugaaugaguuggguguucccuuucaucuggggaccaagcaagugugcauagcaugguccagcucaaguugucacgauggaaaagcauggcugcauguuuguauaacgggagaugauaaaaaugcaacugcuagcuucauuuacaaugggaggcuuguagauaguguuguuucaugguccaaagaaauucucaggacccaggagucagaaugcguuuguaucaauggaacuuguacaguaguaaugacugauggaagugcuucaggaaaagcugauacuaaaauacuauucauugaggaggggaaaaucguucauacuagcacauugucaggaagugcucagcaugucgaagagugcucuugcuauccucgauauccuggugucagaugugucugcagagacaacuggaaaggcuccaaucggcccaucguagauauaaacauaaaggaucauagcauuguuuccaguuauguguguucaggacuuguuggagacacacccagaaaaaacgacagcuccagcaguagccauuguuuggauccuaacaaugaagaagguggucauggagugaaaggcugggccuuugaugauggaaaugacguguggaugggaagaacaaucaacgagacgucacgcuuaggguaugaaaccuucaaagucauugaaggcugguccaacccuaaguccaaauugcagauaaauaggcaagucauaguugacagaggugauagguccgguuauucugguauuuucucuguugaaggcaaaagcugcaucaaucggugcuuuuauguggaguugauuaggggaagaaaagaggaaacugaagucuuguggaccucaaacaguauuguuguguuuuguggcaccucagguacauauggaacaggcucauggccugauggggcggaccucaaucuaaugccuauauaa

SEQ ID NO: 55820 - RNA, 1410 nt, Artificial Sequence
  derived and/or modified CDS sequence (wt) from neuraminidase__InfluenzaA__AGT18764
augaacccaaaucaaaugauaauaacgauuggcucuguuucucucaccaguuccacaauaugcuucuucaugcaaacugccagcuucauaacuacuguaacauugcauaucaagcaacaugaauuccacucccccccaaacaaccaagugaugcugugugaaccaacaauaauagaaagaaacauaacagagauaguguaucugaccaacaccaccauagagaaggaaauaugccccaaacuagcagaauacagaaauuggucaaagccacaaugugacauuacaggauuugcaccuuuuucuaaggacaauucgauuaggcuuuccgcugguggggacaucugggugacaagagaaccuuaugugucaugcgauccugacaaguguuaucaauuugcccuuggacagggaacaacacuaaacaacgugcauucaaauaacacaguacgugauaggaccccuuaucggacccuauugaugaaugaguuagguguuccuuuucaucuggggaccaagcaagugugcauagcaugguccagcucaaguugucacgauggaaaagcauggcugcauguuuguauaacgggggaugauaaaaaugcaacugcuagcuucauuuacaaugggaagcuuguagauaguguuguuucaugguccaaagaaauccucaggacccaggagucagaaugcguuuguaucaauggaacuuguacaguaguaaugacugaugggagugcuucaggaaaagcugauacuaaaauacuauucauugaggaggggaaaaucguucauacuagcacauugucaggaagugcucagcaugucgaggagugcucuugcuauccucgauauccugguguuagaugugucugcagagacaacuggaaaggcuccaauaggcccaucguugauauaaacaugaaggaucauagcauuguuuccaguuauguguguucaggacuuguuggagacacacccagaaaaaacgacagauccagcaauagccauuguuuggauccuaacaaugaagaagguggucauggagugaaaggcugggccuuugaugauggaaaugacguguggaugggaagaacgaucaacgagacgucgcgccuaggguaugaaaccuucaaagucauugaaggcugguccaacccuaaguccaaauugcagauaaauaggcaagucauaguugacagagguaauagguccgguuauucugguauuuucucuguugaaggcaagagcugcaucaaucggugcuuuuauguggaguugauuaggggaagaaaagaggaaacugaagucuuguggaccucaaacaguauuguuguguuuugcggcaccucagguacauauggaacaggcucauggccugauggggcggaccucaaucucaugccuauauaa

SEQ ID NO: 55821 - RNA, 1410 nt, Artificial Sequence
  derived and/or modified CDS sequence (wt) from neuraminidase__InfluenzaA__AGT18765
augaauccaaaucaaaagauaauaacgauuggcucuguuucucucaccauuuccacaauaugcuucuucaugcaaauugccaucuugauaacuacuguaacauugcauuucaagcaacaugaauuccacucccccccaaacaaccaagugaugcugugugaaccaacaauaauagaaagaaacauaacagagauaguguauuugaccaacaccaccauagagaaggaaauaugccccaaacuagcagaauacagaaauuggucgaagccacaaugugacauuacaggauuugcaccuuuuucuaaggacaauucgauuaggcuuuccgcugguggggacaucugggugacaagagaaccuuaugugucaugcgauccugacaaguguuaucaauuugcccuuggacagggaacaacacuaaacaacgugcauucaaauaacacaguacgugauaggaccccuuaucggacccuauugaugaaugaguuagguguuccuuuucaucuggggaccaagcaagugugcauagcaugguccagcucaaguugucacgauggaaaagcauggcugcauguuuguauaacgggggaugauaaaaaugcaacugcuagcuucauuuacaaugggaggcuuguagauaguguuguuucaugguccaaagaaauccucaggacccaggagucagaaugcguuuguaucaauggaacuuguacgguaguaaugacugaugggagugcuucaggaaaagcugauacuaaaauacuauucauugaggaggggaaaaucguucauacuagcacauugucaggaagugcucagcaugucgaggagugcucuugcuauccucgauauccuggugucagaugugucugcagagacaacuggaaaggcuccaauaggcccaucguugauauaaacaugaaggaucauagcauuguuuccaguuauguguguucaggacuuguuggagacacacccagaaaaaacgacagauccagcaauagccauuguuuggauccuaacaaugaagaagguggucauggagugaaaggcugggccuuugaugauggaaaugacguguggaugggaagaacgaucaacgagacgucacgcuuaggguaugaaaccuucaaagucauugaaggcugguccaacccuaaguccaaauugcagauaaauaggcaagucauaguugacagagguaauagguccgguuauucugguauuuucucuguugaaggcaagagcugcaucaaucggugcuuuuauguggaguugauuaggggaagaaaagaggaaacugaagucuuguggaccucaaacaguauuguuguguuuuguggcaccucagguacauauggaacaggcucauggccugauggggcggaccucaaucucaugccuauauaa

SEQ ID NO: 55822 - RNA, 1410 nt, Artificial Sequence
  derived and/or modified CDS sequence (wt) from neuraminidase__InfluenzaA__AGT18766
augaauccaaaucaaaagauaauaacgauuggcucuguuucucucaccauuuccacaauaugcuuauucaugcaaauugccaucuugauaacuacuguaacauugcauuucaagcaacaugaauuccacucccccccaaacaaccaagugaugcugugugaaccaacaauaauagaaagaaacauaacagagauaguguaucugaccaacaccaccauagagaaggaaauaugccccaaacuagcagaauacagaaauuggucgaagccacaaugugacauuacaggauuugcaccuuuuucuaaggacaauucgauuaggcuuuccgcugguggggacaucugggugacaagagaaccuuaugugucaugcgauccugacaaguguuaucaauuugcccuuggacagggaacaacacuaaacaacgugcauucaaauaacacaguacgugauaggaccccuuaucggacccuauugaugaaugaguuagguguuccuuuucaucuggggaccaagcaagugugcauagcaugguccagcucaaguugucacgauggaaaagcauggcugcauguuuguauaacgggggaugauaaaaaugcaacugcuagcuucauuuacaaugggaggcuuguagauaguguuguuucaugguccaaagaaauccucaggacccaggagucagaaugcguuuguaucaauggaacuuguacgguaguaaugacugaugggagugcuucaggaaaagcugauacuaaaauacuauucauugaggaggggaaaaucguucauacuagcacauugucaggaagugcucagcaugucgaggagugcucuugcuauccucgauauccuggugucagaugugucugcagagacaacuggaaaggcuccaauaggcccaucguugauauaaacaugaaggaucauagcauuguuuccaguuauguguguucaggacuuguuggagacacacccagaaaaaacgacagauccagcaauagccauuguuuggauccuaacaaugaagaagguggucauggagugaaaggcugggccuuugaugauggaaaugacguguggaugggaagaacgaucaacgagacgucacgcuuaggguaugaaaccuucaaagucauugaaggcugguccaacccuaaguccaaauugcagauaaauaggcaagucauaguugacagagguaauagguccgguuauucugguauuuucucuguugaaggcaagagcugcaucaaucggugcuuuuauguggaguugauuaggggaagaaaagaggaaacugaagucuuguggaccucaaacaguauuguuguguuuuguggcaccucagguacauauggaacaggcucauggccugauggggcggaccucaaucucaagccuauauaa

SEQ ID NO: 55823 - RNA, 1410 nt, Artificial Sequence
  derived and/or modified CDS sequence (wt) from neuraminidase__InfluenzaA__AGT18767
augaacccaaaucaaaagauaauaacgauuggcucuguuucucucaccauuuccacaauaugcuucuucaugcaaacugccagcuugauaacuacuguaacauugcauuucaagcaacaugaauuccacucccccccaaacaaccaagugaugcugugugaaccaacaauaauagaaagaaacauaacagagauaguguaucugaccaacaccaccauagagaaggaaauaugccccaaacuagcagaauacagaaauuggucaaagccacaaugugacauuacaggauuugcaccuuuuucuaaggacaauucgauuaggcuuuccgcugguggggacaucuggguaacaagagaaccuuaugugucaugcgauccugacaaguguuaucaauuugcccuuggacagggaacaacacuaaacaacgugcauucaaauaacacaguacgugauaggaccccuuaucggacccuauugaugaaugaguuggguguuccuuuucaucuggggaccaagcaagugugcauagcaugguccagcucaaguugucacgauggcaaagcauggcugcauguuuguauaacgggggaugacaaaaaugcaacugcuagcuucauuuacaaugggaggcuuguagacaguguuguuucaugguccaaagaaauccucaggacccaggagucagaaugcguuuguaucaauggaacuuguacaguaguaaugacugaugggagugcuucaggaaaagcugauacuaaaauacuauucauugaggaggggaaaaucguucauacuagcacauugucaggaagugcucagcaugucgaggagugcucuugcuauccucgauauccuggugucagaugugucugcagagacaacuggaaaggcuccaauaggcccaucguugauauaaacaugaaggaucauagcauuguuuccaguuauguguguucaggacuuguuggagacacacccagaaaaaacgacagauccagcaauagccauuguuuggauccuaacaaugaagaagguggucauggagugaaaggcugggccuuugaugauggaaaugacguguggaugggaagaacgaucaaugagacgucacgcuuaggguaugaaaccuucaaagucauugaaggcugguccaacccuaaguccaaauugcagauaaauaggcaagucauaguugacagagguaauagguccgguuauucugguauuuucucuguugaaggcaagagcugcaucaaucggugcuuuuauguggaguugauuaggggaagaaaagaggaaacugaagucuuguggaccucaaacaguauuguuguguuuuguggcaccucagguacauauggaacaggcucauggccugauggagcggaucucaaucucaugccuauauaa

SEQ ID NO: 55824 - RNA, 1410 nt, Artificial Sequence
  derived and/or modified CDS sequence (wt) from neuraminidase__InfluenzaA__AGT18768
augaacccaaaucaaaagauaauaacgauuggcucuguuucucuuaccauuuccacaauaugcuucuucaugcaaacugccagcuucauaacuacuguaacauugcauuucaagcaauaugaauucaacucccccccaaacaaccaagugaugcugugugaaccaacaauaauagaaagaaacauaacagagauaguguaucugaccaacaccaccauagagaaggaaauaugccccaaacuagcagaauacagaaauuggucaaagccacaaugugacauuacaggauuugcaccuuuuucuaaggacaauucgauuaggcuuuccgcugguggggacaucugggugacaagagaaccuuaugugucaugcgauccugacaaguguuaucaauuugcccuuggacagggaacaacacuaaacaacgugcauucaaauaacacaguacgugauaggaccccuuaucggacccuauugaugaaugaguuagguguuccuuuucaucuggggaccaagcaagugugcauagcaugguccagcucaaguugucacgauggaaaagcauggcugcauguuuguauaacgggggaugauaaaaaugcaacugcuagcuucauuuacaaugggaggcuuguagauaguguuguuucaugguccaaagaaauccucaggacccaggagucagaaugcguuuguaucaauggaacuuguacaguaguaaugacugaugggagugcuucaggaaaagcugauacuaaaauacuauucauugaggaggggaaaaucguucauacuagcacauugucaggaagugcucagcaugucgaggagugcucuugcuauccccgauauccuggugucagaugugucugcagagacaacuggaaaggcuccaauaggcccaucguugauauaaacaugaaggaucauagcauuguuuccaguuauguguguucaggacuuguuggagacacacccagaaaaaacgacagauccagcaauagccauuguuuggauccuaacaaugaagaagguggucauggagugaaaggcugggccuuugaugauggaaaugacguguggaugggaagaacgaucaacgagacgucacgcuuaggguaugaaaccuucaaagucauugaaggcugguccaacccuaaguccaaauugcagauaaauaggcaagucauaguugacagagguaauagguccgguuauucugguauuuucucuguugaaggcaagagcugcaucaaucggugcuuuuauguggaguugauuaggggaagaaaagaggaaacugaagucuuguggaccucaaacaguauuguuguguuuuguggcaccucagguacauauggaacaggcucauggccugauggggcggaccucaaucucaugccuauauaa

SEQ ID NO: 55825 - RNA, 1410 nt, Artificial Sequence
  derived and/or modified CDS sequence (wt) from neuraminidase__InfluenzaA__AGT18769
augaauccaaaucaaaagauaauaacgauuggcucuguuucucucaccauuuccacaauaugcuucuucaugcaaauugccaucuugauaacuacuguaacauugcauuucaagcaauaugaauucaacucccccccaaacaaccaagugaugcugugugaaccaacaauaauagaaagaaacauaacagagauaguguaucugaccaacaccaccauagagaaggaaauaugccccaaaccagcagaauacagaaauuggucaaaaccgcaauguggcauuacaggauuugcaccuuucucuaaggacaauucgauuaggcuuuccgcugguggggacaucugggugacaagagaaccuuaugugucaugcgauccugacaaguguuaucaauuugcccuuggacagggaacaacacuaaacaacgugcauucaaauaacacaguacgugauaggaccccuuaucggacucuauugaugaaugaguuggguguuccuuuucaucuggggaccaagcaagugugcauagcaugguccagcucaaguugucacgauggaaaagcauggcugcauguuuguauaacgggggaugauaaaaaugcaacugcuagcuucauuuacaaugggaggcuuguagauaguguuguuucaugguccaaagaaauucucagaacccaggagucagaaugcguuuguaucaauggaacuuguacaguaguaaugacugauggaagugcuucaggaaaagcugauacuaaaauacuauucauugaggaggggaaaaucguucauacuagcacauugucaggaagugcucagcaugucgaagagugcucuugcuauccucgauauccuggugucagaugugucugcagagacaacuggaaaggcuccaaucggcccaucguagauauaaacauaaaggaucauagcauuguuuccaguuauguguguucaggacuuguuggagacacacccagaaaaaacgacagcuccagcaguagccauuguuuggauccuaacaaugaagaagguggucauggagugaaaggcugggccuuugaugauggaaaugacguguggaugggaagaacaaucaacgagacgucacgcuuaggguaugaaaccuucaaagucauugaaggcugguccaacccuaaguccaaauugcagauaaauaggcaagucauaguugacagaggugauagguccgguuauucugguauuuucucuguugaaggcaaaagcugcaucaaucggugcuuuuauguggaguugauuaggggaagaaaagaggaaacugaagucuuguggaccucaaacaguauuguuguguuuuguggcaccucagguacauauggaacaggcucauggccugauggggcggaccucaaucuaaugccuauauaa

SEQ ID NO: 55826 - RNA, 1410 nt, Artificial Sequence
  derived and/or modified CDS sequence (wt) from neuraminidase__InfluenzaA__AGT18770
augaauccaaaucaaaagauaauaacgauuggcucuguuucucucaccauuuccacaauaugcuucuucaugcaaauugccaucuugauaacuacuguaacauugcauuucaagcaauaugaauucaacucccccccaaacaacaaagugaugcugugugaaccaacaauaauagaaagaaacauaacagagauaguguaucugaccaacaccaccauagagaaggaaauaugccccaaaccagcagaauacagaaauuggucaaaaccgcaauguggcauuacaggauuugcaccuuucucuaaggacaauucgauuaggcuuuccgcugguggggacaucugggugacaagagaaccuuaugugucaugcgauccugacaaguguuaucaauuugcccuuggacagggaacaacacuaaacaacgugcauucaaauaacacaguacgugauaggaccccuuaucggacucuauugaugaaugaguuggguguuccuuuucaucuggggaccaagcaagugugcauagcaugguccagcucaaguugucacgauggaaaagcauggcugcauguuuguauaacgggggaugauaaaaaugcaacugcuagcuucauuuacaaugggaggcuuguagauaguguuguuucaugguccaaagaaauucucagaacccaggagucagaaugcguuuguaucaauggaacuuguacaguaguaaugacugauggaagugcuucaggaaaagcugauacuaaaauacuauucauugaggaggggaaaaucguucauacuagcacauugucaggaagugcucagcaugucgaagagugcucuugcuauccucgauauccuggugucagaugugucugcagagacaacuggaaaggcuccaaucggcccaucguagauauaaacauaaaggaucauagcauuguuuccaguuauguguguucaggacuuguuggagacacacccagaaaaaacgacagcuccagcaguagccauuguuuggauccuaacaaugaagaagguggucauggagugaaaggcugggccuuugaugauggaaaugacguguggaugggaagaacaaucaacgagacgucacgcuuaggguaugaaaccuucaaagucauugaaggcugguccaacccuaaguccaaauugcagauaaauaggcaagucauaguugacagaggugauagguccgguuauucugguauuuucucuguugaaggcaaaagcugcaucaaucggugcuuuuauguggaguugauuaggggaagaaaagaggaaacugaagucuuguggaccucaaacaguauuguuguguuuuguggcaccucagguacauauggaacaggcucauggccugauggggcggaccucaaucuaaugccuauauaa

SEQ ID NO: 55827 - RNA, 1410 nt, Artificial Sequence
  derived and/or modified CDS sequence (wt) from neuraminidase__InfluenzaA__AGT18771
augaauccaaaucaaaagauaauaacgauuggcucuguuucucucaccauuuccacaauaugcuucuucaugcaaauugccaucuugauaacuacuguaacauugcauuucaagcaauauaaauucaacucccccccaaacaaccaagugaugcugugugaaccaacaauaauagaaagaaacauaacagagauaguguaucugaccaacaccaccauagagaaggaaauaugccccaaaccagcagaauacagaaauuggucaaaaccgcaauguggcauuacaggauuugcaccuuucucuaaggacaauucgauuaggcuuuccgcugguggggacaucugggugacaagagaaccuuaugugucaugcgauccugacaaguguuaucaauuugcccuuggacagggaacaacacuaaacaacgugcauucaaauaacacaguacgugauaggaccccuuaucggacucuauugaugaaugaguuggguguuccuuuucaucuggggaccaagcaagugugcauagcaugguccagcucaaguugucacgauggaaaagcauggcugcauguuuguauaacgggggaugauaaaaaugcaacugcuagcuucauuuacaaugggaggcuuguagauaguguuguuucaugguccaaagaaauucucaggacccaggagucagaaugcguuuguaucaauggaacuuguacaguaguaaugacugauggaagugcuucaggaaaagcugauacuaaaauacuauucauugaggaggggaaaaucguucauacuagcacauugucaggaagugcucagcaugucgaagagugcucuugcuauccucgauauccuggugucagaugugucugcagagacaacuggaaaggcuccaaucggcccaucguagauauaaacauaaaggaucauagcauuguuuccaguuauguguguucaggacuuguuggagacacacccagaaaaaacgacagcuccagcaguagccauuguuuggauccuaacaaugaagaagguggucauggagugaaaggcugggccuuugaugauggaaaugacguguggaugggaagaacaaucaacgagacgucacgcuuaggguaugaaaccuucaaagucauugaaggcugguccaacccuaaguccaaauugcagauaaauaggcaagucauaguugacagaggugauagguccgguuauucugguauuuucucuguugaaggcaaaagcugcaucaaucggugcuuuuauguggaguugauuaggggaagaaaagaggaaacugaagucuuguggaccucaaacaguauuguuguguuuuguggcaccucagguacauauggaacaggcucauggccugauggggcggaccucaaucuaaugccuauauaa

SEQ ID NO: 55828 - RNA, 1410 nt, Artificial Sequence
  derived and/or modified CDS sequence (wt) from neuraminidase__InfluenzaA__AGT18772
augaauccaaaucaaaagauaauaacgauuggcucuguuucucucaccauuuccacaauaugcuucuucaugcaaauugccaucuugauaacuacuguaacauugcauuucaagcaauaugaauucaacucccccccaaacaaccaagugaugcugugugaaccaacaauaauagaaagaaacauaacagagauaguguaucugaccaacaccaccauagagaaggaaauaugccccaaaccagcagaauacagaaauuggucaaaaccgcaauguggcauuacaggauuugcaccuuucucuaaggacaauucgauuaggcuuuccgcugguggggacaucugggugacaagagaaccuuaugugucaugcgauccugacaaguguuaucaauuugcccuuggacagggaacaacacuaaacaacgugcauucaaauaacacaguacgugauaggaccccuuaucggacucuauugaugaaugaguuggguguucccuuucaucuggggaccaagcaagugugcauagcaugguccagcucaaguugucacgauggaaaagcauggcugcauguuuguauaacgggagaugauaaaaaugcaacugcuagcuucauuuacaaugggaggcuuguagauaguguuguuucaugguccaaagaaauucucaggacccaggagucagaaugcguuuguaucaauggaacuuguacaguaguaaugacugauggaagugcuucaggaaaagcugauacuaaaauacuauucauugaggaggggaaaaucguucauacuagcacauugucaggaagugcucagcaugucgaagagugcucuugcuauccucgauauccuggugucagaugugucugcagagacaacuggaaaggcuccaaucggcccaucguagauauaaacauaaaggaucauagcauuguuuccaguuauguguguucaggacuuguuggagacacacccagaaaaaacgacagcuccagcaguagccauuguuuggauccuaacaaugaagaagguggucauggagugaaaggcugggccuuugaugauggaaaugacguguggaugggaagaacaaucaacgagacgucacgcuuaggguaugaaaccuucaaagucauugaaggcugguccaacccuaaguccaaauugcagauaaauaggcaagucauaguugacagaggugauagguccgguuauucugguauuuucucuguugaaggcaaaagcugcaucaaucggugcuuuuauguggaguugauuaggggaagaaaagaggaaacugaagucuuguggaccucaaacaguauuguuguguuuuguggcaccucagguacauauggaacaggcucauggccugauggggcggaccucaaucuaaugccuauauaa

SEQ ID NO: 55829 - RNA, 1410 nt, Artificial Sequence
  derived and/or modified CDS sequence (wt) from neuraminidase__InfluenzaA__AGT37104
augaauccaaaucaaaagauaauaacaauugguucaguuucccucaccauugccacaauaugccuccuuaugcaaauugccauucugguaacuacuguaacauuacauuucaagcaauaugaaugcaguuccccuccaaacaaccaaguaaugccgugugaaccaacaauaauagagagaaacauaacaaagauaguguaucugaccaacaccacuauagagagagaggcaugccccgaacuagcagaauacagacacuggucaaagccgcaauguaaaauuagaggauuugcaccuuuuucuaaggacaauucaauucgacuuucugcugguggagacauuugggugacaagagaaccuuaugugucaugugauccuggcaaguguuaucaauuugcccuuggacagggaacaacacuaaacaacaggcauucaaaugacacaguacaugauaggaccccuuaucgaacccuauugaugaaugaguuggguguuccauuucauuugggaaccaagcaagugugcauagcaugguccagcucaaguugucaugauggaaaagcaugguugcauguuuguauaacagggcaugauaaaaaugcaacugcuagcuucauuuacgaugggaggcuuguagacaguaucgguucauggucacaaaacauccucagaacccaggagucugaaugcguuuguaucaauggaacuuguacaguaguaaugacugauggaagugcuucaggaagagcugauaccaaaauaauguuuguugaagaggggaaaaucguucauauuagcccauuggcaggaagugcccagcacguugaggagugcuccuguuauccuaaauauccuggugucagaugugucugcagagacaacuggaaagguuccaauaggcccauuguagauauaaauaugaaagauuauagcauuguuuccaguuaugugugcucaggacuugugggagacacacccaggagaaacgauaguucuagcaccagcuauugcuugaauccuaacaaugaggaaggggggcauggagugaaaggcugggccuuugaugauggagaugauguguggaugggaagaacaauaagcgagaaguuacguuuagguuacgaaacuuucaaagucauuggagguugguccaaaccuaauucaaaauugcaaauaaauaggcaagucguaguugacauaaguaauagauccgguuauucugguauuuucucuguugaaggcaaaagcugcaucaaucggugcuuuuauguggaguugauaaggggaaggaagcaggaaaaugaagucugguggacaucaaauaguauuguuguguuuugugguaccucagguacauauggaacaggcucauggccugacggggcggacaucaaucucaugccuauauaa

SEQ ID NO: 55830 - RNA, 1410 nt, Artificial Sequence
  derived and/or modified CDS sequence (wt) from neuraminidase__InfluenzaA__AGU69973
augaauccaaaucaaaagauaauaacgauuggcucuguuucucucaccauugccacaauaugcuuccuuaugcaaauugccauccugguaacuacuguaacauugcauuucaagcaauaugaaugcaacucccccccaaacaaccaagugaugcugugugaaccaacaauaauagaaagaaacauaacagagauaguguaucugaccaacaccaccauagagaaggaaauaugccccaaacuagcagaauacagaaauuggucaaagccgcaauguaacauuacaggauuugcaccuuuuucuaaggacaauucgauucggcuuuccgcugguggggacaucugggugacaagagaaccuuacgugucaugcgauccugacaaguguuaucaauuugcccuuggacagggaacaacacuaaacaacgggcauucaaaugacacaguacaugauaggaccccuuaucggacccuauugaugaaugaguuggguguuccauuucauuugggaaccaagcaagugugcauagcaugguccagcucaaguugucacgauggaaaagcauggcugcauguuuguguaacgggggaugaugaaaaugcaacugcuagcuucauuuacaaugggaggcuuguagauaguauugguucaugguccaaaaaaauccucaggacccaggagucggaaugcguuuguaucaauggaacuuguacaguaguaaugacugaugggagugcuucaggaaaagcugauacuaaaauacuauucauugaggaggggaaaaucguucauacuagcccauugucaggaagugcucagcaugucgaggagugcuccuguuauccucgauauccuggugucagaugugucugcagagacaacuggaaaggcuccaauaggcccaucguagauauaaauguaaaggauuauagcauuguuuccaguuaugugcgcucaggacuuguuggagacacacccagaaaaaacgauagcuccagcaguagccauugcuuggauccuaacaaugaggaagguggucauggagugaaaggcugggccuuugaugauggaaacgacguguggaugggaagaacgaucagcgagaagucacgcucaggauaugaaaccuucaaagucauugaaggcugguccaaaccuaacuccaaauugcagauaaauaggcaagucauaguugacagagguaauagguccgguuauucugguauuuucucuguugaaggcaaaagcugcaucaaucggugcuuuuauguggaguugauaaggggagggaaacaggaaacugaagucuuguggaccucaaacaguauuguuguguuuuguggcaccucagguacauauggaacaggcucauggccugauggggcggaccucaaucucaugccuauauaa

SEQ ID NO: 55831 - RNA, 1410 nt, Artificial Sequence
  derived and/or modified CDS sequence (wt) from neuraminidase__InfluenzaA__AGU92648
augaauccaaaccaaaagauaauaaccauugguucggucuguaugacaauuggaauggcuaacuuaauauuacaaauuggaaacauaaucucaauauggauuagccacucaauucaacuuaggaaucaaagucagauugaaacaugcaaucaaagcgucauuacuuaugaaaacaacacuuggguaaaucagacauauguuaacaucagcaacaccaacuuugcugcuggacagucagugguuuccgugaaauuagcgggcaauuccucucucugcccuguuaguggaugggcuauauacaguaaagacaacaguauaagaaucgguuccaagggggauguguuugucauaagggaaccauucauaucaugcucccccuuggaaugcagaaccuucuucuugacccaaggggccuugcuaaaugacaaacauuccaauggaaccauuaaagacaggagcccauaucgaacccuaaugagcuguccuauuggugaaguucccucuccauacaacucaagauuugagucagucgcuuggucagcaagugcuugucaugauggcaucaauuggcuaacaauuggaauuucuggcccagacaauggggcaguggcuguguuaaaguacaacggcauaauaacagacacuaucaagaguuggagaaauaauauauugagaacacaagagucugaaugugcauguguaaaugguucuugcuuuaccauaaugaccgauggaccaagugauggacaggccucauacaagaucuucagaauagaaaagggaaagauagucaaaucagucgaaaugaaugccccuaauuaucacuaugaggaaugcuccuguuauccugauucuagugaaaucauaugugugugcagggauaacuggcauggcucgaaucgaccaugggugucuuucaaccagaaucuggaauaucagauaggauacauaugcagugggauuuucggagacaauccacgcccuaaugauaaaacaggcaguugugguccaguaucgucuaauggagcaaauggaguaaaaggauuuucauucaaauacggcaaugguguuuggauagggagaacuaaaagcauuaguucaagaaaagguuuugagaugauuugggauccaaacggauggacuggaacagacaauaacuucucaauaaagcaagauaucguaggaauaaaugaguggucaggauacagcgggaguuuuguucagcauccagaacuaacagggcuggauuguauaagaccuugcuucuggguugaacuaaucagaggacgacccaaagagaacacaaucuggacuagcgggagcagcauauccuuuugugguguaaacagugacacuguggguuggucuuggccagacggugcugaguugccauuuaccauugacaaguaa

SEQ ID NO: 55832 - RNA, 1410 nt, Artificial Sequence
  derived and/or modified CDS sequence (wt) from neuraminidase__InfluenzaA__AGU92670
augaauccaaaccaaaagauaauaaccauugguucggucuguaugacaauuggaauggcuaacuuaauauuacaaauuggaaacauaaucucaauauggauuagccacucaauucaacuuaggaaucaaagucagauugaaacaugcaaucaaagcgucauuacuuaugaaaacaacacuuggguaaaucagacauauguuaacaucagcaacaccaacuuugcugcuggacagucagugguuuccgugaaauuagcgggcaauuccucucucugcccuguuaguggaugggcuauauacaguaaagacaacaguauaagaaucgguuccaagggggauguguuugucauaagggaaccauucauaucaugcucccccuuggaaugcagaaccuucuucuugacccaaggggccuugcuaaaugacaaacauuccaauggaaccauuaaagacaggagcccauaucgaacccuaaugagcuguccuauuggugaaguucccucuccauacaacucaagauuugagucagucgcuuggucagcaagugcuugucaugauggcaucaauuggcuaacaauuggaauuucuggcccagacaauggggcaguggcuguguuaaaguacaacggcauaauaacagacacuaucaagaguuggagaaauaauauauugagaacacaagagucugaaugugcauguguaaaugguucuugcuuuaccauaaugaccgauggaccaagugauggacaggccucauacaagaucuucagaauagaaaagggaaagauagucaaaucagucgaaaugaaugccccuaauuaucacuaugaggaaugcuccuguuauccugauucuagugaaaucauaugugugugcagggauaacuggcauggcucgaaucgaccaugggugucuuucaaccagaaucuggaauaucagauaggauacauaugcagugggauuuucggagacaauccacgcccugaugauaaaacaggcaguugugguccaguaucgucuaauggagcaaauggaguaaaaggauuuucauucaaauacggcaaugguguuuggauagggagaacuaaaagcauuaguucaagaaaagguuuugagaugauuugggauccaaacggauggacuggaacagacaauaacuucucaauaaagcaagauaucguaggaauaaaugaguggucaggauacagcgggaguuuuguucagcauccagaacuaacagggcuggauuguauaagaccuugcuucuggguugaacuaaucagaggacgacccaaagagaacacaaucuggacuagcgggagcagcauauccuuuugugguguaaacagugacacuguggguuggucuuggccagacggugcugaguugccauuuaccauugacaaguaa

SEQ ID NO: 55833 - RNA, 1410 nt, Artificial Sequence
  derived and/or modified CDS sequence (wt) from neuraminidase__InfluenzaA__AGU92681
augaauccaaaccaaaagauaauaaccauugguucggucuguaugacaauuggaauggcuaacuuaauauuacaaauuggaaacauaaucucaauauggauuagccacucaauucaacuuaggaaucaaagucagauugaaacaugcaaucaaagcgucauuacuuaugaaaacaacacuuggguaaaucagacauauguuaacaucagcaacaccaacuuugcugcuggacagucagugguuuccgugaaauuagcgggcaauuccucucucugcccuguuaguggaugggcuacauacaguaaagacaacaguauaagaaucgguuccaagggggauguguuugucauaagggaaccauucauaucaugcucccccuuggaaugcagaaccuucuucuugacccaaggggccuugcuaaaugacaaacauuccaauggaaccauuaaagacaggagcccauaucgaacccuaaugagcuguccuauuggugaaguucccucuccauacaacucaagauuugagucagucgcuuggucagcaagugcuugucaugauggcaucaauuggcuaacaauuggaauuucuggcccagacaauggggcaguggcuguguuaaaguacaacggcauaauaacagacacuaucaagaguuggagaaauaauauauugagaacacaagagucugaaugugcauguguaaaugguucuugcuuuaccauaaugaccgauggaccaagugauggacaggccucauacaagaucuucagaauagaaaagggaaagauagucaaaucagucgaaaugaaugccccuaauuaucacuaugaggaaugcuccuguuauccugauucuagugaaaucauaugugugugcagggauaacuggcauggcucgaaucgaccaugggugucuuucaaccagaaucuggaauaucagauaggauacauaugcagugggauuuucggagacaauccacgcccuaaugauaaaacaggcaguugugguccaguaucgucuaauggagcaaauggaguaaaaggauuuucauucaaauacggcaaugguguuuggauagggagaacuaaaagcauuaguucaagaaaagguuuugagaugauuugggauccaaacggauggacuggaacagacaauaacuucucaauaaagcaagauaucguaggaauaaaugaguggucaggauacagcgggaguuuuguucagcauccagaacuaacagggcuggauuguauaagaccuugcuucuggguugaacuaaucagaggacgacccaaagagaacacaaucuggacuagcgggagcagcauauccuuuugugguguaaacagugacacuguggguuggucuuggccagacggugcugaguugccauuuaccauugacaaguaa

SEQ ID NO: 55834 - RNA, 1410 nt, Artificial Sequence
  derived and/or modified CDS sequence (wt) from neuraminidase__InfluenzaA__AGU92692
augaauccaaaccaaaagauaauaaccauugguucggucuguaugacaauuggaauggcuaacuuaauauuacaaauuggaaacauaaucucaauauggauuagccacucaauucaacuugggaaucaaaaucagauugaaacaugcaaucaaagcgucauuacuuaugaaaacaacacuuggguaaaucagacauauguuaacaucagcaacaccaacuuugcugcuggacagucagugguuuccgugaaauuagcgggcaauuccucucucugcccuguuaguggaugggcuauauacaguaaagacaacaguguaagagucgguuccaagggggauguguuugucauaagggaaccauucauaucaugcucccccuuggaaugcagaaccuucuucuugacucagggggccuugcuaaaugacaaacauuccaauggaaccauuaaagacaggagcccauaucgaacccuaaugagcuguccuauuggugaaguucccucuccauacaacucaagauuugagucagucgcuuggucagcaagugcuugucaugauggcaucaauuggcuaacaauuggaauuucuggcccagacaauggggcaguggcuguguuaaaguacaacggcauaauaacagacacuaucaagaguuggagaaacaauauauugagaacacaagagucugaaugugcauguguaaaugguucuugcuuuacuguaaugaccgauggaccaaguaauggacaggccucauacaagaucuucagaauagaaaagggaaagauagucaaaucagucgaaaugaaugccccuaauuaucacuaugaggaaugcuccuguuauccugauucuagugaaaucacaugugugugcagggauaacuggcauggcucgaaucgaccgugggugucuuucaaccagaaucuggaauaucagauaggcuacauaugcagugggauuuucggagacaauccacgcccuaaugauaagacaggcaguugugguccaguaucgucuaauggagcaaauggaguaaaaggauuuucauucaaauacggcaaugguguuuggauagggagaacuaaaagcauuaguucaagaaacgguuuugagaugauuugggauccgaacggauggacugggacagacaauaacuucucaauaaagcaagauaucguaggaauaaaugaguggucaggauauagcgggaguuuuauucagcauccagaacuaacagggcuggauuguauaagaccuugcuucuggguugaacuaaucagagggcgacccaaagagaacacaaucuggacuagcgggagcagcauauccuuuugugguguaaacagugacacuguggguuggucuuggccagacggugcugaguugccauuuaccauugacaaguaa

SEQ ID NO: 55835 - RNA, 1410 nt, Artificial Sequence; identical to SEQ ID NO: 55834
  derived and/or modified CDS sequence (wt) from neuraminidase__InfluenzaA__AGU92703

SEQ ID NO: 55836 - RNA, 1410 nt, Artificial Sequence; identical to SEQ ID NO: 55834
  derived and/or modified CDS sequence (wt) from neuraminidase__InfluenzaA__AGU92714

SEQ ID NO: 55837 - RNA, 1410 nt, Artificial Sequence; identical to SEQ ID NO: 55834
  derived and/or modified CDS sequence (wt) from neuraminidase__InfluenzaA__AGU92725

SEQ ID NO: 55838 - RNA, 1410 nt, Artificial Sequence; identical to SEQ ID NO: 55834
  derived and/or modified CDS sequence (wt) from neuraminidase__InfluenzaA__AGU92736

SEQ ID NO: 55839 - RNA, 1410 nt, Artificial Sequence; identical to SEQ ID NO: 55834
  derived and/or modified CDS sequence (wt) from neuraminidase__InfluenzaA__AGU92747

SEQ ID NO: 55840 - RNA, 1410 nt, Artificial Sequence; identical to SEQ ID NO: 55834
  derived and/or modified CDS sequence (wt) from neuraminidase__InfluenzaA__AGU92758

SEQ ID NO: 55841 - RNA, 1410 nt, Artificial Sequence; identical to SEQ ID NO: 55831
  derived and/or modified CDS sequence (wt) from neuraminidase__InfluenzaA__AGU92769

SEQ ID NO: 55842 - RNA, 1410 nt, Artificial Sequence; identical to SEQ ID NO: 55831
  derived and/or modified CDS sequence (wt) from neuraminidase__InfluenzaA__AGU92780

SEQ ID NO: 55843 - RNA, 1410 nt, Artificial Sequence
  derived and/or modified CDS sequence (wt) from neuraminidase__InfluenzaA__AGU92791
augaauccaaaccaaaagauaauaaccauugguucggucuguaugacaauuggaauggcuaacuuaauauuacaaauuggaaacauaaucucaauauggauuagccacucaauucaacuuaggaaucaaagucagauugaaacaugcaaucaaagcgucauuacuuaugaaaacaacacuuggguaaaucagacauauguuaacaucagcaacaccaacuuugcugcuggacagucagugguuuccgugaaauuagcgggcaauuccucucucugcccuguuaguggaugggcuauauacaguaaagacaacaguauaagaaucgguuccaagggggauguguuugucauaagggaaccauucauaucaugcucccccuuggaaugcagaaucuucuucuugacccaaggggccuugcuaaaugacaaacauuccaauggaaccauuaaagacaggagcccauaucgaacccuaaugagcuguccuauuggugaaguucccucuccauacaacucaagauuugagucagucgcuuggucagcaagugcuugucaugauggcaucaauuggcuaacaauuggaauuucuggcccagacaauggggcaguggcuguguuaaaguacaacggcauaauaacagacacuaucaagaguuggagaaauaauauauugagaacacaagagucugaaugugcauguguaaaugguucuugcuuuaccauaaugaccgauggaccaagugauggacaggccucauacaagaucuucagaauagaaaagggaaagauagucaaaucagucgaaaugaaugccccuaauuaucacuaugaggaaugcuccuguuauccugauucuagugaaaucauaugugugugcagggauaacuggcauggcucgaaucgaccaugggugucuuucaaccagaaucuggaauaucagauaggauacauaugcagugggauuuucggagacaauccacgcccuaaugauaaaacaggcaguugugguccaguaucgucuaauggagcaaauggaguaaaaggauuuucauucaaauacggcaaugguguuuggauagggagaacuaaaagcauuaguucaagaaaagguuuugagaugauuugggauccaaacggauggacuggaacagacaauaacuucucaauaaagcaagauaucguaggaauaaaugaguggucaggauacagcgggaguuuuguucagcauccagaacuaacagggcuggauuguauaagaccuugcuucuggguugaacuaaucagaggacgacccaaagagaacacaaucuggacuagcgggagcagcauauccuuuugugguguaaacagugacacuguggguuggucuuggccagacggugcugaguugccauuuaccauugacaaguaa

SEQ ID NO: 55844 - RNA, 1410 nt, Artificial Sequence; identical to SEQ ID NO: 55831
  derived and/or modified CDS sequence (wt) from neuraminidase__InfluenzaA__AGU92802

SEQ ID NO: 55845 - RNA, 1410 nt, Artificial Sequence; identical to SEQ ID NO: 55831
  derived and/or modified CDS sequence (wt) from neuraminidase__InfluenzaA__AGU92813

SEQ ID NO: 55846 - RNA, 1410 nt, Artificial Sequence; identical to SEQ ID NO: 55831
  derived and/or modified CDS sequence (wt) from neuraminidase__InfluenzaA__AGU92824

SEQ ID NO: 55847 - RNA, 1410 nt, Artificial Sequence
  derived and/or modified CDS sequence (wt) from neuraminidase__InfluenzaA__AGU92846
augaauccaaaccaaaagauaauaaccauugguucggucuguaugacaauuggaauggcuaacuuaauauuacaaauuggaaacauaaucucaauauggauuagccacucaauucaacuugggaaucaaaaucagauugaaacaugcaaucaaagcgucauuacuuaugaaaacaacacuuggguaaaucagacauauguuaacaucagcaacaccaacuuugcugcuggacagucagugguuuccgugaaauuagcgggcaauuccucucucugcccuguuaguggaugggcuauauacaguaaagacaacaguguaagagucgguuccaagggggauguguuugucauaagggaaccauucauaucaugcucccccuuggaaugcagaaccuucuucuugacucagggggccuugcuaaaugacaaacauuccaauggaaccauuaaagacaggagcccauaucgaacccuaaugagcuguccuauuggugaaguucccucuccauacaacucaagauuugagucagucgcuuggucagcaagugcuugucaugauggcaucaauuggcuaacaauuggaauuucuggcccagacaauggggcaguggcuguguuaaaguacaacggcauaauaacagacacuaucaagaguuggagaaacaauauauugagaacacaagagucugaaugugcauguguaaaugguucuugcuuuacuguaaugaccgauggaccaaguaauggacaggccucauacaagaucuucagaauagaaaagggaaagauagucaaaucagucgaaaugaaugccccuaauuaucacuaugaggaaugcuccuguuauccugauucuagugaaaucacaugugugugcagggauaacuggcauggcucgaaucgaccgugggugucuuucaaccagaaucuggaauaucagauaggcuacauaugcagugggauuuucggagacaauccacgcccuaaugauaagacaggcaguugugguccaguaucgucuaauggagcaaauggaguaaaaggauuugcauucaaauacggcaaugguguuuggauagggagaacuaaaagcauuaguucaagaaacgguuuugagaugauuugggauccgaacggauggacugggacagacaauaacuucucaauaaagcaagauaucguaggaauaaaugaguggucaggauauagcgggaguuuuauucagcauccagaacuaacagggcuggauuguauaagaccuugcuucuggguugaacuaaucagagggcgacccaaagagaacacaaucuggacuagcgggagcagcauauccuuuugugguguaaacagugacacuguggguuggucuuggccagacggugcugaguugccauuuaccauugacaaguaa

SEQ ID NO: 55848 - RNA, 1410 nt, Artificial Sequence
  derived and/or modified CDS sequence (wt) from neuraminidase__InfluenzaA__AGU92868
augaauccaaaccaaaagauaauaaccauugguucggucuguaugacaauuggaauggcuaacuuaauauuacaaauuggaaacauaaucucaauauggauuagccacucaauucaacuugggaaucaaaaucagauugaaacaugcaaucaaagcgucauuacuuaugaaaacaacacuuggguaaaucagacauauguuaacaucagcaacaccaacuuugcugcuggacagucagugguuuccgugaaauuugcgggcaauuccucucucugcccuguuaguggaugggcuauauacaguaaagacaacaguguaagagucgguuccaagggggauguguuugucauaagggaaccauucauaucaugcucccccuuggaaugcagaaccuucuucuugacucagggggccuugcuaaaugacaaacauuccaauggaaccauuaaagacaggagcccauaucgaacccuaaugagcuguccuauuggugaaguucccucuccauacaacucaagauuugagucagucgcuuggucagcaagugcuugucaugauggcaucaauuggcuaacaauuggaauuucuggcccagacaauggggcaguggcuguguuaaaguacaacggcauaauaacagacacuaucaagaguuggagaaacaauauauugagaacacaagagucugaaugugcauguguaaaugguucuugcuuuacuguaaugaccgauggaccaaguaauggacaggccucauacaagaucuucagaauagaaaagggaaagauagucaaaucagucgaaaugaaugccccuaauuaucacuaugaggaaugcuccuguuauccugauucuagugaaaucacaugugugugcagggauaacuggcauggcucgaaucgaccgugggugucuuucaaccagaaucuggaauaucagauaggcuacauaugcagugggauuuucggagacaauccacgcccuaaugauaagacaggcaguugugguccaguaucgucuaauggagcaaauggaguaaaaggauuuucauucaaauacggcaaugguguuuggauagggagaacuaaaagcauuaguucaagaaacgguuuugagaugauuugggauccgaacggauggacugggacagacaauaacuucucaauaaagcaagauaucguaggaauaaaugaguggucaggauauagcgggaguuuuauucagcauccagaacuaacagggcuggauuguauaagaccuugcuucuggguugaacuaaucagagggcgacccaaagagaacacaaucuggacuagcgggagcagcauauccuuuugugguguaaacagugacacuguggguuggucuuggccagacggugcugaguugccauuuaccauugacaaguaa

SEQ ID NO: 55849 - RNA, 1410 nt, Artificial Sequence
  derived and/or modified CDS sequence (wt) from neuraminidase__InfluenzaA__AGU92890
augaauccaaaccaaaagauaauaaccauugguucggucuguaugacaauuggaauggcuaacuuaauauuacaaauuggaaacauaaucucaauauggauuagccacucaauucaacuugggaaucaaaaucagauugaaacaugcaaucaaagcgucauuacuuaugaaaacaacacuuggguaaaucagacauauguuaacaucagcaacaccaacuuugcugcuggacagucagugguuuccgugaaauuagcgggcaauuccucucucugcccuguuaguggaugggcuauauacaguaaagacaacaguguaagagucgguuccaagggggauguguuugucauaagggaaccauucauaucaugcucccccuuggaaugcagaaccuucuucuugacucagggggccuugcuaaaugacaaacauuccaauggaaccauuaaagacaggagcccauaucgaacccuaaugagcuguccuauuggugaaguucccucuccauacaacucaagauuugagucagucgcuuggucagcaagugcuugucaugauggcaucaauuggcuaacaauuggaauuucuggcccagacaauggggcaguggcuguguuaaaguacaacggcauaauaacagacacuaucaagaguuggagaaacaauauauugagaacacaagagucugaaugugcauguguaaaugguucuugcuuuacuguaaugaccgauggaccaaguaauggacaggccucauacaagaucuucagaauagaaaagggaaagauagucaaaucagucgaaaugaaugccccuaauuaucacuaugaggaaugcuccuguuauccugauucuagugaaaucacaugugugugcagggauaacuggcauggcucgaaucgaccgugggugucuuucaaccagaaucuggaauaucagauaggcuacauaugcagugggauuuucggagacaauccacgcccuaaugauaagacaggcaguugugguccaguaucgucuaauggagcaaauggaguaaaaggauuuucauucaaauacggcaaugguguuuggauagggagaacuaaaagcauuaguucaagaaacgguuuugagaugauuugggauccgaacggauggacugagacagacaauaacuucucaauaaagcaagauaucguaggaauaaaugaguggucaggauauagcgggaguuuuauucagcauccagaacuaacagggcuggauuguauaagaccuugcuucuggguugaacuaaucagagggcgacccaaagagaacacaaucuggacuagcgggagcagcauauccuuuugugguguaaacagugacacuguggguuggucuuggccagacggugcugaguugccauuuaccauugacaaguaa

SEQ ID NO: 55850 - RNA, 1410 nt, Artificial Sequence; identical to SEQ ID NO: 55831
  derived and/or modified CDS sequence (wt) from neuraminidase__InfluenzaA__AGU92901

SEQ ID NO: 55851 - RNA, 1410 nt, Artificial Sequence; identical to SEQ ID NO: 55831
  derived and/or modified CDS sequence (wt) from neuraminidase__InfluenzaA__AGU92912

SEQ ID NO: 55852 - RNA, 1410 nt, Artificial Sequence; identical to SEQ ID NO: 55831
  derived and/or modified CDS sequence (wt) from neuraminidase__InfluenzaA__AGU92923

SEQ ID NO: 55853 - RNA, 1410 nt, Artificial Sequence; identical to SEQ ID NO: 55834
  derived and/or modified CDS sequence (wt) from neuraminidase__InfluenzaA__AGU92934

SEQ ID NO: 55854 - RNA, 1410 nt, Artificial Sequence; identical to SEQ ID NO: 55834
  derived and/or modified CDS sequence (wt) from neuraminidase__InfluenzaA__AGU92945

SEQ ID NO: 55855 - RNA, 1410 nt, Artificial Sequence; identical to SEQ ID NO: 55834
  derived and/or modified CDS sequence (wt) from neuraminidase__InfluenzaA__AGU92956

SEQ ID NO: 55856 - RNA, 1410 nt, Artificial Sequence; identical to SEQ ID NO: 55831
  derived and/or modified CDS sequence (wt) from neuraminidase__InfluenzaA__AGU92967

SEQ ID NO: 55857 - RNA, 1410 nt, Artificial Sequence; identical to SEQ ID NO: 55831
  derived and/or modified CDS sequence (wt) from neuraminidase__InfluenzaA__AGU92978

SEQ ID NO: 55858 - RNA, 1410 nt, Artificial Sequence
  derived and/or modified CDS sequence (wt) from neuraminidase__InfluenzaA__AGU92989
augaauccaaaccaaaagauaauaaccauugguucggucuguaugacaauuggaauggcuaacuuaauauuacaaauuggaaacauaaucucaauauggauuagccacucaauucaacuugggaaucaaaaucagauugaaacaugcaaucaaagcgucauuacuuaugaaaacaacacuuggguaaaucagacauauguuaacaucagcaacaccaacuuugcugcuggacagucagugguuuccgugaaauuagcgggcaauuccucucucugcccuguuaguggaugggcuauauacaguaaagacaacaguguaagagucgguuccaagggggauguguuugucauaagggaaccauucauaucaugcucccccuuggaaugcagaaccuucuucuugacucagggggccuugcuaaaugacaaacauuccaauggaaccauuaaagacaggagcccauaucgaacccuaaugagcuguccuauuggugaaguucccucuccauacaacucaagauuugagucagucgcuuggucagcaagugcuugucaugauggcaucaauuggcuaacaauuggaauuucuggcccagacaauggggcaguggcuguguuaaaguacaacggcauaauaacagacacuaucaagaguuggagaaacaauauauugagaacacaagagucugaaugugcauguguaaaugguucuugcuuuacuguaaugaccgauggaccaaguaauggacaggccucauacaagaucuucagaauagaaaagggaaagauagucaaaucagucgaaaugaaugccccuaauuaucacuaugaggaaugcuccuguuauccugauucuagugaaaucacaugugugugcagggauaacuggcauggcucgaaucgaccgugggugucuuucaaccagaaucuggaauaucagauaggcuacauaugcagugggauuuucggagacaauccacgcccuaaugauaagacaggcaguugugguccaguaucgucuaauggagcaaauggaguaaaaggauuuucauucaaauacggcaaugguguuuggauagggagaacuaaaagcauuaguucaagaaacgguuuugagaugauuugggauccgaacggauggacugggacagacaauaacuucucaauaaagcaagauaucguaggaauaaaugaguggucaggauauagcgggaguuuuguucagcauccagaacuaacagggcuggauuguauaagaccuugcuucuggguugaacuaaucagagggcgacccaaagagaacacaaucuggacuagcgggagcagcauauccuuuugugguguaaacagugacacuguggguuggucuuggccagacggugcugaguugccauuuaccauugacaaguaa

SEQ ID NO: 55859 - RNA, 1410 nt, Artificial Sequence; identical to SEQ ID NO: 55848
  derived and/or modified CDS sequence (wt) from neuraminidase__InfluenzaA__AGU93000

SEQ ID NO: 55860 - RNA, 1410 nt, Artificial Sequence; identical to SEQ ID NO: 55849
  derived and/or modified CDS sequence (wt) from neuraminidase__InfluenzaA__AGU93011

SEQ ID NO: 55861 - RNA, 1365 nt, Artificial Sequence; identical to SEQ ID NO: 52402
  derived and/or modified CDS sequence (wt) from neuraminidase__InfluenzaA__AGU93022

SEQ ID NO: 55862 - RNA, 1410 nt, Artificial Sequence
  derived and/or modified CDS sequence (wt) from neuraminidase__InfluenzaA__AGU93034
augaauccaacccaaaagauaauaaccauugguucggucuguaugacaauuggaauggcuaacuuaauauuacaaauuggaaacauaaucucaauauggauuagccacucaauucaacuugggaaucaaaaucagauugaaacaugcaaucaaagcgucauuacuuaugaaaacaacaccuggguaaaucagacauauguuaacaucagcaacaccaacuuugcugcuggacaaucaguugcuuccgugaaauuagcgggcaauuccucucucugcccuguuaguggaugggcuauauacaguaaagacaacaguauaagaaucgguuccaagggggauguguuugucauaagggaaccauucauaucaugcucccccuuggaaugcagaaccuucuucuugacucaaggggcuuugcuaaaugacaaacauuccaauggaaccauuaaagacaggagcccauaucgaacccuaaugagcuguccuauuggugaaguucccucuccauacaacucaagauuugagucagucgcuuggucagcaagugcuugucaugauggcaucaauuggcuaacaauuggaauuucuggcccagacaauggggcaguggcuguguuaaaguacaacggcauaauaacagacacuaucaagaguuggagaaacaauauauugagaacacaagagucugaaugugcauguguaaaugguucuugcuuuaccauaaugaccgauggaccaagugauggacaggccucauacaagaucuucagaauagaaaagggaaagauagucaaaucagucgaaaugaaugccccuaauuaucacuaugaggaaugcuccuguuauccugauucuagugaaauaacaugugugugcagggauaacuggcauggcucgaaucgaccgugggugucuuucaaccagaaucuggaauaucagauaggauacauaugcaguggaauuuucggagacaauccacgcccuaaugauaagacaggcaguugugguccaguaucgucuaauggagcaaauggaguaaaaggauuuucauucaaauacggcaaugguguuuggauagggagaacuaaaagcauuaguucaagaaaagguuuugagaugauuugggauccaaacggauggacugggacagacaauaacuucucaauaaagcaagauaucguaggaauaaaugaguggucaggauauagcgggaguuuuguucagcauccagaacugacagggcuggauuguauaagaccuugcuucuggguugaacuaaucagagggcgacccaaagagaacacaaucuggacuagcgggagcagcauauccuuuugugguguaaacagugacacuguggguuggucuuggccagacggugcugaguugccauuuaccauugacaaguaa

SEQ ID NO: 55863 - RNA, 1410 nt, Artificial Sequence
  derived and/or modified CDS sequence (wt) from neuraminidase__InfluenzaA__AGU93045
augaauccaaaccaaaagauaauaaccauugguucggucuguaugacaauuggaauggcuaacuuaauauuacaaauuggaaacauaaucucaauauggauuagccacucaauucaacuuaggaaucaaagucagauugaaacaugcaaucaaagcgucauuacuuaugaaaacaacacuuggguaaaucagacauauguuaacaucagcaacaccaacuuugcugcuggacagucagugguuuccgugaaauuagcgggcaauuccucucucugcccuguuaguggaugggcuauauacaguaaagacaacaguauaagaaucgguuccaagggggauguguuugucauaagggaaccauucauaucaugcucccccuuggaaugcagaaccuucuucuugacccaaggggcauugcuaaaugacaaacauuccaauggaaccauuaaagacaggagcccauaucgaacccuaaugagcuguccuauuggugaaguucccucuccauacaacucaagauuugagucagucgcuuggucagcaagugcuugucaugauggcaucaauuggcuaacaauuggaauuucuggcccagacaauggggcaguggcuguguuaaaguacaacggcauaauaacagacacuaucaagaguuggagaaauaauauauugagaacacaagaaucugaaugugcauguguaaaugguucuugcuuuaccauaaugaccgauggaccaagugauggacaggccucauacaagaucuucagaauagaaaagggaaagauagucaaaucagucgaaaugaaugccccuaauuaucacuaugaggaaugcuccuguuauccugauucuagugaaaucacaugugugugcagggauaacuggcauggcucgaaucgaccgugggugucuuucaaccagaaucuggaauaucagauaggauacauaugcagugggauuuucggagacaauccacgcccuaaugauaagacaggcaguugugguccaguaucgucuaauggagcaaauggaguaaaaggauuuucauucaaauacggcaaugguguuuggauagggagaacuaaaagcauuaguucaagaaaagguuuugagaugauuugggauccaaacggauggacugggacagacaauaacuucucaauaaagcaagauaucguaggaauaaaugaguggucaggauacagcgggagcuuuguucagcauccagaacuaacagggcuggauuguauaagaccuugcuucuggguugaacuaaucagaggacgacccaaagagaacacaaucuggacuagcgggagcagcauauccuuuugugguguaaacagugacacuguggguuggucuuggccagacggugcugaguugccauuuaccauugacaaguaa

SEQ ID NO: 55864 - RNA, 1410 nt, Artificial Sequence; identical to SEQ ID NO: 55831
  derived and/or modified CDS sequence (wt) from neuraminidase__InfluenzaA__AGU93056

SEQ ID NO: 55865 - RNA, 1410 nt, Artificial Sequence
  derived and/or modified CDS sequence (wt) from neuraminidase__InfluenzaA__AGV98980
augaauccaaaucaaaagauaauaacgauuggcucuguuucucucaccauuuccacaauaugcuucuucaugcaaauugccaucuugauaacuacuguaacauugcauuucaagcaauaugaauucaacucccccccaaacaaccaagugaugcugugugaaccaacaauaauagaaagaaacauaacagagauaguguaucugaccaacaccaccauagagaaggaaauaugccccaaaccagcagaauacagaaauuggucaaaaccgcaauguggcauuacaggauuugcaccuuucucuaaggacaauucgauuaggcuuuccgcugguggggacaucugggugacaagagaaccuuaugugucaugcgauccugacaaguguuaucaauuugcccuuggacagggaacaacacuaaacaacgugcauucaaauaacacaguacgugauaggaccccuuaucggacucuauugaugaaugaguuggguguuccuuuucaucuggggaccaagcaagugugcauagcaugguccagcucaaguugucacgauggaaaagcauggcugcauguuugcauaacgggggaugauaaaaaugcaacugcuagcuucauuuacaaugggaggcuuguagauaguguuguuucaugguccaaagaaauucucaggacccaggagucagaaugcguuuguaucaauggaacuuguacaguaguaaugacugauggaagugcuucaggaaaagcugauacuaaaauacuauucauugaggagggaaaaaucguucauacuagcacauugucaggaagugcucagcaugucgaagagugcucuugcuauccucgauauccuggugucagaugugucugcagagacaacuggaaaggcuccaaucggcccaucguagauauaaacauaaaggaucauagcauuguuuccaguuauguguguucaggacuuguuggagacacacccagaaaaaacgacagcuccagcaguagccauuguuuggauccuaacaaugaagaagguggucauggagugaaaggcugggccuuugaugauggaaaugacguguggaugggaagaacaaucaacgagacgucacgcuuaggguaugaaaccuucaaagucauugaaggcugguccaacccuaaguccaaauugcagauaaauaggcaagucauaguugacagaggugauagguccgguuauucugguauuuucucuguugaaggcaaaagcugcaucaaucggugcuuuuauguggaguugauuaggggaagaaaagaggaaacugaagucuuguggaccucaaacaguauuguuguguuuuguggcaccucagguacauauggaacaggcucauggccugauggggcggaccucaaucucaugccuauauaa

SEQ ID NO: 55866 - RNA, 1410 nt, Artificial Sequence
  derived and/or modified CDS sequence (wt) from neuraminidase__InfluenzaA__AGV98993
augaauccaaaucaaaagauaauaacgauuggcucuguuucucucaccauuuccacaauaugcuucuucaugcaaauugccaucuugauaacuacuguaacauugcauuucaagcaauaugaauucaacucccccccaaacaaccaagugaugcugugugaaccaacaauaauagaaagaaacauaacagagauaguguaucugaccaacaccaccauagagaaggaaauaugccccaaaccagcagaauacagaaauuggucaaagccgcaauguggcauuacaggauuugcaccuuucucuaaggacaauucgauuaggcuuuccgcugguggggacaucugggugacaagagaaccuuaugugucaugcgauccugacaaguguuaucaauuugcccuuggacagggaacaacacuaaacaacgugcauucaaauaacacaguacgugauaggaccccuuaucggacucuauugaugaaugaguuggguguuccuuuucaucuggggaccaagcaagugugcauagcaugguccagcucaaguugucacgauggaaaagcauggcugcauguuuguauaacgggggaugauaaaaaugcaacugcuagcuucauuuacaaugggaggcuuguagauaguguuguuucaugguccaaagaaauucucaggacccaggagucagaaugcguuuguaucaauggaacuuguacaguaguaaugacugauggaagugcuucaggaaaagcugauacuaaaauacuauucauugaggaggggaaaaucguucauacuagcacauugucaggaagugcucagcaugucgaagagugcucuugcuauccucgauauccuggugucagaugugucugcagagacaacuggaaaggcuccaaucggcccaucguagauauaaacauaaaggaucauagcauuguuuccaguuauguguguucaggacuuguuggagacacacccagaaaaaacgacagcuccagcaguagccauuguuuggauccuaacaaugaagaagguggucauggagugaaaggcugggccuuugaugauggaaaugacguguggaugggaagaacaaucaacgagacgucacgcuuaggguaugaaaccuucaaagucauugaaggcugguccaacccuaaguccaaauugcagauaaauaggcaagucauaguugacagaggugauagguccgguuauucugguauuuucucuguugaaggcaaaagcugcaucaaucggugcuuuuauguggaguugauuaggggaagaaaagaggaaacugaagucuuguggaccucaaacaguauuguuguguuuuguggcaccucagguacauauggaacaggcucauggccugauggggcggaccucaaucucaugccuauauaa

SEQ ID NO: 55867 - RNA, 1410 nt, Artificial Sequence; identical to SEQ ID NO: 55866
  derived and/or modified CDS sequence (wt) from neuraminidase__InfluenzaA__AGV99005

SEQ ID NO: 55868 - RNA, 1410 nt, Artificial Sequence; identical to SEQ ID NO: 55866
  derived and/or modified CDS sequence (wt) from neuraminidase__InfluenzaA__AGV99017

SEQ ID NO: 55869 - RNA, 1410 nt, Artificial Sequence
  derived and/or modified CDS sequence (wt) from neuraminidase__InfluenzaA__AGV99040
augaauccaaaucaaaagauaauaacgauuggcucuguuucucucaccauuuccacaauaugcuucuucaugcaaauugccaucuugauaacuacuguaacauugcauuucaagcaauaugaauucaacucccccccaaacaaccaagugaugcugugugaaccaacaauaauagaaagaaacauaacagagauaguguaucugaccaacaccaccauagagaaggaaauaugccccaaaccagcagaauacagaaauuggucaaaaccgcaauguggcauuacaggauuugcaccuuucucuaaggacaauucgauuaggcuuuccgcugguggggacaucugggugacaagagaaccuuaugugucaugcgauccugacaaguguuaucaauuugcccuuggacagggaacaacacuaaacaacgugcauucaaauaacacaguacgugauaggaccccuuaucggacucuauugaugaaugaguuggguguuccuuuucaucuggggaccaagcaagugugcauagcaugguccagcucaaguugucacgauggaaaagcauggcugcauguuuguauaacgggggaugauaaaaaugcaacugcuagcuucauuuacaaugggaggcuuguagauaguguuguuucaugguccaaagaaauucucaggacccaggagucagaaugcguuuguaucaauggaacuuguacaguaguaaugacugauggaagugcuucaggaaaagcugauacuaaaauacuauucauugaggaggggaaaaucguucauacuagcacauugucaggaagugcucagcaugucgaagagugcucuugcuauccucgauauccuggugucagaugugucugcagagacaacuggaaaggcuccaaucggcccaucguagauauaaacauaaaggaucauagcauuguuuccaguuauguguguucaggacuuguuggagacacacccagaaaaaacgacagcuccagcaguagccauuguuuggauccuaacaaugaagaagguggucauggagugaaaggcugggccuuugaugauggaaaugacguguggaugggaagaacaaucaacgagacgucacgcuuaggguaugaaaccuucaaagucauugaaggcugguccaacccuaaguccaaauugcagauaaauaggcaagucauaguugacagaggugauagguccgguuauucugguauuuucucuguugaaggcaaaagcugcaucaaucggugcuuuuauguggaguugauuaggggaagaaaagaggaaacugaagucuuguggaccucaaacaguauuguuguguuuuguggcaccucagguacauauggaacaggcucauggccugauggggcggaccucaaucucaugccuauauaa

SEQ ID NO: 55870 - RNA, 1410 nt, Artificial Sequence
  derived and/or modified CDS sequence (wt) from neuraminidase__InfluenzaA__AGV99052
augaauccaaaucaaaagauaauaacgauuggcucuguuucucucaccauuuccacaauaugcuucuucaugcaaauugccaucuugauaacuacuguaacauugcauuucaagcaauaugaauucaacuccccuccaaacaaccaagugaugcugugugaaccaacaauaauagaaagaaacauaacagagauaguguaucugaccaacaccaccauagagaaggaaauaugccccaaaccagcagaauacagaaauuggucaaaaccgcaauguggcauuacaggauuugcaccuuucucuaaggacaauucgauuaggcuuuccgcugguggggacaucugggugacaagagaaccuuaugugucaugcgauccugacaaguguuaucaauuugcccuuggacagggaacaacccuaaacaacgugcauucaaauaacacaguacgugauaggaccccuuaucggacucuauugaugaaugaguuggguguuccuuuucaucuggggaccaagcaagugugcauagcaugguccagcucaaguugucacgauggaaaagcauggcugcauguuuguauaacgggggaugauaaaaaugcaacugcuagcuucauuuacaaugggaggcuuguagauaguguuguuucaugguccaaagaaauucucaggacccaggagucagaaugcguuuguaucaauggaacuuguacaguaguaaugacugauggaagugcuucaggaaaagcugauaccaaaauacuauucauugaggaggggaaaaucguucauacuagcacauugucaggaagugcucagcaugucgaagagugcucuugcuauccucgauauccuggugucagaugugucugcagagacaacuggaaaggcuccaauaggcccaucguagauauaaacauaaaggaucauagcguuauuuccaguuauguguguucaggacuuguuggagacacacccagaaaaaacgacagcuccagcaguagccauuguuuggauccuaacaaugaagaagguggucauggagugaaaggcugggccuuugaugauggaaaugacguguggaugggaagaacaaucaaugagacgucacgcuuaggguaugaaaccuucaaagucauugaaggaugguccaacccuaaguccaaauugcagauaaauaggcaagucauaguugacagaggugauagguccgguuauucugguauuuucucuguugaaggcaaaagcugcaucaaucggugcuuuuauguggaguugauuaggggaagaaaagaggaaacugaagucuuguggaccucaaacaguauuguuguguuuuguggcaccucagguacauauggaacaggcucauggccugauggggcggaccucaaucucaugccuauauaa

SEQ ID NO: 55871 - RNA, 1410 nt, Artificial Sequence
  derived and/or modified CDS sequence (wt) from neuraminidase__InfluenzaA__AGV99100
augaauccaaaucaaaagauaauaacgauuggcucuguuucucucaccauuuccacaauaugcuucuucaugcaaauugccaucuugauaacuacuguaacauugcauuucaagcaauaugaauucaacucccccccaaacaaccaagugaugcugugugaaccaacaauaauagaaaggaacauaacagagauaguguaucugaccaacaccaccauagagaaggaaauaugccccaaaccagcagaauacagaaauuggucaaaaccgcaauguggcauuacaggauuugcaccuuucucuaaggacaauucgauuaggcuuuccgcugguggggacaucugggugacaagagaaccuuaugugucaugcgauccugacaaguguuaucaauuugcccuuggacagggaacaacacuaaacaacgugcauucaaauaacacaguacgugauaggaccccuuaucggacucuauugaugaaugaguuggguguuccuuuucaucuggggaccaagcaagugugcauagcaugguccagcucaaguugucacgauggaaaagcauggcugcauguuuguauaacgggggaugauaaaaaugcaacugcuagcuucauuuacaaugggaggcuuguagauaguguuguuucaugguccaaagaaauucucaggacccaggagucagaaugcguuuguaucaauggaacuuguacaguaguaaugacugauggaagugcuucaggaaaagcugauacuaaaauacuauucauugaggaggggaaaaucguucauacuagcacauugucaggaagugcucagcaugucgaagagugcucuugcuauccucgauauccuggugucagaugugucugcagagacaacuggaaaggcuccaaucggcccaucguagauauaaacauaaaggaucauagcauuguuuccaguuauguguguucaggacuuguuggagacacacccagaaaaaacgacagcuccagcaguagccauuguuuggauccuaacaaugaagaagguggucauggagugaaaggcugggccuuugaugauggaaaugacguguggaugggaagaacaaucaacgagacgucacgcuuaggguaugaaaccuucaaagucauugaaggcugguccaauccuaaguccaaauugcagauaaauaggcaagucauaguugacagaggugauagguccgguuauucugguauuuucucuguugaaggcaaaagcugcgucaaucggugcuuuuauguagaguugauuaggggaagaaaagaggaaacugaagucuuguggaccucaaacaguauuguuguguuuuguggcaccucagguacauauggaacaggcucauggccugauggggcggaccucaaccucaugccuauauaa

SEQ ID NO: 55872 - RNA, 1410 nt, Artificial Sequence; identical to SEQ ID NO: 55865
  derived and/or modified CDS sequence (wt) from neuraminidase__InfluenzaA__AGV99112

SEQ ID NO: 55873 - RNA, 1410 nt, Artificial Sequence; identical to SEQ ID NO: 55865
  derived and/or modified CDS sequence (wt) from neuraminidase__InfluenzaA__AGV99124

SEQ ID NO: 55874 - RNA, 1410 nt, Artificial Sequence; identical to SEQ ID NO: 55865
  derived and/or modified CDS sequence (wt) from neuraminidase__InfluenzaA__AGV99136

SEQ ID NO: 55875 - RNA, 1410 nt, Artificial Sequence; identical to SEQ ID NO: 55866
  derived and/or modified CDS sequence (wt) from neuraminidase__InfluenzaA__AGV99148

SEQ ID NO: 55876 - RNA, 1410 nt, Artificial Sequence; identical to SEQ ID NO: 55866
  derived and/or modified CDS sequence (wt) from neuraminidase__InfluenzaA__AGV99160

SEQ ID NO: 55877 - RNA, 1410 nt, Artificial Sequence
  derived and/or modified CDS sequence (wt) from neuraminidase__InfluenzaA__AGV99172
augaauccaaaucaaaagauaauaacgauuggcucuguuucucucaccauuuccacaauaugcuucuucaugcaaauugccaucuugauaacuacuguaacauugcauuucaagcaauaugaauucaacucccccccaaacaaccaagugaugcugugugaaccaacaauaauagaaagaaacauaacagagauaguguaucugaccaacaccaccauagagaaggaaauaugccccaaaccagcagaauacagaaauuggucaaaaccgcaauguggcauuacaggauuugcaccuuucucuaaggacaauucgauuaggcuuuccgcugguggggacaucugggugacaagagaaccuuaugugucaugcgauccugacaaguguuaucaauuugcccuuggacagggaacaacacuaaacaacgugcauucaaauaacacaguacgugauaggaccccuuaucggacucuauugaugaaugaguuggguguuccuuuucaucuggggaccaagcaagugugcauagcaugguccagcucaaguugucacgauggaaaagcauggcugcauguuugcauaacgggggaugauaaaaaugcaacugcuagcuucauuuacaaugggaggcuuguagauaguguuguuucaugguccaaagaaauucucaggacccaggagucagaaugcguuuguaucaauggaacuuguacaguaguaaugacugauggaagugcuucaggaaaagcugauacuaaaauacuauucauugaggagggaaaaaucguucauacuagcacauugucaggaagugcucagcaugucgaagagugcucuugcuauccucgauauccuggugucagaugugucugcagagacaacuggaaaggcuccaaucggcccaucguagauauaaacauaaaggaucauagcauuguuuccaguuauguguguucaggacuuguuggagacacacccagaaaaaacgacagcuccagcaguagccauuguuuggauccuaacaaugaagaagguggucauggagugaaaggcugggccuuugaugauggaaaugacguguggaugggaagaacaaucaacgagacgucacgcuuaggguaugaaaccuucaaagucauugaaggcugguccaacccuaaguccaaauugcagauaaauaggcaagucauaguugacagaggugauagguccgguuauucugguauuuucucuguugaaggcaaaagcugcaucaaucggugcuuuuauguggaguugauuaggggaaggaaagaggaaacugaagucuuguggaccucaaacaguauuguuguguuuuguggcaccucagguacauauggaacaggcucauggccugauggggcggaccucaaucucaugccuauauaa

SEQ ID NO: 55878 - RNA, 1410 nt, Artificial Sequence; identical to SEQ ID NO: 55866
  derived and/or modified CDS sequence (wt) from neuraminidase__InfluenzaA__AGV99196

SEQ ID NO: 55879 - RNA, 1410 nt, Artificial Sequence; identical to SEQ ID NO: 55337
  derived and/or modified CDS sequence (wt) from neuraminidase__InfluenzaA__AGV99208

SEQ ID NO: 55880 - RNA, 1410 nt, Artificial Sequence
  derived and/or modified CDS sequence (wt) from neuraminidase__InfluenzaA__AGV99959
augaauccaaaucaaaagauaauaacgauuggcucuguuucucucaccauuuccacaauaugcuucuucaugcaaauugccaucuugauaacuacuguaacauugcauuucaagcaauaugaauucaacucccccccaaacaaccaagugaugcugugugaaccaacaauaauagaaagaaacauaacagagauaguguaucugaccaacaccaccauagagaaggaaauaugccccaaaccagcagaauacagaaauuggucaaaaccgcaauguggcauuacaggauuugcaccuuucucuaaggacaauucgauuaggcuuuccgcugguggggacaucugggugacaagagaaccuuaugugucaugcgaucccgacaaguguuaucaauuugcccuuggacagggaacaacacuaaacaacgugcauucaaauaacacaguacgugauaggaccccuuaucggacucuauugaugaaugaguuggguguuccuuuucaucuggggaccaagcaagugugcauagcaugguccagcucaaguugucacgauggaaaagcauggcugcauguuuguauaacgggggaugauaaaaaugcaacugcuagcuucauuuacaaugggaggcuuguagauaguguuguuucaugguccaaagaaauucucaggacccaggagucagaaugcguuuguaucaauggaacuuguacaguaguaaugacugauggaagugcuucaggaaaagcugauacuaaaauacuauucauugaggaggggaaaaucguucauacuagcacauugucaggaagugcucagcaugucgaagagugcucuugcuauccucgauauccuggugucagaugugucugcagagacaacuggaaaggcuccaaucggcccaucguagauauaaacauaaaggaucauagcauuguuuccaguuauguguguucaggacuuguuggagacacacccagaaaaaacgacagcuccagcaguagccauuguuuggauccuaacaaugaagaagguggucauggagugaaaggcugggccuuugaugauggaaaugacguguggaugggaagaacaaucaacgagacgucacgcuuaggguaugaaaccuucaaagucauugaaggcugguccaacccuaaguccaaauugcagauaaauaggcaagucauaguugacagaggugauagguccgguuauucugguauuuucucuguugaaggcaaaagcugcaucaaucggugcuuuuauguggaguugauuaggggaagaaaagaggaaacugaagucuuguggaccucaaacaguauuguuguguuuuguggcaccucagguacauauggaacaggcucauggccugauggggcggaccucaaucucaugccuauauaa

SEQ ID NO: 55881 - RNA, 1410 nt, Artificial Sequence
  derived and/or modified CDS sequence (wt) from neuraminidase__InfluenzaA__AGW00005
augaauccaaaucaaaagauaauaacgauuggcucuguuucucucaccauuuccacaguaugcuucuucaugcaaauugccaucuugauaacuacuguaacauugcauuucaagcaauaugaauucaacucccccccaaacaaccaagugaugcugugugaaccaacaauaauagaaagaaacauaacagagauaguguaucugaccaacaccaccauagagaaggaaauaugccccaaaccagcagaauacagaaauuggucaaagccgcaauguggcauuacaggauuugcaccuuucucuaaggacaauucgauuaggcuuuccgcugguggggacaucugggugacaagagaaccuuaugugucaugcgauccugacaaguguuaucaauuugcccuuggacagggaacaacacuaaacaacgugcauucaaauaacacaguacgugauaggaccccuuaucggacucuauugaugaaugaguuggguguuccuuuucaucuggggaccaagcaagugugcauagcaugguccagcucaaguugucacgauggaaaagcauggcugcauguuuguauaacgggggaugauaaaaaugcaacugcuagcuucauuuacaaugggaggcuuguagauaguguuguuucaugguccaaagaaauucucaggacccaggagucagaaugcguuuguaucaauggaacuuguacaguaguaaugacugauggaagugcuucaggaaaagcugauacuaaaauacuauucauugaggaggggaaaaucguucauacuagcacauugucaggaagugcucagcaugucgaagagugcucuugcuauccucgauauccuggugucagaugugucugcagagacaacuggaaaggcuccaaucggcccaucguagauauaaacauaaaggaucauagcauuguuuccaguuauguguguucaggacuuguuggagacacacccagaaaaaacgacagcuccagcaguagccauuguuuggauccuaacaaugaagaagguggucauggagugaaaggcugggccuuugaugauggaaaugacguguggaugggaagaacaaucaacgagacgucacgcuuaggguaugaaaccuucaaagucauugaaggcugguccaacccuaaguccaaauugcagauaaauaggcaagucauaguugacagaggugauagguccgguuauucugguauuuucucuguugaaggcaaaagcugcaucaaucggugcuuuuauguggaguugauuaggggaagaaaagaggaaacugaagucuuguggaccucaaacaguauuguuguguuuuguggcaccucagguacauauggaacaggcucauggccugauggggcggaccucaaucucaugccuauauaa

SEQ ID NO: 55882 - RNA, 1410 nt, Artificial Sequence; identical to SEQ ID NO: 55337
  derived and/or modified CDS sequence (wt) from neuraminidase__InfluenzaA__AGW00068

SEQ ID NO: 55883 - RNA, 1410 nt, Artificial Sequence
  derived and/or modified CDS sequence (wt) from neuraminidase__InfluenzaA__AGW00080
augaauccaaaucaaaagauaauaacgauuggcucuguuucucucaccauuuccacaauaugcuucuucaugcaaauugccaucuugauaacuacuguaacauugcauuucaagcaauaugaauucgacucccccccaaacaaccaagugaugcugugugaaccaacaauaauagaaagaaacauaacagagauaguguaucugaccaacaccaccauagagaaggaaauaugccccaaaccagcagaauacagaaauuggucaaaaccgcaauguggcauuacaggauuugcaccuuucucuaaggacaauucgauuaggcuuuccgcugguggggacaucugggugacaagagaaccuuaugugucaugcgauccugacaaguguuaucaauuugcccuuggacagggaacaacacuaaacaacgugcauucaaauaacacaguacgugauaggaccccuuaucggacucuauugaugaaugaguuggguguuccuuuucaucuggggaccaagcaagugugcauagcaugguccagcucaaguugucacgauggaaaagcauggcugcauguuuguauaacgggggaugauaaaaaugcaacugcuagcuucauuuacaaugggaggcuuguagauaguguuguuucaugguccaaagaaauucucaggacccaggagucagaaugcguuuguaucaauggaacuuguacaguaguaaugacugauggaagugcuucaggaaaagcugauacuaaaauacuauucauugaggaggggaaaaucguucauacuagcacauugucaggaagugcucagcauguugaagagugcucuugcuauccucgauauccuggugucagaugugucugcagagacaacuggaaaggcuccaaucggcccaucguagauauaaacauaaaggaucauagcauuguuuccaguuauguguguucaggacuuguuggagacacacccagaaaaaacgacagcuccagcaguagccauuguuuggauccuaacaaugaagaagguggucauggagugaaaggcugggccuuugaugauggaaaugacguguggaugggaagaacaaucaacgagacgucacgcuuaggguaugaaaccuucaaagucauugaaggcugguccaacccuaaguccaaauugcagauaaauaggcaagucauaguugacagaggugauagguccgguuauucugguauuuucucuguugaaggcaaaagcugcaucaaucggugcuuuuauguggaguugauuaggggaagaaaagaggaaacugaagucuuguggaccucaaacaguauuguuguguuuuguggcaccucagguacauauggaacaggcucauggccugauggggcggaccucaaccucaugccuauauaa

SEQ ID NO: 55884 - RNA, 1410 nt, Artificial Sequence
  derived and/or modified CDS sequence (wt) from neuraminidase__InfluenzaA__AGW00104
augaauccaaaucaaaagauaauaacgauuggcucuguuucucucaccauuuccacaauaugcuucuucaugcaaauugccaucuugauaacuacuguaacauugcauuucaagcaauaugaauucaacucccccccaaacaaccaagugaugcugugugaaccaacaauaauagaaagaaacauaacagagauaguguaucugaccaacaccaccauagagaaggaaauaugccccaaaccagcagaauacagaaauuggucaaaaccgcaauguggcauuacaggauuugcaccuuucucuaaggacaauucgauuaggcuuuccgcugguggggacaucugggugacaagagaaccuuaugugucaugcgauccugacaaguguuaucaauuugcccuuggacagggaacaacacuaaacaacgugcauucaaauaacacaguacgugauaggaccccuuaucggacucuauugaugaaugaguuggguguuccuuuucaucuggggaccaagcaagugugcauagcaugguccagcucaaguugucacgauggaaaagcauggcugcauguuugcauaacgggggaugauaaaaaugcaacugcuagcuucauuuacaaugggaggcuuguagauaguguuguuucaugguccaaagaaauucucaggacccaggagucagaaugcguuuguaucaauggaacuuguacaguaguaaugacugauggaagugcuucaggagaagcugauacuaaaauacuauucauugaggagggaaaaaucguucauacuagcacauugucaggaagugcucagcaugucgaagagugcucuugcuauccucgauauccuggugucagaugugucugcagagacaacuggaaaggcuccaaucggcccaucguagauauaaacauaaaggaucauagcauuguuuccaguuauguguguucaggacuuguuggagacacacccagaaaaaacgacagcuccagcaguagccauuguuuggauccuaacaaugaagaagguggucauggagugaaaggcugggccuuugaugauggaaaugacguguggaugggaagaacaaucaacgagacgucacgccuaggguaugaaaccuucaaagucauugaaggcugguccaacccuaaguccaaauugcagauaaauaggcaagucauaguugacagaggugauagguccgguuauucugguauuuucucuguugaaggcaaaagcugcaucaaucggugcuuuuauguggaguugauuaggggaagaaaagaggaaacugaagucuuguggaccucaaacaguauuguuguguuuuguggcaccucagguacauauggaacaggcucauggccugauggggcggaccucaaucucaugccuauauaa

SEQ ID NO: 55885 - RNA, 1410 nt, Artificial Sequence; identical to SEQ ID NO: 55883
  derived and/or modified CDS sequence (wt) from neuraminidase__InfluenzaA__AGW00116

SEQ ID NO: 55886 - RNA, 1410 nt, Artificial Sequence; identical to SEQ ID NO: 55883
  derived and/or modified CDS sequence (wt) from neuraminidase__InfluenzaA__AGW00128

SEQ ID NO: 55887 - RNA, 1410 nt, Artificial Sequence; identical to SEQ ID NO: 55877
  derived and/or modified CDS sequence (wt) from neuraminidase__InfluenzaA__AGW00140

SEQ ID NO: 55888 - RNA, 1410 nt, Artificial Sequence
  derived and/or modified CDS sequence (wt) from neuraminidase__InfluenzaA__AGW00152
augaauccaaaucaaaagauaauaacgauuggcucuguuucucucaccauuuccacaauaugcuucuucaugcaaauugccaucuugauaacuacuguaacauugcauuucaagcaauaugaauucaacucccccccaaacaaccaagugaugcugugugaaccaacaauaauagaaagaaacauaacagagauaguguaucugaccaacaccaccauagagaaggaaauaugccccaaaccagcagaauacagaaauuggucaaaaccgcaauguggcauuacaggauuugcaccuuucucuaaggacaauucgauuaggcuuuccgcugguggggacaucugggugacaagagaaccuuaugugucaugcgauccugacaaguguuaucaauuugcccuuggacagggaacaacacuaaacaacgugcauucaaauaacacaguacgugauaggaccccuuaucggacucuauugaugaaugaguuggguguuccuuuucaucuggggaccaagcaagugugcauagcaugguccagcucaaguugucacgauggaaaagcauggcugcauguuuguauaacgggggaugauaaaaaugcaacugcuagcuucauuuacaaugggaggcuuguagauaguguuguuucaugguccaaagaaauucucaggacccaggagucagaaugcguuuguaucaauggaacuuguacaguaguaaugacugauggaagugcuucaggaaaagcugauacuaaaauacuauucauugaggaggggaaaaucguucauacuagcacauugucaggaagugcucagcauguugaagagugcucuugcuauccucgauauccuggugucagaugugucugcagagacaacuggaaaggcuccaaucggcccaucguagauauaaacauaaaggaucauagcauuguuuccaguuauguguguucaggacuuguuggagacacacccagaaaaaacgacagcuccagcaguagccauuguuuggauccuaacaaugaagaagguggucauggagugaaaggcugggccuuugaugauggaaaugacguguggaugggaagaacaaucaacgagacgucacgcuuaggguaugaaaccuucaaaguuauugaaggcugguccaacccuaaguccaaauugcagauaaauaggcaagucauaguugacagaggugauagguccgguuauucugguauuuucucuguugaaggcaaaagcugcaucaaucggugcuuuuauguggaguugauuaggggaagaaaagaggaaacugaaguuuuguggaccucaaacaguauuguuguguuuuguggcaccucagguacauauggaacaggcucauggccugauggggcggaccucaaccucaugccuauauaa

SEQ ID NO: 55889 - RNA, 1410 nt, Artificial Sequence; identical to SEQ ID NO: 55883
  derived and/or modified CDS sequence (wt) from neuraminidase__InfluenzaA__AGW00164

SEQ ID NO: 55890 - RNA, 1410 nt, Artificial Sequence; identical to SEQ ID NO: 55865
  derived and/or modified CDS sequence (wt) from neuraminidase__InfluenzaA__AGW00176

SEQ ID NO: 55891 - RNA, 1410 nt, Artificial Sequence; identical to SEQ ID NO: 55866
  derived and/or modified CDS sequence (wt) from neuraminidase__InfluenzaA__AGW00188

SEQ ID NO: 55892 - RNA, 1410 nt, Artificial Sequence; identical to SEQ ID NO: 55865
  derived and/or modified CDS sequence (wt) from neuraminidase__InfluenzaA__AGW00712

SEQ ID NO: 55893 - RNA, 1410 nt, Artificial Sequence; identical to SEQ ID NO: 55865
  derived and/or modified CDS sequence (wt) from neuraminidase__InfluenzaA__AGW00724

SEQ ID NO: 55894 - RNA, 1410 nt, Artificial Sequence
  derived and/or modified CDS sequence (wt) from neuraminidase__InfluenzaA__AGW00736
augaauccaaaucaaaagauaauaacgauuggcucuguuucucucaccauuuccacaauaugcuucuucaugcaaauugccaucuugauaacuacuguaacauugcauuucaagcaauaugaauucaacucccccccaaacaaccaaaugaugcugugugaaccaacaauaauagaaagaaacauaacagagauaguguaucugaccaacaccaccauagagaaggaaauaugccccaaaccagcagaauacagaaauuggucaaaaccgcaauguggcauuacaggauuugcaccuuucucuaaggacaauucgauuaggcuuuccgcugguggggacaucugggugacaagagaaccuuaugugucaugcgauccugacaaguguuaucaauuugcccuuggacagggaacaacacuaaacaacgugcauucaaauaacacaguacgugauaggaccccuuaucggacucuauugaugaaugaguuggguguuccuuuucaucuggggaccaagcaagugugcauagcaugguccagcucaaguugucacgauggaaaagcauggcugcauguuugcauaacgggggaugauaaaaaugcaacugcuagcuucauuuacaaugggaggcuuguagauaguguuguuucaugguccaaagaaauucucaggacccaggagucagaaugcguuuguaucaauggaacuuguacaguaguaaugacugauggaagugcuucaggaaaagcugauacuaaaauacuauucauugaggagggaaaaaucguucauacuagcacauugucaggaagugcucagcaugucgaagagugcucuugcuauccucgauauccuggugucagaugugucugcagagacaacuggaaaggcuccaaucggcccaucguagauauaaacauaaaggaucauagcauuguuuccaguuauguguguucaggacuuguuggagacacacccagaaaaaacgacagcuccagcaguagccauuguuuggauccuaacaaugaagaagguggucauggagugaaaggcugggccuuugaugauggaaaugacguguggaugggaagaacaaucaacgagacgucacgcuuaggguaugaaaccuucaaagucauugaaggcugguccgacccuaaguccaaauugcagauaaauaggcaagucauaguugacagaggugauagguccgguuauucugguauuuucucuguugaaggcaaaagcugcaucaaucggugcuuuuauguggaguugauuaggggaaggaaagaggaaacugaagucuuguggaccucaaacaguauuguuguguuuuguggcaccucagguacauauggaacaggcucauggccugauggggcggaccucaaucucaugccuauauaa

SEQ ID NO: 55895 - RNA, 1410 nt, Artificial Sequence
  derived and/or modified CDS sequence (wt) from neuraminidase__InfluenzaA__AGW00748
augaauccaaaucaaaagauaauaacgauuggcucuguuucucucaccauuuccacaauaugcuucuucaugcaaauugccaucuugauaacuacuguaacauugcauuucaagcaauaugaauucaacucccccccaaacaaccaagugaugcugugugaaccaacaauaauagaaagaaacauaacagagauaguguauuugaccaacaccaccauagagaaggaaauaugccccaaaccagcagaauacagaaauuggucaaaaccgcaauguggcauuacaggauuugcaccuuucucuaaggacaauucgauuaggcuuuccgcugguggggacaucugggugacaagagaaccuuaugugucaugcgauccugacaaguguuaucaauuugcccuuggacagggaacaacacuaaacaacaugcauucaaauaacacaguacgugauaggaccccuuaucggacucuauugaugaaugaguuggguguuccuuuucaucuggggaccaagcaagugugcauagcaugguccagcucaaguugucacgauggaaaagcauggcugcauguuuguauaacgggggaugauaaaaaugcaacugcuagcuucauuuacaaugggaggcuuguagauaguguuguuucaugguccaaagaaauucucaggacccaggagucagaaugcguuuguaucaauggaacuuguacaguaguaaugacugauggaagugcuucaggaaaagcugauacuaaaauauuauucauugaggaggggaaaaucguucauacuagcacauugucaggaagugcucagcaugucgaagagugcucuugcuauccucgauauccuggugucagaugugucugcagagacaacuggaaaggcuccaaucggcccaucguagauauaaacauaaaggaucauagcauugucuccaguuauguguguucaggacuuguuggagacacacccagaaaaaacgacagcuccagcaguagccauuguuuggauccuaacaaugaagaagguggucauggagugaaaggcugggccuuugaugauggaaaugacguguggaugggaagaacaaucaacgagacgucacgcuuaggguaugaaaccuucaaagucauugaaggcugguccaacccuaaguccaaauugcagauaaauaggcaagucauaguugacagaggugauagguccgguuauucugguauuuucucuguugaaggcaaaagcugcaucaaucggugcuuuuauguggaguugauuaggggaagaaaagaggaaacugaagucuuguggaccucaaacaguauuguuguguuuuguggcaccucagguacauauggaacaggcucauggccugauggggcggaccucaaucucaugccuauauaa

SEQ ID NO: 55896 - RNA, 1410 nt, Artificial Sequence
  derived and/or modified CDS sequence (wt) from neuraminidase__InfluenzaA__AGW00760
augaauccaaaucaaaagauaauaacgauuggcucuguuucucucaccauuuccacaauaugcuucuucaugcaaauugccaucuugauaacuacuguaacauugcauuucaagcaauaugaauucaacucccccccaaacaaccaagugaugcugugugaaccaacaauaauagaaagaaacauaacagagauaguguaucugaccaacaccaccauagagaaggaaauaugccccaaaccagcagaauacagaaauuggucaaaaccgcaauguggcauuacaggauuugcaccuuucucuaaggacaauucgauuaggcuuuccgcugguggggacaucugggugacaagagaaccuuaugugucaugcgauccugacaaguguuaucaauuugcccuuggacagggaacaacacuaaacaacgugcauucaaauaacacaguacgugauaggaccccuuaucggacucuauugaugaaugaguuggguguuccuuuucaucuggggaccaagcaagugugcauagcaugguccagcucaaguugucacgauggaaaagcauggcugcauguuugcauaacgggggaugauaaaaaugcaacugcuagcuucauuuacaaugggaggcuuguagauaguguuguuucaugguccaaagaaauucucaggacccaggagucagaaugcguuuguaucaauggaacuuguacaguaguaaugacugauggaagugcuucaggaaaagcugauacuaaaauacuauucauugaggagggaaaaaucguucauacuagcacauugucaggaagugcucagcaugucgaagagugcucuugcuauccucgauauccuggugucagaugugucugcagagacaacuggaaaggcuccaaucggcccaucguagauauaaacauaaaggaucauagcauuguuuccaguuauguguguucaggacuuguuggagacacacccagaaaaaacgacagcuccagcaguagccauuguuuggauccuaacaaugaagaagguggucauggagugaaaggcugggccuuugaugauggaaaugacguguggaugggaagaacaaucaacgagacgucacgcuuaggguaugaaaccuucaaagucauugaaggcugguccaacccuaaguccaaauugcagguaaauaggcaagucauaguugacagaggugauagguccgguuauucugguauuuucucuguugaaggcaaaagcugcaucaaucggugcuuuuauguggaguugauuaggggaagaaaagaggaaacugaagucuuguggaccucaaacaguauuguuguguuuuguggcaccucagguacauauggaacaggcucauggccugauggggcggaccucaaucucaugccuauauaa

SEQ ID NO: 55897 - RNA, 1410 nt, Artificial Sequence
  derived and/or modified CDS sequence (wt) from neuraminidase__InfluenzaA__AGW00784
augaauccaaaucaaaagauaauaacgauuggcucuguuucucucaccauuuccacaauaugcuucuucaugcaaauugccaucuugauaacuacuguaacauugcauuucaagcaauaugaauucaacucccccccaaacaaccaagugaugcugugugaaccaacaauaauagaaaggaacauaacagagauaguguaucugaccaacaccaccauagagaaggaaauaugccccaaaccagcagaauacagaaauuggucaaaaccgcaauguggcauuacaggauuugcaccuuucucuaaggacaauucgauuaggcuuuccgcugguggggacaucugggugacaagagaaccuuaugugucaugcgauccugacaaguguuaucaauuugcccuuggacagggaacaacacuaaacaacgugcauucaaauaacacaguacgugauaggaccccuuaucggacucuauugaugaaugaguuggguguuccuuuucaucuggggaccaagcaagugugcauagcaugguccagcucaaguugucacgauggaaaagcauggcugcauguuuguauaacgggggaugauaaaaaugcaacugcuagcuucauuuacaaugggaggcuuguagauaguguuguuucaugguccaaagaaauucucaggacccaggagucagaaugcguuuguaucaauggaacuuguacaguaguaaugacugauggaagugcuucaggaaaagcugauacuaaaauacuauucauugaggaggggaaaaucguucauacuagcacauugucaggaagugcucagcaugucgaagagugcucuugcuauccucgauauccuggugucagaugugucugcagagacaacuggaaaggcuccaaucggcccauuguagauauaaacauaaaggaucauagcauuguuuccaguuauguguguucaggacuuguuggagacacacccagaaaaaacgacagcuccagcaguagccauuguuuggauccuaacaaugaagaagguggucauggagugaaaggcugggccuuugaugauggaaaugacguguggaugggaagaacaaucaacgagacgucacgcuuaggguaugaaaccuucaaagucauugaaggcugguccaauccuaaguccaaauugcagauaaauaggcaagucauaguugacagaggugauagguccgguuauucugguauuuucucuguugaaggcaaaagcugcaucaaucggugcuuuuauguagaguugauuaggggaagaaaagaggaaacugaagucuuguggaccucaaacaguauuguuguguuuuguggcaccucagguacauauggaacaggcucauggccugauggggcggaccucaaucucaugccuauauaa

SEQ ID NO: 55898 - RNA, 1410 nt, Artificial Sequence; identical to SEQ ID NO: 55337
  derived and/or modified CDS sequence (wt) from neuraminidase__InfluenzaA__AGW00796

SEQ ID NO: 55899 - RNA, 1410 nt, Artificial Sequence
  derived and/or modified CDS sequence (wt) from neuraminidase__InfluenzaA__AGW00808
augaauccaaaucaaaagauaauaacgauuggcucuguuucucucaccauuuccacaauaugcuucuucaugcaaauugccaucuugauaacuacuguaacauugcauuucaagcaauaugaauucgacucccccccaaacaaccaagugaugcugugugaaccaacaauaauagaaagaaacauaacagagauaguguaucugaccaacaccaccauagagaaggaaauaugccccaaaccagcagaauacagaaauuggucaaaaccgcaauguggcauuacaggauuugcaccuuucucuaaggacaauucgauuaggcuuuccgcugguggggacaucugggugacaagagaaccuuaugugucaugcgauccugacaaguguuaucaauuugcccuuggacagggaacaacacuaaacaacgugcauucaaauaacacaguacgugauaggaccccuuaucggacucuauugaugaaugaguuggguguuccuuuucaucuggggaccaagcaagugugcauagcaugguccagcucaaguugucacgauggaaaagcauggcugcauguuuguauaacgggggaugauaaaaaugcaacugcuagcuucauuuacaaugggaggcuuguagauaguguugucucaugguccaaagaaauucucaggacccaggagucagaaugcguuuguaucaauggaacuuguacaguaguaaugacugauggaagugcuucaggaaaagcugauacuaaaauacuauucauugaggaggggaaaaucguucauacuagcacauugucaggaagugcucagcauguugaagagugcucuugcuauccucgauauccuggugucagaugugucugcagagacaacuggaaaggcuccaaucggcccaucguagauauaaacauaaaggaucauagcauuguuuccaguuauguguguucaggacuuguuggagacacacccagaaaaaacgacagcuccagcaguagccauuguuuggauccuaacaaugaagaagguggucauggagugaaaggcugggccuuugaugauggaaaugacguguggaugggaagaacaaucaacgagacgucacgcuuaggguaugaaaccuucaaagucauugaaggcugguccaacccuaaguccaaauugcagauaaauaggcaagucauaguugacagaggugauagguccgguuauucugguauuuucucuguugaaggcaaaagcugcaucaaucggugcuuuuauguggaguugauuaggggaagaaaagaggaaacugaaguuuuguggaccucaaacaguauuguuguguuuuguggcaccucagguacauauggaacaggcucauggccugauggggcggaccucaaccucaugccuauauaa

SEQ ID NO: 55900 - RNA, 1410 nt, Artificial Sequence
  derived and/or modified CDS sequence (wt) from neuraminidase__InfluenzaA__AGW00820
augaauccaaaucaaaagauaauaacgauuggcucuguuucucucaccauuuccacaauaugcuucuucaugcaaauugccaucuugauaacuacuguaacauugcauuucaagcaauaugaauucaauucccccccaaacaaccaagugaugcugugugaaccaacaauaauagaaagaaacauaacagagauaguguaucuaaccaacaccaccauagagaaggaaauaugccccaaaccagcagaauacagaaauuggucaaagccgcagugugacauuacaggauuugcaccuuuuucuaaggacaauucgauuaggcuuuccgcugguggggacaucugggugacaagagaaccuuaugugucaugcgauccugacaaguguuaucaauuugcucuuggacagggaacaacacuaaacaacgugcauucaaauaacacaguacgugauaggaccccuuaucggacccuauugaugaaugaguuagguguuccuuuucaucuggguaccaagcaagugugcauagcaugguccagcucaaguugucacgauggaaaagcauggcugcauguuuguauaacgggggaugauaaaaaugcaacugcuagcuucauuuacaaugggaggcuuguagauaguguuguuucaugguccaaagaaauccucaggacccaggaaucagaaugcguuuguaucaauggaacuuguacaguaguaaugacugaugggagugcuucaggaaaagcugauacuaaaauacuauucauugaggaggggaaaaucguucauacuagcacauugucaggaagugcucagcaugucgaggagugcucuugcuauccucgauauccuggugucagaugugucugcagagacaacuggaaaggcuccaauaggccuaucguagauauaaacauaaaggaucauagcauuguuuccagguauguguguucaggacuuguuggagacacacccagaaaaaacgacagcucaagcaguagccauuguuuggauccuaacaaugaagaagguggucauggagugaaaggcugggccuucgaugauggaaaugacguguggaugggaagaacgaucaacgagacgucacguuuaggguaugaaaccuucaaagucauugaaggcugguccaacccuaaguccaaauugcagauaaauaggcaggucauaguugacagaggugauagguccgguuauucugguauuuucucuguugaaggcaaaagcugcaucaaucggugcuuuuauguggaguugauuaggggaagaaaagaggaaacugaagucuuguggaccucaaacaguauuguuguguuuuguggcaccucagguacauauggaacaggcucauggccugauggggcggaccucaaucucaugccuauauaa

SEQ ID NO: 55901 - RNA, 1410 nt, Artificial Sequence
  derived and/or modified CDS sequence (wt) from neuraminidase__InfluenzaA__AGW00832
augaauccaaaucaaaagauaauaacgauuggcucuguuucucucaccauuuccacaauaugcuucuucaugcaaauugccaucuugauaacuacuguaacauugcauuucaagcaauaugaauucaacucccccccaaacaaccaagugaugcugugugaaccaacaauaauagaaagaaacauaacagagauaguguaucugaccaacaccaccauagagaaggaaauaugccccaaaccagcagaauacagaaauuggucaaagccgcaauguggcauuacaggauuugcaccuuucucuaaggacaauucgauuaggcuuuccgcugguggggacaucugggugacaagagaaccuuaugugucaugcgauccugacaaguguuaucaauuugcccuuggacagggaacaacacuaaacaacgugcauucaaauaacacaguacgugauagaaccccuuaucggacucuauugaugaaugaguuggguguuccuuuucaucuggggaccaagcaagugugcauagcaugguccagcucaaguugucacgauggaaaagcauggcugcauguuuguauaacgggggaugauaaaaaugcaacugcuagcuucauuuacaaugggaggcuuguagauaguguuguuucaugguccaaagaaauucucaggacccaggagucagaaugcguuuguaucaauggaacuuguacaguaguaaugacugauggaagugcuucaggaaaagcugauacuaaaauacuauucauugaggaggggaaaaucguucauacuagcacauugucaggaagugcucagcaugucgaagagugcucuugcuauccucgauauccuggugucagaugugucugcagagacaacuggaaaggcuccaaucggcccaucguagauauaaacauaaaggaucauagcauuguuuccaguuauguguguucaggacuuguuggagacacacccagaaaaaacgacagcuccagcaguagccauuguuuggauccuaacaaugaagaagguggucauggagugaaaggcugggccuuugaugauggaaaugacguguggaugggaagaacaaucaacgagacgucacgcuuaggguaugaaaccuucaaagucauugaaggcugguccaacccuaaguccaaauugcagauaaauaggcaagucauaguugacagaggugauagguccgguuauucugguauuuucucuguugaaggcaaaagcugcaucaaucggugcuuuuauguggaguugauuaggggaagaaaagaggaaacugaagucuuguggaccucaaacaguauuguuguguuuuguggcaccucagguacauauggaacaggcucauggccugauggggcggaccucaaucucaugccuauauaa

SEQ ID NO: 55902 - RNA, 1410 nt, Artificial Sequence
  derived and/or modified CDS sequence (wt) from neuraminidase__InfluenzaA__AGW00844
augaauccaaaucaaaagauaauaacgauuggcucuguuucucucaccauuuccacaauaugcuucuucaugcaaauugccaucuugauaacuacuguaacauugcauuucaagcaauaugaauucaacuuccccccaaacaaccaagugaugcugugugaaccaacaauaauagaaagaaacauaacagagauaguguaucugaccaacaccaccauagagaaggaaauaugccccaaaccagcagaauacagaaauuggucaaaaccgcaauguggcauuacaggauuugcaccuuucucuaaggacaauucgauuaggcuuuccgcugguggggacaucugggugacaagagaaccuuaugugucaugcgauccugacaaguguuaucaauuugcccuuggacagggaacaacacuaaacaacgugcauucaaauaacacaguacgugauaggaccccuuaucggacucuauugaugaaugaguuggguguuccuuuucaucuggggaccaagcaagugugcauagcaugguccagcucaaguugucacgauggaaaagcauggcugcauguuugcauaacgggggaugauaaaaaugcaacugcuagcuucauuuacaaugggaggcuuguagauaguguuguuucaugguccaaagaaauucucaggacccaagagucagaaugcguuuguaucaauggaacuuguacaguaguaaugacugauggaagugcuucaggaaaagcugauacuaaaauacuauucauugaggagggaaaaaucguucauacuagcacauugucaggaagugcucagcaugucgaagagugcucuugcuauccucgauauccuggugucagaugugucugcagagacaacuggaaaggcuccaaucggcccaucguagauauaaacauaaaggaucauagcauuguuuccaguuauguguguucaggacuuguuggagacacacccagaaaaaacgacagcuccagcaguagccauuguuuggauccuaacaaugaagaagguggucauggagugaaaggcugggccuuugaugauggaaaugacguguggaugggaagaacaaucaacgagacgucacgcuuaggguaugaaaccuucaaagucauugaaggcugguccaacccuaaguccaaauugcagauaaauaggcaagucauaguugacagaggugauagguccgguuauucugguauuuucucuguugaaggcaaaagcugcaucaaucggugcuuuuauguggaguugauuaggggaagaaaagaggaaacugaagucuuguggaccucaaacaguauuguuguguuuuguggcaccucagguacauauggaacaggcucauggccugauggggcggaccucaaucucaugccuauauaa

SEQ ID NO: 55903 - RNA, 1410 nt, Artificial Sequence
  derived and/or modified CDS sequence (wt) from neuraminidase__InfluenzaA__AGW00868
augaauccaaaucaaaagauaauaacgauuggcucuguuucucucaccauuuccacaauaugcuucuucaugcaaauugccaucuugauaacuacuguaacauugcauuucaagcaauaugaauucaacucccccccaaacaaccaagugaugcugugugaaccaacaauaauagaaagaaacauaacagagauaguguauuugaccaacaccaccauagagaaggaaauaugccccaaaccagcagaauacagaaauuggucaaaaccgcaauguggcauuacaggauuugcaccuuucucuaaggacaauucgauuaggcuuuccgcugguggggacaucugggugacaagagaaccuuaugugucaugcgauccugacaaguguuaucaauuugcccuuggacagggaacaacacuaaacaacaugcauucaaauaacacaguacgugauaggaccccuuaucggacucuauugaugaaugaguuggguguuccuuuucaucuggggaccaagcaagugugcauagcaugguccagcucaaguugucacgauggaaaagcauggcugcauguuuguauaacgggggaugauaaaaaugcaacugcuagcuucauuuacaaugggaggcuuguagauaguguuguuucaugguccaaagaaauucucaggacccaggagucagaaugcguuuguaucaauggaacuuguacaguaguaaugacugauggaagugcuucaggaaaagcugauacuaaaauauuauucauugaggaggggaaaaucguucauacuagcacauugucaggaagugcucagcaugucgaagagugcucuugcuauccccgauauccuggugucagaugugucugcagagacaacuggaaaggcuccaaucggcccaucguagauauaaacauaaaggaucauagcauugucuccaguuauguguguucaggacuuguuggagacacacccagaaaaaacgacagcuccagcaguagccauuguuuggauccuaacaaugaagaagguggucauggagugaaaggcugggccuuugaugauggaaaugacguguggaugggaaggacaaucaaugagacgucacgcuuaggguaugaaaccuucaaagucauugaaggcugguccaacccuaaguccaaauugcagauaaauaggcaagucauaguugacagaggugauagguccgguuauucugguauuuucucuguugaaggcaaaagcugcaucaaucggugcuuuuauguggaguugauuaggggaagaaaagaggaaacugaagucuuguggaccucaaacaguauuguuguguuuuguggcaccucagguacauauggaacaggcucauggccugauggggcggaccucaaucucaugccuauauaa

SEQ ID NO: 55904 - RNA, 1410 nt, Artificial Sequence
  derived and/or modified CDS sequence (wt) from neuraminidase__InfluenzaA__AGW00880
augaauccaaaucaaaagauaauaacgauuggcucuguuucucucaccauuuccacaauaugcuucuucaugcaaauugccaucuugauaacuacuguaacauugcauuucaagcaauaugaauucaacucccccccaaacaaccaagugaugcugugugaaccaacaauaauagaaagaaacauaacagagauaguguaucuaaccaacaccaccauagagaaggaaauaugccccaaaccagcagaauacagaaauuggucaaagccucaaugugacauuacaggauuugcaccuuuuucuaaggacaauucgauuaggcuuuccgcugguggggacgucugggugacaagagaaccuuaugugucaugcgauccugacaaguguuaucaauuugcucuuggacagggaacaacacuaaacaacgugcauucaaauaacacaguacgugauaggaccccuuaucggacccuauugaugaaugaguuagguguuccuuuucaucuggggaccaagcaagugugcauagcaugguccagcucaaguugucacgauggaaaagcauggcugcauguuuguauaacgggggaugauaaaaaugcaacugcuagcuucauuuacaaugggaagcuuguagauaguguuguuucaugguccaaagaaauccucaggacccaggagucagaaugcguuuguaucaauggaacuuguacaguaguaaugacugaugggagugcuucaggaaaagcugauacuaaaauacuauucauugaggaggggaaaaucguucauacuagcacauugucaggaagugcucagcaugucgaggagugcucuugcuauccucgauauccugaugucagaugugucugcagagacaacuggaaaggcuccaauaggccuaucguagauauaaacauaaaggaucauagcauuguuuccagguauguguguucaggacuuguuggagacacacccagaaaaaacgacagcuccagcaguagccauuguuuggauccuaacaaugaagaagguggucauggagugaaaggcugggccuucgaugauggaaaugacguguggaugggaagaacgaucaacgagacgucacguuuaggguaugaaaccuucaaagucauugaaggcugguccaacccuaaguccaaauugcagauaaauaggcaggucauaguugacagaggugauagguccgguuauucugguauuuucucuguugaaggcaaaagcugcaucaaucggugcuuuuauguggaguugauuaggggaagaaaagaggaaacugaagucuuguggaccucaaacaguauuguuguguuuuguggcaccucagguacauauggaacaggcucauggccugauggggcggaccucaaucucaugccuauauaa

SEQ ID NO: 55905 - RNA, 1410 nt, Artificial Sequence
  derived and/or modified CDS sequence (wt) from neuraminidase__InfluenzaA__AGW00892
augaauccaaaucaaaagauaauaacgauuggcucuguuucucuaaccauuuccacaauaugcuucuucaugcaaauugccaucuugauaacuacuguaacauugcauuucaagcaauaugaauucaacccccccccaaacaaccaagugaugcugugugaaccaacgauaauagaaagaaacauaacagagauaguguauuugaccaacaccaccauagagaaggaaauaugccccaaaccagcagaauacagaaauuggucaaaaccgcaauguggcauuacaggauuugcaccuuucucuaaggacaauucgauuaggcuuuccgcugguggggacaucugggugacaagagaaccuuaugugucaugcgauccugacaaguguuaucaauuugcccuuggacagggaacaacacuaaacaacgugcauucaaauaacacaguacgugauaggaccccuuaucggacucuauugaugaaugaguuggguguuccuuuucaucuggggaccaagcaagugugcauagcaugguccagcucaaguugucacgauggaaaagcauggcugcauguuuguauaacgggggaugauaaaaaugcaacugcuagcuucauuuacaaugggaggcuuguagauaguguuguuucaugguccaaagaaauucucaggacccaggagucagaaugcguuuguaucaauggaacuuguacaguaguaaugacugauggaagugcuucaggaaaagcugauacuaaaauacuauucauugaggaggggaaaaucguucauacuagcacauugucaggaagugcucagcaugucgaagagugcucuugcuauccucgauauccuggugucagaugugucugcagagacaacuggaaaggcuccaaucggcccaucguagauauaaacauaaaggaucauagcauuguuuccaguuauguguguucaggacuuguuggagacacacccagaaaaaacgacagcuccagcaguagccauuguuuggauccuaacaaugaagaagguggucauggagugaaaggcugggccuuugaugauggaaaugacguauggaugggaagaacaaucaacgagacgucacgcuuaggguaugaaaccuucaaagucauugaaggcugguccaacccuaaguccaaauugcagaugaauaggcaagucauaguugacagaggugauagguccgguuauucugguauuuucucuguugaaggcaaaagcugcaucaaucggugcuuuuauguggaguugauuaggggaagaaaagaggaaacugaagucuuguggaccucaaacaguauuguuguguuuuguggcaccucagguacauauggaacaggcucauggccugauggggcggaccucaaucucaugccuauauaa

SEQ ID NO: 55906 - RNA, 1410 nt, Artificial Sequence
  derived and/or modified CDS sequence (wt) from neuraminidase__InfluenzaA__AGW00904
augaauccaaaucaaaagauaauaacgauuggcucuguuucucucaccauuuccacaauaugcuucuucaugcaaauugccaucuugauaacuacuguaacauugcauuucaagcaauaugaauucaacucccccccaaacaaccaagugaugcugugugaaccaacaauaauagaaagaaacauaacagagauaguguauuugaccaacaccaccauagagaaggaaauaugccccaaaccagcagaauacagaaauuggucaaaaccgcaauguggcauuacaggauuugcaccuuucucuaaggacaauucgauuaggcuuuccgcugguggggacaucugggugacaagagaaccuuaugugucaugcgguccugacaaguguuaucaauuugcccuuggacagggaacaacacuaaacaacaugcauucaaauaacacaguacgugauaggaccccuuaucggacucuauugaugaaugaguuggguguuccuuuucaucuggggaccaagcaagugugcauagcaugguccagcucaaguugucacgauggaaaagcauggcugcauguuuguauaacaggggaugauaaaaaugcaacugcuagcuucauuuacaaugggaggcuuguagauaguguuguuucaugguccaaagaaauucucaggacccaggagucagaaugcguuuguaucaauggaacuuguacaguaguaaugacugauggaagugcuucaggaaaagcugauacuaaaauauuauucauugaggaggggaaaaucguucauacuagcacauugucaggaagugcucagcaugucgaagagugcucuugcuauccucgauauccuggugucagaugugucugcagagacaacuggaaaggcuccaaucggcccaucguagauauaaacauaaaggaucauagcauugucuccaguuauguguguucaggacuuguuggagacacacccagaaaaaacgacagcuccagcaguagccauuguuuggauccuaacaaugaagaagguggucauggagugaaaggcugggccuuugaugauggaaaugacguguggaugggaagaacaaucaacgagacgucacgcuuaggguaugaaaccuucaaagucauugaaggcugguccaacccuaaguccaaauugcagauaaauaggcaagucauaguugacagaggugauagguccgguuauucugguauuuucucuguugaaggcaaaagcugcaucaaucggugcuuuuauguggaguugauuaggggaagaaaagaggaaacugaagucuuguggaccucaaacaguauuguuguguuuuguggcaccucagguacauauggaacaggcucauggccugauggggcggaccucaaucucaugccuauauaa

SEQ ID NO: 55907 - RNA, 1410 nt, Artificial Sequence
  derived and/or modified CDS sequence (wt) from neuraminidase__InfluenzaA__AGW00916
augaauccaaaucaaaagauaauaacgauuggcucuguuucucucaccauuuccacaauaugcuucuucaugcaaauugccaucuugauaacuacuguaacauugcauuucaagcaauaugaauucaacucccccccaaacaaccaagugaugcugugugaaccaacaauaauagaaagaaacauaacagagauaguguauuugaccaacaccaccauagagaaggaaauaugccccaaaccagcagaauacagaaauuggucaaaaccgcaauguggcauuacaggauuugcaccuuucucuaaggacaauucgauuaggcuuuccgcugguggggacaucugggugacaagagaaccuuaugugucaugcgauccugacaaguguuaucaauuugcccuuggacagggaacaacacuaaacaacaugcauucaaauaacacaguaugugauaggaccccuuaucggacucuauugaugaaugaguuggguguuccuuuucaucuggggaccaagcaagugugcauagcaugguccagcucaaguugucacgauggaaaagcauggcugcauguuuguauaacgggggaugauaaaaaugcaacugcuagcuucauuuacaaugggaggcuuguagauaguguuguuucaugguccaaagaaauucucaggacccaggagucagaaugcguuuguaucaauggaacuuguacaguaguaaugacugauggaagugcuucaggaaaagcugauacuaaaauauuauucauugaggaggggaaaaucguucauacuagcacauugucaggaagugcucaacaugucgaagagugcucuugcuauccucgauauccuggugucagaugugucugcagagacaacuggaaaggcuccaaucggcccaucguagauauaaacauaaaggaucauagcauugucuccaguuauguguguucaggacuuguuggagacacacccagaaaaaacgacagcuccagcaguagccauuguuuggauccuaacaaugaagaagguggucauggagugaaaggcugggccuuugaugauggaaaugacguguggaugggaagaacaaucaacgagacgucacgcuuaggguaugaaaccuucaaagucauugaaggcugguccaacccuaaguccaaauugcagauaaauaggcaagucauaguugacagaggugauagguccgguuauucugguauuuucucuguugaaggcaaaagcugcaucaaucggugcuuuuauguggaguugauuaggggaagaaaagaggaaacugaagucuuguggaccucaaacaguauuguuguguuuuguggcaccucagguacauauggaacaggcucauggccugauggggcggaccucaaucucaugccuauauaa

SEQ ID NO: 55908 - RNA, 1410 nt, Artificial Sequence
  derived and/or modified CDS sequence (wt) from neuraminidase__InfluenzaA__AGW00934
augaauccaaaucaaaagauaauaacgauuggcucuguuucucucaccauuuccacaauaugcuucuucaugcaaauugccaucuugauaacuacuguaacauugcauuucaagcaauaugaauucgacucccccccaaacaaccaagugaugcugugugaaccaacaauaauagaaagaaacauaacagagauaguguaucugaccaacaccaccauagagaaggaaauaugccccaaaccagcagaauacagaaauuggucaaaaccgcaauguggcauuacaggauuugcaccuuucucuaaggacaauucgauuaggcuuuccgcugguggggacaucugggugacaagagaaccuuaugugucaugcgauccugacaaguguuaucaauuugcccuuggacagggaacaacacuaaacaacgugcauucaaauaacacaguacgugauaggaccccuuaucggacucuauugaugaaugaguuggguguuccuuuucaucuggggaccaagcaagugugcauagcaugguccagcucaaguugucacgauggaaaagcauggcugcauguuuguauaacgggggaugauaaaaaugcaacugcuagcuucauuuacaaugggaggcuuguagauaguguuguuucaugguccaaagaaauucucaggacucaggagucagaaugcguuuguaucaauggaacuuguacaguaguaaugacugauggaagugcuucaggaaaagcugauacuaaaauacuauucauugaggaggggaaaaucguucauacuagcacauugucaggaagugcucagcauguugaagagugcucuugcuauccucgauauccuggugucagaugugucugcagagacaacuggaaaggcuccaaucggcccaucguagauauaaacauaaaggaucauagcauuguuuccaguuauguguguucaggacuuguuggagacacacccagaaaaaacgacagcuccagcaguagccauuguuuggauccuaacaaugaagaagguggucauggagugaaaggcugggccuuugaugauggaaaugacguguggaugggaagaacaaucaacgagacgucacgcuuaggguaugaaaccuucaaagucauugaaggcugguccaacccuaaguccaaauugcagauaaauaggcaagucauaguugacagaggugauagguccgguuauucugguauuuucucuguugaaggcaaaagcugcaucaaucggugcuuuuauguggaguugauuaggggaagaaaagaggaaacugaaguuuuguggaccucaaacaguauuguuguguuuuguggcaccucagguacauauggaacaggcucauggccugauggggcggaccucaaccucaugccuauauaa

SEQ ID NO: 55909 - RNA, 1410 nt, Artificial Sequence
  derived and/or modified CDS sequence (wt) from neuraminidase__InfluenzaA__AGW01247
augaauccaaaucaaaagauaauaacgauuggcucuguuucucucaccauuuccacaauaugcuucuucaugcaaauugccaucuugauaacuacuguaacauugcauuucaagcaauaugaauucaacucccccccaaacaaccaagugaugcugugugaaccaacaauaauagaaagaaacauaacagagauaguguaucugaccaacaccaccauagagaaggaaauaugccccaaaccagcagaauacagaaauuggucaaaaccgcaauguggcauuacaggauuugcaccuuucucuaaggacaauucgauuaggcuuuccgcugguggggacaucugggugacaagagaaccuuaugugucaugcgauccugacaaguguuaucaauuugcccuuggacagggaacaacacuaaacaacgugcauucaaauaacacaguacgugauaggaccccuuaucggacucuauugaugaaugaguuggguguuccuuuucaucuggggaccaagcaagugugcauagcaugguccagcucaaguugucacgauggaaaagcauggcugcauguuugcauaacgggggaugauaaaaaugcaacugcuagcuucauuuacaaugggaggcuuguagauaguguuguuucaugguccaaagaaauucucaggacccaggagucagaaugcguuuguaucaauggaacuuguacaguaguaaugacugauggaagugcuucaggaaaagcugauacuaaaauacuauucauugaggagggaaaaaucguucauacuagcacauugucaggaagugcucagcaugucgaagagugcucuugcuauccucgauauccuggugucagaugugucugcagagacaacuggaaaggcuccaaucggcccaucguagauauaaacauaaaggaucauagcauuguuuccaguuauguguguucaggacuuguuggagacacacccagaaaaaaagacagcuccagcaguagccauuguuuggauccuaacaaugaagaagguggucauggagugaaaggcugggccuuugaugauggaaaugacguguggaugggaagaacaaucaacgagacgucacgcuuaggguaugaaaccuucaaagucauugaaggcugguccaacccuaaguccaaauugcagauaaauaggcaagucauaguugacagaggugauagguccgguuauucugguauuuucucuguugaaggcaaaagcugcaucaaucggugcuuuuauguggaguugauuaggggaaggaaagaggaaacugaagucuuguggaccucaaacaguauuguuguguuuuguggcaccucagguacauauggaacaggcucauggccugauggggcggaccucaaucucaugccuauauaa

SEQ ID NO: 55910 - RNA, 1410 nt, Artificial Sequence; identical to SEQ ID NO: 55880
  derived and/or modified CDS sequence (wt) from neuraminidase__InfluenzaA__AGW01259

SEQ ID NO: 55911 - RNA, 1410 nt, Artificial Sequence
  derived and/or modified CDS sequence (wt) from neuraminidase__InfluenzaA__AGW01298
augaauccaaaucaaaagauaauaacgauuggcucuguuucucucaccauuuccacaauaugcuucuucaugcaaauugccaucuugauaacuacuguaacauugcauuucaagcaauaugaauucaacucccccccaaacaaccaagugaugcugugugaaccaacaauaauagaaagaaacauaacagagauaguguauuugaccaacaccaccauagagaaggaaauaugccccaaaccagcagaauacagaaauuggucaaaaccgcaauguggcauuacaggauuugcaccuuucucuaaggacaauucgauuaggcuuuccgcugguggggacaucugggugacaagagaaccuuaugugucaugcgauccugacaaguguuaucaauuugcccuuggacagggaacaacacuaaacaacaugcauucaaauaacacaguacgugauaggaccccuuaucggacucuauugaugaaugaguuggguguuccuuuucaucuggggaccaagcaagugugcauagcaugguccagcucaaguugucacgauggaaaagcauggcugcauguuuguauaacgggggaugauaaaaaugcaacugcuagcuucauuuacaaugggagacuuguagauaguguuguuucaugguccaaagaaauucucaggacccaggagucagaaugcguuuguaucaauggaacuuguacaguaguaaugacugauggaagugcuucaggaaaagcugauacuaaaauauuauucauugaggaggggaaaaucguucauacuagcacauugucaggaagugcucagcaugucgaagagugcucuugcuauccucgauauccuggugucagaugugucugcagagacaacuggaaaggcuccaaucggcccaucguagauauaaacauaaaggaucauagcauugucuccaguuauguguguucaggacuuguuggagacacacccagaaaaaacgacagcuccagcaguagccauuguuuggauccuaacaaugaagaagguggucauggagugaaaggcugggccuuugaugauggaaaugacguguggaugggaagaacaaucaacgagacgucacgcuuaggguaugaaaccuucaaagucauugaaggcugguccaacccuaaguccaaauugcagauaaauaggcaagucauaguugacagaggugauagguccgguuauucugguauuuucucuguugaaggcaaaagcugcaucaaucggugcuuuuauguggaguugauuaggggaagaaaagaggaaacugaagucuuguggaccucaaacaguauuguuguguuuuguggcaccucagguacauauggaacaggcucauggccugauggggcggaccucaaucucaugccuauauaa

SEQ ID NO: 55912 - RNA, 1410 nt, Artificial Sequence
  derived and/or modified CDS sequence (wt) from neuraminidase__InfluenzaA__AGW01322
augaauccaaaucaaaagauaauaacgauuggcucuguuucucucaccauuuccacaauaugcuucuucaugcaaauugccaucuugauaacuacuguaacauugcauuucaagcaauaugaauucaacucccccccaaacaaccaagugaugcugugugaaccaacaauaauagaaagaaacauaacagagauaguguaucuaaccaacaccaccauagagaaggaaauaugccccaaaccagcagaauacagaaauuggucaaagccgcagugugacauuacaggauuugcaccuuuuucuaaggacaauucgauuaggcuuuccgcugguggggacaucugggugacaagagaaccuuaugugucaugcgauccugacaaguguuaucaauuugcucuuggacagggaacaacacuaaacaacgugcauucaaauaacacaguacgugauaggaccccuuaucggacccuauugaugaaugaguuagguguuccuuuucaucuggggaccaagcaagugugcauagcaugguccagcucaaguugucacgauggaaaagcauggcugcauguuuguauaacgggggaugauaaaaaugcaacugcuaguuucauuuacaaugggaggcuuguagauaguguuguuucaugguccaaagaaauccucaggacccaggagucagaaugcguuuguaucaauggaacuuguacaguaguaaugacugaugggagugcuucaggaaaagcugauacuaaaauacuauucauugaggaggggaaaaucguucauacuagcacauugucaggaagugcucagcaugucgaggagugcucuugcuauccucgauauccuggugucagauguguaugcagagacaacuggaaaggcuccaauaggccuaucguagauauaaacauaaaggaucauagcauuguuuccagguauguguguucaggacuuguuggagacacacccagaaaaaacgacagcuccagcaguagccauuguuuggauccuaacaaugaagaagguggucauggagugaaaggcugggccuucgaugauggaaaugacguguggaugggaagaacgaucaacgagacgucacguuuaggguaugaaaccuucaaagucauugaaggcugguccaacccuaaguccaaauugcagauaaauaggcaggucauaguugacagaggugauagguccgguuauucugguauuuucucuguugaaggcaaaagcugcaucaaucggugcuuuuauguggaguugauaaggggaagaaaagaggaaacugaagucuuguggaccucaaacaguauuguuguguuuuguggcaccucagguacauauggaacaggcucauggccugacggggcggaccucaaucucaugccuauauaa

SEQ ID NO: 55913 - RNA, 1410 nt, Artificial Sequence
  derived and/or modified CDS sequence (wt) from neuraminidase__InfluenzaA__AGW01334
augaauccaaaucaaaagauaauaacgauuggcucuguuucucucaccauuuccacaauaugcuucuucaugcaaauugccaucuugauaacuacuguaacauugcauuucaagcaauaugaauucaacucccccccaaacaaccaagugaugcugugugaaccaacaauaauagaaagaaacauaacagagauaguguaucugaccaacaccaccauagagaaggaaauaugccccaaaccagcagaauacagaaauuggucaaaaccgcaauguggcauuacaggauuugcaccuuucucuaaggacaauucgauuaggcuuuccgcugguggggacaucugggugacaagagaaccuuaugugucaugcgauccugacaaguguuaucaauuugcccuuggacagggaacaacacuaaacaacgugcauucaaauaacacaguacgugauaggaccccuuaucggacucuauugaugaaugaguuggguguuccuuuucaucuggggaccaagcaagugugcauagcaugguccagcucaaguugucacgauggaaaagcauggcugcauguuuguauaacgggggaugauaaaaaugcaacugcuagcuucauuuacaaugggaggcuuguagauaguguuguuucaugguccaaagaaauucucaggacccaggagucagaaugcguuuguaucaauggaacuuguacaguaguaaugacugauggaagugcuucaggaaaagcugauacuaaaauacuauucauugaggaggggaaaaucguucauacuagcacauugucaggaagugcucagcaugucgaagagugcucuugcuauccucgauauccuggugucagaugugucugcagagacaacuggaaaggcuccaaucggcccaucguagauauaaacauaaaggaucauagcauuguuuccaguuauguguguucaggacuuguuggagacacacccagaaaaaacgacagcuccagcaguagccauuguuuggauccuaacaaugaagaagguggucauggagugaaaggcugggccuuugaugauggaaaugacguguggaugggaagaacaaucaacgagacgucacgcuuaggguaugaaaccuucaaagucauugaaggcugguccaacccuaaguccaaauugcagauaaauaggcaagucauaguugacagaggugauagguccgguuauucugguauuuucucuguugaaggcaaaagcugcaucaaucggugcuuuuauguggaguugauuaggggaagaaaagaggaagcugaagucuuguggaccucaaacaguauuguuguguuuuguggcaccucagguacauauggaacaggcucauggccugauggggcggaccucaaucucaugccuauauaa

SEQ ID NO: 55914 - RNA, 1410 nt, Artificial Sequence
  derived and/or modified CDS sequence (wt) from neuraminidase__InfluenzaA__AGW01346
augaauccaaaucaaaagauaauaacgauuggcucuguuucucucaccauuuccacaauaugcuucuucaugcaaauugccaucuugauaacuacuguaacauugcauuucaagcaauaugaauucaacucccccccaaacaaccaagugaugcugugugaaccaacaauaauagaaagaaacauaacagagauaguguaucugaccaacaccaccauagagaaggaaauaugccccaaaccagcagaauacagaaauuggucaaaaccgcaauguggcauuacaggauuugcaccuuucucuaaggacaauucgauuaggcuuuccgcugguggggacaucugggugacaagagaaccuuaugugucaugcgauccugacaaguguuaucaauuugcccuuggacagggaacaacacuaaacaacgugcauucaaauaacacaguacgugauaggaccccuuaucggacucuauugaugaaugaguuggguguuccuuuucaucuggggaccaagcaagugugcauagcaugguccagcucaaguugucacgauggaaaagcauggcugcauguuugcauaacgggggaugauaaaaaugcaacugcuagcuucauuuacaaugggaggcuuguagauaguguuguuucaugguccaaagaaauucucaggacccaggagucagaaugcguuuguaucaauggaacuuguacaguaguaaugacugauggaagugcuucaggaaaagcugauacuaaaauacuauucauugaggagggaaaaaucguucauacuagcacauugucaggaagugcucagcaugucgaagagugcucuugcuauccucgauauccuggugucagaugugucugcagagacaacuggaaaggcuccaaucggcccaucguagauauaaacauaaaggaucauagcauuguuuccaguuauguguguucaggacuuguuggagacacacccagaaaaaacgacagcuccagcaguagccauuguuuggauccuaacaaugaagaagguggucacggagugaaaggcugggccuuugaugauggaaaugacguguggaugggaagaacaaucaacgagacgucacgcuuaggguaugaaaccuucaaagucauugaaggcugguccaacccuaaguccaaauugcagauaaauaggcaagucauaguugacagaggugauagguccgguuauucugguauuuucucuguugaaggcaaaagcugcaucaaucggugcuuuuauguggaguugauuaggggaagaaaagaggaaacugaagucuuguggaccucaaacaguauuguuguguuuuguggcaccucagguacauauggaacaggcucauggccugauggggcggaccucaaucucaugccuauauaa

SEQ ID NO: 55915 - RNA, 1410 nt, Artificial Sequence
  derived and/or modified CDS sequence (wt) from neuraminidase__InfluenzaA__AGW01358
augaauccaaaucaaaagauaauaacgauuggcucuguuucucucaccauuuccacaauaugcuucuucaugcaaauugccaucuugauaacuacuguaacauugcauuucaagcaauaugaauucaacucccccccaaacaaccaagugaugcugugugaaccaacaauaauagaaagaaacauaacagagauaguguaucuaaccaacaccaccauagagaaggaaauaugccccaaaccaacagaauacagaaauuggucaaaaccgcaauguggcauuacaggauuugcaccuuucucuaaggacaauucgauuaggcuauccgcugguggggacaucugggugacaagagaaccuuaugugucaugcgauccugacaaguguuaucaauuugcccuuggacagggaacaacacuaaacaacgugcauucaaauaacacaguacgugauaggaccccuuaucggacucuauugaugaaugaguuggguguuccuuuucaucuggggaccaagcaagugugcauagcaugguccagcucaaguugucacgauggaaaagcauggcugcauguuuguauaacgggggaugauaaaaaugcaacugcuagcuuuauuuacaaugggaggcuuguagauaguguuguuucaugguccaaagaaauucucaggacccaggagucagaaugcguuuguaucaauggaacuuguacaguaguaaugacugauggaagugcuucagggaaagcugauacuaaaauacuauucauugaggaggggaaaaucguucauacuagcacauugucaggaagugcucagcaugucgaagagugcucuugcuauccucgauauccuggugucagaugugucugcagagacaacuggaaaggcuccaaucggcccaucguagauauaaacauaaaggaucauagcauuguuuccaguuauguguguucaggacuuguuggagacacacccagaaaaaacgacagcuccagcaguagccauuguuuggauccuaacaaugaagaagguggucauggagugaaaggcugggccuuugaugauggaaaugacguguggaugggaagaacaaucaacgagacgucacgcuuaggguaugaaaccuucaaagucauugaaggcugguccaacccuaaguccaaauugcagauaaauaggcaggucauaguugacagaggugauagguccgguuauucugguauuuucucuguugaaggcaaaagcugcaucaaucggugcuuuuauguggaguugauuaggggaagaaaagaggaaacugaagucuuguggaccucaaacaguauuguuguguuuuguggcaccucagguacauauggaacaggcucauggccugauggggcggaccucaaucucaugccuauauaa

SEQ ID NO: 55916 - RNA, 1410 nt, Artificial Sequence; identical to SEQ ID NO: 55880
  derived and/or modified CDS sequence (wt) from neuraminidase__InfluenzaA__AGW01370

SEQ ID NO: 55917 - RNA, 1410 nt, Artificial Sequence
  derived and/or modified CDS sequence (wt) from neuraminidase__InfluenzaA__AGW01382
augaauccaaaucaaaagauaauaacgauuggcucuguuucucucaccauuuccacaauaugcuucuucaugcaaauugccaucuugauaacuacuguaacauugcauuucaagcaauaugaauucaacucccccccaaacaaccaagugaugcugugugaaccaacaauaauagaaagaaacauaacagagauaguguaucugaccaacaccaccauagagaaggaaauaugccccaaaccagcagaauacagaaauuggucaaaaccgcaauguggcauuacaggauuugcaccuuucucuaaggacaauucgauuaggcuuuccgcugguggggacaucugggugacaagagaaccuuaugugucaugcgauccugacaaguguuaucaauuugcccuuggacagggaacaacacuaaacaacgugcauucaaauaacacaguacgugauaggaccccuuaucggacucuauugaugaaugaguuggguguuccuuuucaucuggggaccaagcaagugugcauagcaugguccagcucaaguugucacgauggaaaagcauggcugcauguuuguauaacgggggaugauaaaaaugcaacugcuagcuucauuuacaaugggaggcuuguagauaguguuguuucaugguccaaagaaauucucaggacccaggagucagaaugcguuuguaucaauggaacuuguacaguaguaaugacugauggaagugcuucaggaaaagcugauacuaaaauacuauucauugaggaggggaaaaucguccauacuagcacauugucaggaagugcucagcaugucgaagagugcucuugcuauccucgauauccuggugucagaugugucugcagagacaacuggaaaggcuccaaucggcccaucguagauauaaacauaaaggaucauagcauuguuuccaguuauguguguucaggacuuguuggagacacacccagaaaaaacgacagcuccagcaguagccauuguuuggauccuaacaaugaagaagguggucauggagugaaaggcugggccuuugaugauggaaaugacguguggaugggaagaacaaucaacgagacgucacgcuuaggguaugaaaccuucaaagucauugaaggcugguccaacccuaaguccaaauugcagauaaauaggcaagucauaguugacagaggugauagguccgguuauucugguauuuucucuguugaaggcaaaagcugcaucaaucggugcuuuuauguggaguugauuaggggaagaaaagaggaaacugaagucuuguggaccucaaacaguauuguuguguuuuguggcaccucagguacauauggaacaggcucauggccugauggggcggaccucaaucucaugccuauauaa

SEQ ID NO: 55918 - RNA, 1410 nt, Artificial Sequence
  derived and/or modified CDS sequence (wt) from neuraminidase__InfluenzaA__AGW01394
augaauccaaaucaaaagauaauaacgauuggcucuguuucucucaccauuuccacaauaugcuucuucaugcaaauugccaucuugauaacuacuguaacauugcauuucaagcaauaugaauucgacucccccccaaacaaccaagugaugcugugugaaccaacaauaauagaaagaaacauaacagagauaguguaucugaccaacaccaccauagagaaggaaauaugccccaaaccagcagaauacagaaauuggucaaaaccgcaauguggcauuacaggauuugcaccuuucucuaaggacaauucgauuaggcuuuccgcugguggggacaucugggugacaagagaaccuuaugugucaugcgauccugacaaguguuaucaauuugcccuuggacagggaacaacacuaaacaacgugcauucaaauaacacaguacgugauaggaccccuuaucggacucuauugaugaaugaguuggguguuccuuuucaucuggggaccaagcaagugugcauagcaugguccagcucaaguugucacgauggaaaagcauggcugcauguuuguauaacgggggaugauaaaaaugcaacugcuagcuucauuuacaaugggaggcuuguagauaguauuguuucaugguccaaagauauucucaggacccaggagucagaaugcguuuguaucaauggaacuuguacaguaguaaugacugauggaagugcuucaggaaaagcugauacuaaaauacuauucauugaggaggggaaaaucguucauacuagcacauugucaggaagugcucagcauguugaagagugcucuugcuauccucgauauccuggugucagaugugucugcagagacaacuggaaaggcuccaaucggcccaucguagauauaaacauaaaggaucauagcauuguuuccaguuauguguguucaggacuuguuggagacacacccagaaaaaacgacagcuccagcaguagccauuguuuggauccuaacaaugaagaagguggucauggagugaaaggcugggccuuugaugauggaaaugacguguggaugggaagaacaaucaacgagacgucacgcuuaggguaugaaaccuucaaagucauugaaggcugguccaacccuaaguccaaauugcagauaaauaggcaagucauaguugacagaggugauagguccgguuauucugguauuuucucuguugaaggcaaaagcugcaucaaucggugcuuuuauguggaguugauuaggggaagaaaagaggaaacugaagucuuguggaccucaaacaguauuguuguguuuuguggcaccucagguacauauggaacaggcucauggccugauggggcggaccucaaccucaugccuauauaa

SEQ ID NO: 55919 - RNA, 1410 nt, Artificial Sequence
  derived and/or modified CDS sequence (wt) from neuraminidase__InfluenzaA__AGW01406
augaauccaaaucaaaagauaauaacgauuggcucuguuucucucaccauuuccacaauaugcuucuucaugcaaauugccaucuugauaacuacuguaacauugcauuucaagcaauaugaauucaacucccccccaaacaaccaagugaugcugugugaaccaacaauaauagaaagaaacauaacagagauaguguaucugaccaacaccaccauagagaaggaaauaugucccaaaccagcagaauacagaaauuggucaaagccgcaaugugacauuacaggauuugcaccuuuuucuaaggacaauucgauuaggcuuuccgcugguggggacaucugggugacaagagaaccuuaugugucaugugauccugacaaguguuaucaauuugcccuuggacagggaacaacacuaaacaacaugcauucaaauaacacaguacgugauaggaccccuuaucggacccuauugaugaaugaguuggguguuccuuuucaucuggggaccaagcaagugugcauagcaugguccagcucaagcugucacgauggaaaagcauggcugcauguuuguauaacgggggaugauaaaaaugcaacugcuagcuucauuuacaauggaaggcuuguagauaguguuguuucaugguccaaagaaauccucaggacccaggagucagaaugcguuugcaucaauggaacuuguacaguaguaauaacugaugggagugcuucgggaaaagcugauacuaaaauacuauucauugaggaggggaaaaucguucauacuagcacauugucaggaagugcucagcaugucgaggagugcucuugcuauccucgauacccuggugucagaugugucugcagagacaacuggaaaggcuccaauaggcccaucguagauauaaacauaaaggaucauagcauuguuuccaguuauguguguucagggcuuguuggagacacacccagaaaaaacgacagcuccagcaguagccauuguuuggauccuaacaaugaagaagguggucauggagugaaaggcugggccuuugaugauggaaaugacguguggaugggaagaacgaucaacgagacgucacguuuaggguaugaaaccuucaaagucauugaaggcugguccaacccuaaguccaaauugcagauaaauaggcaagucauaguugacagaggcgauagguccgguuauucugguauuuucucuguugaaggcaaaagcugcaucaaucggugcuuuuauguggaguugaucaggggaagaaaagaggaaacugaagucuuguggaccucaaacaguauuguuguguuuuguggcaccucaggcacauauggaacaggcucauggccugauggggcggaccucaaucucaugccuauauaa

SEQ ID NO: 55920 - RNA, 1410 nt, Artificial Sequence
  derived and/or modified CDS sequence (wt) from neuraminidase__InfluenzaA__AGW01418
augaauccaaaucaaaagauaauaacgauuggcucuguuucucucaccauuuccacaauaugcuucuucaugcaaauugccaucuugauaacuacuguaacauugcauuucaagcaauaugaauucaacucccccccaaacaaccaagugaugcugugugaaccaacaauaauagaaagaaacauaacagagauaguguauuugaccaacaccaccauagagaaggaaauaugccccaaaccagcagaauacagaaauuggucaaaaccgcaauguggcauuacaggauuugcaccuuucucuaaggacaauucgauuaggcuuuccgcugguggggacaucugggugacaagagaaccuuaugugucaugcgauccugacaaguguuaucaauuugcccuuggacagggaacaacacuaaacaacaugcauucaaauaacacaguacgugauaggaccccuuaucggacucuauugaugaaugaguuggguguuccuuuucaucuggggaccaagcaagugugcauagcaugguccagcucaaguugucacgauggaaaagcauggcugcauguuuguauaacgggggaugauaaaaaugcaacugcuagcuucauuuacaaugggaggcuuguagauaguguuguuucaugguccaaagaaauucucaggacccaggagucagaaugcguuuguaucaauggaacuuguacaguaguaaugacugauggaagugcuucaggaaaagcugauacuaaaauauuauucauugaggaggggaaaaucguucauacuagcacauugucaggaagugcucagcaugucgaagagugcucuugcuauccucgauauccuggugucagaugugucugcagagacaacuggaaaggcuccaaucggcccaucguagauauaaacauaaaggaucauagcauugucuccaguuauguguguucaggacuuguuggagacacacccagaaaaaacgacagcuccagcaguagccauuguuuggauccuaacaaugaagaagguggucauggagugaaaggcugggccuuugaugauggaaaugacguguggaugggaagaacaaucaacgagacgucacgcuuaggguaugaaaccuucaaagucauugaaggcugguccaaccccaaguccaaauugcagauaaauaggcaagucauaguugacagaggugauagguccgguuauucugguauuuucucuguugaaggcaaaagcugcaucaaucggugcuuuuauguugaguugauuaggggaagaaaagaggaaacuggagucuuguggaccucaaacaguauuguuguguuuuguggcaccucagguacauauggaacaggcucauggccugauggggcggaccucaaucucaugccuauauaa

SEQ ID NO: 55921 - RNA, 1410 nt, Artificial Sequence
  derived and/or modified CDS sequence (wt) from neuraminidase__InfluenzaA__AGW01430
augaauccaaaucaaaagauaauaacgauuggcucuguuucucucaccauuuccacaauaugcuucuucaugcaaauugccaucuugauaacuacuguaacauugcauuucaagcaauaugaauucaacucccccccaaacaaccaagugaugcuaugugaaccaacaauaauagaaagaaacauaacagagauaguguauuugaccaacaccaccauagagaaggaaauaugccccaaaccagcagaauacagaaauuggucaaaaccgcaauguggcauuacaggauuugcaccuuucucuaaggacaauucgauuaggcuuuccgcugguggggacaucugggugacaagagaaccuuaugugucaugcgauccugacaaguguuaucaauuugcccuuggacagggaacaacacuaaacaacgugcauucaaauaacacaguacgugauaggaccccuuaucggacucuauugaugaaugaguuggguguuccuuuucaucuggggaccaagcaagugugcauagcaugguccagcucaaguugucacgauggaaaagcauggcugcauguuuguauaacgggggaugauaaaaaugcaacugcuagcuucauuuacaaugggaggcuuguagauaguguuguuucaugguccaaagaaauucucaggacccaggagucagaaugcguuuguaucaauggaacuuguacaguaguaaugacugauggaagugcuucaggaaaagcugauacuaaaauacuauucauugaggaggggaaaaucguucauacuagcacauugucaggaagugcucagcaugucgaagagugcucuugcuauccucgauauccuggugucagaugugucugcagagacaacuggaaaggcuccaaucggcccaucguagauauaaacauaaaggaucauagcauuguuuccaguuauguguguucaggacuuguuggagacacacccagaaaaaacgacagcuccagcaguagccauuguuuggauccuaacaaugaagaagguggucauggagugaaaggcugggccuuugaugauggaaaugacguauggaugggaagaacaaucaacgagacgucacgcuuaggguaugaaaccuucaaagucauugaaggcugguccaacccuaaguccaaauugcagauaaauaggcaagucauaguugacagaggugauagguccgguuauucugguauuuucucuguugaaggcaaaagcugcaucaaucggugcuuuuauguggaguugauuaggggaagaaaagaggaaacugaagucuuguggaccucaaacaguauuguuguguuuuguggcaccucagguacauauggaacaggcucauggccugauggggcggaccucaaucucaugccuauauaa

SEQ ID NO: 55922 - RNA, 1410 nt, Artificial Sequence
  derived and/or modified CDS sequence (wt) from neuraminidase__InfluenzaA__AGW01442
augaauccaaaucaaaagauaauaacgauuggcucuguuucucucaccauuuccacaauaugcuucuucaugcaaauugccaucuugauaacuacuguaacauugcauuucaagcaauaugaauucaacucccccccaaacaaccaagugaugcugugugaaccaacaauaauagaaagaaacauaacagagauaguguauuugaccaacaccaccauagagaaggaaauaugccccaaaccagcagaauacagaaauuggucaaaaccgcaauguggcauuacaggauuugcaccuuucucuaaggacaauucgauuaggcuuuccgcugguggggacaucugggugacaagagaaccuuaugugucaugcgauccugacaaguguuaucaauuugcccuuggacagggaacaacacuaaacaacgugcauucaaauaacacaguacgugauaggaccccuuaucggacucuauugaugaaugaguuggguguuccuuuucaucuggggaccaagcaagugugcauagcaugguccagcucaaguugucacgauggaaaagcauggcugcauguuuguauaacgggggaugauaaaaaugcaacugcuagcuucauuuacaaugggaggcuuguagauaguguuguuucaugguccaaagaaauucucaggacccaggagucagaaugcguuuguaucaauggaacuuguacaguaguaaugacugauggaagugcuucaggaaaagcugauacuaaaauacuauucauugaggaggggaaaaucguucauacuagcacauugucaggaagugcucagcaugucgaagagugcucuugcuauccucgauauccuggugucagaugugucugcagagacaacuggaaaggcuccaaucggcccaucguagauauaaacauaaaggaucauagcauuguuuccaguuauguguguucaggacuuguuggagacacacccagaaaaaacgacagcuccagcaguagccauuguuuggauccuaacaaugaagaagguggucauggagugaaaggcugggccuuugaugauggaaaugacguauggaugggaagaacaaucaacgagacgucacgcuuaggguaugaaaccuucaaagucauugaaggcugguccaacccuaaguccaaauugcagauaaauaggcaagucauaguugacagaggugauagguccgguuauucugguauuuuuucuguugaaggcaaaagcugcaucaaucggugcuuuuauguggaguugauuaggggaagaaaagaggaaacugaagucuuguggaccucaaacaguauuguuguguuuuguggcaccucagguacauauggaacaggcucauggccugauggggcggaccucaaucucaugccuauauaa

SEQ ID NO: 55923 - RNA, 1410 nt, Artificial Sequence; identical to SEQ ID NO: 55880
  derived and/or modified CDS sequence (wt) from neuraminidase__InfluenzaA__AGW01454

SEQ ID NO: 55924 - RNA, 1410 nt, Artificial Sequence; identical to SEQ ID NO: 55883
  derived and/or modified CDS sequence (wt) from neuraminidase__InfluenzaA__AGW01466

SEQ ID NO: 55925 - RNA, 1410 nt, Artificial Sequence; identical to SEQ ID NO: 55865
  derived and/or modified CDS sequence (wt) from neuraminidase__InfluenzaA__AGW01478

SEQ ID NO: 55926 - RNA, 1410 nt, Artificial Sequence
  derived and/or modified CDS sequence (wt) from neuraminidase__InfluenzaA__AGW01490
augaauccaaaucaaaagauaauaacgauuagcucuguuucucucaccauuuccacaauaugcuucuucaugcaaauugccaucuugauaacuacuguaacauugcauuucaagcaauaugaauucaacucccccccaaacaaccaagugaugcugugugaaccaacaauaauagaaagaaacauaacagagauaguguaucugaccaacaccaccauagagaaggaaauaugccccaaaccagcagaauacagaaauuggucaaagccgcaauguggcauuacaggauuugcaccuuucucuaaggacaauucgauuaggcuuuccgcugguggggacaucugggugacaagagaaccuuaugugucaugcgauccugacaaguguuaucaauuugcccuuggacagggaacaacacuaaacaacgugcauucaaauaacacaguacgugauaggaccccuuaucggacucuauugaugaaugaguuggguguuccuuuucaucuggggaccaagcaagugugcauagcaugguccagcucaaguugucacgauggaaaagcauggcugcauguuuguauaacgggggaugauaaaaaugcaacugcuagcuucauuuacaaugggaggcuuguagauaguguuguuucaugguccaaagaaauucucaggacccaggagucagaaugcguuuguaucaauggaacuugcacaguaguaaugacugauggaagugcuucaggaaaagcugauacuaaaauacuauucauugaggaggggaaaaucguucauacuagcacauugucaggaagugcucagcaugucgaagagugcucuugcuauccucgauauccuggugucagaugugucugcagagacaacuggaaaggcuccaaucggcccaucguagauauaaacauaaaggaucauagcauuguuuccaguuauguguguucaggacuuguuggagacacacccagaaaaaacgacagcuccagcaguagccauuguuuggauccuaacaaugaagaagguggucauggagugaaaggcugggccuuugaugauggaaaugacguguggaugggaagaacaaucaacgagacgucacgcuuaggguaugaaaccuucaaagucauugaaggcugguccaacucuaaguccaaauugcagauaaauaggcaagucauaguugacagaggugauagguccgguuauucugguauuuucucuguugaaggcaaaagcugcaucaaucggugcuuuuauguggaguugauuaggggaagaaaagaggaaacugaagucuuguggaccucaaacaguauuguuguguuuuguggcaccucagguacauauggaacaggcucauggccugauggggcggaccucaaucucaugccuauauaa

SEQ ID NO: 55927 - RNA, 1410 nt, Artificial Sequence
  derived and/or modified CDS sequence (wt) from neuraminidase__InfluenzaA__AGW01538
augaauccaaaucaaaagauaauaacgauuggcucuguuucucucaccauuuccacaauaugcuucuucaugcaaauugccaucuugauaacuacuguaacauugcauuucaagcaauaugaauucaacucccccccaaacaaccaagugaugcugugugaaccaacaauaauagaaagaaacauaacagagauaguguaucugaccaacaccaccauagagaaggaaauaugccccaaaccagcagaauacagaaauuggucaaaaccgcaauguggcauuacaggauuugcaccuuucucuaaggacaauucgauuaggcuuuccgcugguggggacaucugggugacaagagaaccuuaugugucaugcgauccugacaaguguuaucaauuugcccuuggacagggaacaacacuaaacaacgugcauucaaauaacacaguacgugauaggaccccuuaucggacucuauugaugaaugaguuggguguuccuuuucaucuggggaccaagcaagugugcauagcaugguccagcucaaguugucacgauggaaaagcauggcugcauguuugcauaacgggggaugauaaaaaugcaacugcuagcuucauuuacaaugggaggcuuguagauaguguuguuucaugguccaaagaaauucucaggacccaggagucagaaugcguuuguaucaauggaacuuguacaguaguaaugacugauggaagugcuucaggaaaagcugauacuaaaauacuauucauugaggagggaaaaaucguucauacuagcacauugucaggaagugcucagcaugucgaagagugcucuugcuauccucgauauccuggugucagaugugucugcagagacaacuggaaaggcuccaaucggcccaucguagauauaaacauaaaggaucauagcauuguuuccaguuauguguguucaggacuuguuggagacacacccagaaaaaacgacagcuccagcaguagccauuguuuggacccuaacaaugaagaagguggucauggagugaaaggcugggccuuugaugauggaaaugacguguggaugggaagaacaaucaacgagacgucacgcuuaggguaugaaaccuucaaagucauugaaggcugguccaacccuaaguccaaauugcagauaaauaggcaagucauaguugacagaggugauagguccgguuauucugguauuuucucuguugaaggcaaaagcugcaucaaucggugcuuuuauguggaguugauuaggggaaggaaagaggaaacugaagucuuguggaccucaaacaguauuguuguguuuuguggcaccucagguacauauggaacaggcucauggccugauggggcggaccucaaucucaugccuauauaa

SEQ ID NO: 55928 - RNA, 1410 nt, Artificial Sequence; identical to SEQ ID NO: 55883
  derived and/or modified CDS sequence (wt) from neuraminidase__InfluenzaA__AGW01562

SEQ ID NO: 55929 - RNA, 1410 nt, Artificial Sequence; identical to SEQ ID NO: 55865
  derived and/or modified CDS sequence (wt) from neuraminidase__InfluenzaA__AGW01574

SEQ ID NO: 55930 - RNA, 1410 nt, Artificial Sequence; identical to SEQ ID NO: 55865
  derived and/or modified CDS sequence (wt) from neuraminidase__InfluenzaA__AGW01586

SEQ ID NO: 55931 - RNA, 1410 nt, Artificial Sequence; identical to SEQ ID NO: 55865
  derived and/or modified CDS sequence (wt) from neuraminidase__InfluenzaA__AGW01598

SEQ ID NO: 55932 - RNA, 1410 nt, Artificial Sequence; identical to SEQ ID NO: 55883
  derived and/or modified CDS sequence (wt) from neuraminidase__InfluenzaA__AGW01610

SEQ ID NO: 55933 - RNA, 1410 nt, Artificial Sequence
  derived and/or modified CDS sequence (wt) from neuraminidase__InfluenzaA__AGW01622
augaauccaaaucaaaagauaauaacgauuggcucuguuucucucaccauuuccacaauaugcuucuucaugcaaauugccaucuugauaacuacuguaacauugcauuucaagcaauaugaauucaacucccccccaaacaaccaagugaugcugugugaaccaacaauaauagaaagaaacauaacagagauaguguauuugaccaacaccaccauagagaaggaaauaugccccaaaccagcagaauacagaaauuggucaaaaccacaauguggcauuacaggauuugcaccuuucucuaaggacaauucgauuaggcuuuccgcugguggggacaucugggugacaagagaaccuuaugugucaugcgauccugacaaguguuaucaauuugcccuuggacagggaacaacacuaaacaacgugcauucaaauaacacaguacgugauaggaccccuuaucggacucuauugaugaaugaguuggguguuccuuuucaucuggggaccaagcaagugugcauagcaugguccagcucaaguugucacgauggaaaagcauggcugcauguuuguauaacgggggaugauaaaaaugcaacugcuagcuucauuuacaaugggaggcuuguagauaguguuguuucaugguccaaagaaauucucaggacccaggagucagaaugcguuuguaucaauggaacuuguacaguaguaaugacugauggaagugcuucaggaaaagcugauacuaaaauacuauucauugaggaggggaaaaucguucauacuagcacauugucaggaagugcucagcaugucgaagagugcucuugcuauccucgauauccuggugucagaugugucugcagagacaacuggaaaggcuccaaucggcccaucguagauauaaacauaaaggaucauagcauuguuuccaguuauguguguucaggacuuguuggagacacacccagaaaaaacgacagcuccagcaguagccauuguuuggauccuaacaaugaagaagguggucauggagugaaaggcugggccuuugaugauggaaaugacguauggaugggaagaacaaucaacgagacgucacgcuuaggguaugaaaccuucaaagucauugaaggcugguccaacccuaaguccaaauugcagauaaauaggcaagucauaguugacagaggugauagguccgguuauucugguauuuucucuguugaaggcaaaagcugcaucaaucggugcuuuuauguggaguugauuaggggaagaaaagaggaaacugaagucuuguggaccucaaacaguauuguuguguuuuguggcaccucagguacauauggaacaggcucauggccugauggggcggaccucaaucucaugccuauauaa

SEQ ID NO: 55934 - RNA, 1410 nt, Artificial Sequence; identical to SEQ ID NO: 55914
  derived and/or modified CDS sequence (wt) from neuraminidase__InfluenzaA__AGW01634

SEQ ID NO: 55935 - RNA, 1410 nt, Artificial Sequence
  derived and/or modified CDS sequence (wt) from neuraminidase__InfluenzaA__AGW01646
augaauccaaaucaaaagauaauaacgauuggcucuguuucucucaccauuuccacaauaugcuucuucaugcaaauugccaucuugauaacuacuguaacauugcauuucaagcaauaugaauucaacucccccccaaacaaccaagugaugcugugugaaccaacaauaauagaaagaaacauaacagagauaguguaucugaccaacaccaccauagagaaggaaauaugccccaaaccagcagaauacagaaauuggucaaaaccgcaauguggcauuacaggauuugcaccuuucucuaaggacaauucgauuaggcuuuccgcugguggggacaucugggugacaagagaaccuuaugugucaugcgaucccgacaaguguuaucaauuugcccuuggacagggaacaacacuaaacaacgugcauucaaauaacacaguacgugauaggaccccuuaucggacucuauugaugaaugaguuggguguuccuuuucaucuggggaccaagcaagugugcauagcaugguccagcucaaguugucacgauggaaaagcauggcugcauguuuguauaacgggggaugauaaaaaugcaacugcuagcuucauuuacaaugggaggcuuguagauaguguuguuucaugguccaaagaaauucucaggacccaggagucagaaugcguuuguaucgauggaacuuguacaguaguaaugacugauggaagugcuucaggaaaagcugauacuaaaauacuauucauugaggaggggaaaaucguucauacuagcacauugucaggaagugcucagcaugucgaagagugcucuugcuauccucgauauccuggugucagaugugucugcagagacaacuggaaaggcuccaaucggcccaucguagauauaaacauaaaggaucauagcauuguuuccaguuauguguguucaggacuuguuggagacacacccagaaaaaacgacagcuccagcaguagccauuguuuggauccuaacaaugaagaagguggucauggagugaaaggcugggccuuugaugauggaaaugacguguggaugggaagaacaaucaacgagacgucacgcuuaggguaugaaaccuucaaagucauugaaggcugguccaacccuaaguccaaauugcagauaaauaggcaagucauaguugacagaggugauagguccgguuauucugguauuuucucuguugaaggcaaaagcugcaucaaucggugcuuuuauguggaguugauuaggggaagaaaagaggaaacugaagucuuguggaccucaaacaguauuguuguguuuuguggcaccucagguacauauggaacaggcucauggccugauggggcggaccucaaucucaugccuauauaa

SEQ ID NO: 55936 - RNA, 1410 nt, Artificial Sequence; identical to SEQ ID NO: 55877
  derived and/or modified CDS sequence (wt) from neuraminidase__InfluenzaA__AGW01670

SEQ ID NO: 55937 - RNA, 1410 nt, Artificial Sequence; identical to SEQ ID NO: 55865
  derived and/or modified CDS sequence (wt) from neuraminidase__InfluenzaA__AGW01682

SEQ ID NO: 55938 - RNA, 1410 nt, Artificial Sequence
  derived and/or modified CDS sequence (wt) from neuraminidase__InfluenzaA__AGW01704
augaauccaaaucaaaagauaauaacgauuggcucuguuucucucaccauuuccacaauaugcuucuucaugcaaauugccaucuugauaacuacuguaacauugcauuucaagcaauaugaauucaacucccccccaaacaaccaagugaugcugugugaaccaacaauaauagaaagaaacauaacagagauaguguauuugaccaacaccaccauagagaaggaaauaugccccaaaccagcagaauacagaaauuggucaaaaccgcaauguggcauuacaggauuugcaccuuucucuaaggacaauucgauuaggcuuuccgcugguggggacaucugggugacaagagaaccuuaugugucaugcgauccugacaaguguuaucaauuugcccuuggacagggaacaacacuaaacaacaugcauucaaauaacacaguacgugauaggaccccuuauaggacucuauugaugaaugaguuggguguuccuuuucaucuggggaccaagcaagugugcauagcaugguccagcucaaguugucacgauggaaaagcauggcugcauguuuguauaacgggggaugauaaaaaugcaacugcuagcuucauuuacaaugggaggcuuguagauaguguuguuucaugguccaaagaaauucucaggacccaggagucagaaugcguuuguaucaauggaacuuguacaguaguaaugacugauggaagugcuucaggaaaagcugauacuaaaauauuauucauugaggaggggaaaaucguucauacuagcacauugucaggaagugcucagcaugucgaagagugcucuugcuauccucgauauccuggugucagaugugucugcagagacaacuggaaaggcuccaaucggcccaucguagauauaaacauaaaggaucauagcauugucuccaguuauguguguucaggacuuguuggagacacacccagaaaaaacgacagcuccagcaguagccauuguuuggauccuaacaaugaagaagguggucauggagugaaaggcugggccuuugaugauggaaaugacguguggaugggaagaacaaucaaugagacgucacgcuuaggguaugaaaccuucaaagucauugaaggcugguccaacccuaaguccaaauugcagauaaauaggcaagucauaguugacagaggugauagguccgguuauucugguauuuucucuguugaaggcaaaagcugcaucaaucggugcuuuuauguggaguugauuaggggaagaaaagaggaaacugaagucuuguggaccucaaacaguauuguuguguuuuguggcaccucagguacauauggaacaggcucauggccugauggggcggaccucaaucucaugccuauauaa

SEQ ID NO: 55939 - RNA, 1410 nt, Artificial Sequence
  derived and/or modified CDS sequence (wt) from neuraminidase__InfluenzaA__AGW01716
augaauccaaaucaaaagauaauaacgauuggcucuguuucucucaccauuuccacaauaugcuucuucaugcaaauugccaucuugauaacuacuguaacauugcauuucaagcaauaugaauucaacucccccccaaacaaccaagugaugcugugugaaccaacaauaauagaaagaaacauaacagagauaguguauuugaccaacaccaccauagagaaggaaauaugccccaaaccagcagaauacagaaauuggucaaaaccgcaauguggcauuacaggauuugcaccuuucucuaaggacaauucgauuaggcuuuccgcugguggggacaucugggugacaagagaaccuuaugugucaugcgauccugacaaguguuaucaauuugcccuuggacagggaacaacacuaaacaacaugcauucaaauaacacaguacgugauaggaccccuuaucggacucuauugaugaaugaguuggguguuccuuuucaucuggggaccaagcaagugugcauagcaugguccagcucaaguugucacgauggaaaagcauggcugcauguuuguauaacgggggaugauaaaaaugcaacugcuagcuucauuuacaaugggaggcuuguagauaguguuguuucaugguccaaagaaauucucaggacccaggagucagaaugcguuuguaucaauggaacuuguacaguaguaaugacugauggaagugcuucaggaaaagcugauacuaaaauauuauucauugaggaggggaaaaucguucauacuagcacauugucaggaagugcucagcaugucgaagagugcucuugcuauccucgauauccuggugucagaugugucugcagagacaacuggaaaggcuccaaucggcccaucguagauauaaacauaaaggaucauagcauugucuccaguuauguguguucaggacuuguuggagacacacccagaaaaaacgacagcuccagcaguagccauuguuuggauccuaacaaugaagaagguggucauggagugaaaggcugggccuuugaugauggaaaugacguguggaugggaagaacaaucaacgagacgucacgcuuaggguaugaaaccuucaaagucauugaaggcugguccaacccuaaguccaaauugcagauaaauaggcaagucauaguugacagaggugauagguccgguuauucugguauuuucucuguugaaggcagaagcugcaucaaucggugcuuuuauguggaguugauuaggggaagaaaagaggaaacugaagucuuguggaccucaaacaguauuguuguguuuuguggcaccucagguacauauggaacaggcucauggccugauggggcggaccucaaucucaugccuauauaa

SEQ ID NO: 55940 - RNA, 1410 nt, Artificial Sequence
  derived and/or modified CDS sequence (wt) from neuraminidase__InfluenzaA__AGW01728
augaauccaaaucaaaagauaauaacgauuggcucuguuucucucaccauuuccacaauaugcuucuucaugcaaauugccaucuugauaacuacuguaacauugcauuucaagcaauaugaauucaacucccccccaaacaaccaagugaugcugugugaaccaacaauaauagaaagaaacauaacagagauaguguauuugaccaacaccaccauagagaaggaaauaugccccaaaccagcagaauacagaaauuggucaaaaccgcaauguggcauuacaggauuugcaccuuucucuaaggacaauucgauuaggcuuuccgcugguggggacaucugggugacaagagaaccuuaugugucaugcgauccugacaaguguuaucaauuugcccuuggacagggaacaacacuaaacaacaugcauucaaauaacacaguacgugauaggaccccuuaucggacucuauugaugaaugaguuggguguuccuuuucaucuggggaccaagcaagugugcauagcaugguccagcucaaguugucacgauggaaaagcauggcugcauguuuguauaacgggggaugauaaaaaugcaacugcuagcuucauuuacaaugggaggcuuguagauaguguuguuucaugguccaaagaaauucucaggacccaggagucagaaugcguuuguaucaauggaacuuguacaguaguaaugacugauggaagugcuucaggaaaagcugauacuaaaauauuauucauugaggaggggaaaaucguucauacuagcacauugucaggaagugcucagcaugucgaagagugcucuugcuauccucgauauccuggugucagaugugucugcagagacaacuggaaaggcuccaaucggcccaucguagauauaaacauaaaggaucauagcauugucuccaguuauguguguucaggacuuguuggagacacacccagaaaaaacgacagcuccagcaguagccauuguuuggauccuaacaaugaagaagguggucauggagugaaaggcugggccuuugaugauggaaaugacguguggaugggaagaacaaucaacgagacgucacgcuuaggguaugaaaccuucaaagucauugaaggcugguccaacccuaaguccaaauugcagauaaauaggcaagucauaguugacagaggugauagguccgguuauucugguauuuucucuguugaaggcaaaagcugcaucaaucggugcuuuuauguggaguugauuaggggaagaaaagaggaaacugaagucuuguggaccucaaacaguguuguuguguuuuguggcaccucagguacauauggaacaggcucauggccugauggggcggaccucaaucucaugccuauauaa

SEQ ID NO: 55941 - RNA, 1410 nt, Artificial Sequence
  derived and/or modified CDS sequence (wt) from neuraminidase__InfluenzaA__AGW01740
augaauccaaaucaaaagauaauaacgauuggcucuguuucucucaccauuuccacaauaugcuucuucaugcaaauugccaucuugauaacuacuguaacauugcauuucaagcaauaugaauucaacucccccccaaacaaccaagugaugcugugugaaccaacaauaauagaaagaaacauaacagagauaguguauuugaccaacaccaccauagagaaggaaauaugccccaaaccagcagaauacagaaauuggucaaaaccgcaauguggcauuacaggauuugcaccuuuuucuaaggacaauucgauuaggcuuuccgcugguggggacaucugggugacaagagaaccuuaugugucaugcgauccugacaaguguuaucaauuugcccuuggacagggaacaacacuaaacaacgugcauucaaauaacacaguacgugauaggaccccuuaucggacucuauugaugaaugaguuggguguuccuuuucaucuggggaccaagcaagugugcauagcaugguccagcucaaguugucacgauggaaaagcauggcugcauguuuguauaacgggggaugauaaaaaugcaacugcuagcuucauuuacaaugggaggcuuguagauaguguuguuucaugguccaaagaaauucucaggacccaggagucagaaugcguuuguaucaauggaacuuguacaguaguaaugacugauggaagugcuucaggaaaagcugauacuaaaauacuauucauugaggaggggaaaaucguucauacuagcacauugucaggaagugcucagcaugucgaagagugcucuugcuauccucgauauccuggugucagaugugucugcagagacaacuggaaaggcuccaaucggcccaucguagauauaaacauaaaggaucauagcauuguuuccaguuauguguguucaggacuuguuggagacacacccagaaaaaacgacagcuccagcaguagccauuguuuggauccuaacaaugaagaagguggucauggagugaaaggcugggccuuugaugauggaaaugacguauggaugggaagaacaaucaacgagacgucacgcuuaggguaugaaaccuucaaagucauugaaggcugguccaacccuaaguccaaauugcagauaaauaggcaagucauaguugacagaggugauagguccgguuauucugguauuuucucuguugaaggcaaaagcugcaucaaucggugcuuuuauguggaguugauuaggggaagaaaagaggaaacugaagucuuguggaccucaaacaguauuguuguguuuuguggcaccucagguacauauggaacaggcucauggccugauggggcggaccucaaucucaugccuauauaa

SEQ ID NO: 55942 - RNA, 1410 nt, Artificial Sequence
  derived and/or modified CDS sequence (wt) from neuraminidase__InfluenzaA__AGW01752
augaauccaaaucaaaagauaauaacgauuggcucuguuucucucaccauuuccacaauaugcuucuucaugcaaauugccaucuugauaacuacuguaacauugcauuucaagcaauaugaauucaacucccccccaaacaaccaagugaugcugugugaaccaacaauaauagaaagaaacauaacagagauaguguaucugaccaacaccaccauagagaaggaaauaugccccaaaccagcagaauacagaaauuggucaaaaccgcaauguggcauuacaggauuugcaccuuucucuaaggacaauucgauuaggcuuuccgcugguggggacaucugggugacaagagaaccuuaugugucaugcgauccugacaaguguuaucaauuugcccuuggacagggaacaacacuaaacaacgugcauucaaauaacacaguacgugauaggaccccuuaucggacucuauugaugaaugaguuggguguuccuuuucaucuggggaccaagcaagugugcauagcaugguccagcucaaguugucacgauggaaaagcauggcugcauguuuguauaacgggggaugauaaaaaugcaacugcuagcuucauuuacaaugggaggcuuguagauaguguuguuucaugguccaaagaaauucucaggacccaggagucagaaugcguuuguaucaauggaacuuguacaguaguaaugacugauggaagugcuucaggaaaagcugauacuaaaauacuauucauugaggaggggaaaaucguucauacuagcacauugucaggaagugcucagcaugucgaagagugcucuugcuauccucgauauccuggugucagaugugucugcagagacaacuggaaaggcuccaaucggcccaucguagauauaaacauaaaggaucauagcauuguuuccaguuauguguguucaggacuuguuggagacacacccagaaaaaacgacagcuccagcaguagccauuguuuggauccuaacaaugaagaagguggucauggagugaaaggcugggccuuugaugauggaaaugacguguggaugggaagaacaaucaacgagacgucacgcuuaggguaugaaaccuucaaagucauuggaggcugguccaacccuaaguccaaauugcagauaaauaggcaagucauaguugacagaggugauagguccgguuauucugguauuuucucuguugaaggcaaaagcugcaucaaucggugcuuuuauguggaguugauuaggggaagaaaagaggaaacugaagucuuguggaccucaaacaguauuguuguguuuuguggcaccucagguacauauggaacaggcucauggccugauggggcggaccucaaucucaugccuauauaa

SEQ ID NO: 55943 - RNA, 1410 nt, Artificial Sequence; identical to SEQ ID NO: 55865
  derived and/or modified CDS sequence (wt) from neuraminidase__InfluenzaA__AGW01764

SEQ ID NO: 55944 - RNA, 1410 nt, Artificial Sequence
  derived and/or modified CDS sequence (wt) from neuraminidase__InfluenzaA__AGW01776
augaauccaaaucaaaagauaauaacgauuggcucuguuucucucaccauuuccacaauaugcuucuucaugcaaauugccaucuugauaacuacuguaacauugcauuucaagcaauaugaauucaacucccccccaaacaaccaagugaugcugugugaaccaacaauaauagaaagaaacauaacagagauaguguauuugaccaacaccaccauagagaaggaaauaugccccaaaccagcagaauacagaaauuggucaaaaccgcaauguggcauuacaggauuugcaccuuucucuaaggacaauucgauuaggcuuuccgcugguggggacaucugggugacaagagaaccuuaugugucaugcgauccugacaaguguuaucaauuugcccuuggacagggaacaacacuaaacaacaugcauucaaauaacacaguacgugauaggaccccuuaucggacucuauugaugaaugaguuggguguuccuuuucaucuggggaccaagcaaguguguauagcaugguccagcucaaguugucacgauggaaaagcauggcugcauguuuguauaacgggggaugauaaaaaugcaacugcuagcuucauuuacaaugggaggcuuguagauaguguuguuucaugguccaaagaaauucucaggacccaggagucagaaugcguuuguaucaauggaacuuguacaguaguaaugacugauggaagugcuucaggaaaagcugauacuaaaauauuauucauugaggaggggaaaaucguucauacuagcacauugucaggaagugcucagcaugucgaagagugcucuugcuauccucgauauccuggugucagaugugucugcagagacaacuggaaaggcuccaaucggcccaucguagauauaaacauaaaggaucauagcauugucuccaguuauguguguucaggacuuguuggagacacacccagaaaaaacgacagcuccagcaguagccauuguuuggauccuaacaaugaagaagguggucauggagugaaaggcugggccuuugaugauggaaaugacguguggaugggaagaacaaucaacgagacgucacgcuuaggguaugaaaccuucaaagucauugaaggcugguccaacccuaaguccaaauugcagauaaauaggcaagucauaguugacagaggugauagguccgguuauucugguauuuucucuguugaaggcaaaagcugcaucaaucggugcuuuuauguggaguugauuaggggaagaaaagaggaaacugaagucuuguggaccucaaacaguauuguuguguuuuguggcaccucagguacauauggaacaggcucauggccugauggggcggaccucaaucucaugccuauauaa

SEQ ID NO: 55945 - RNA, 1410 nt, Artificial Sequence; identical to SEQ ID NO: 55883
  derived and/or modified CDS sequence (wt) from neuraminidase__InfluenzaA__AGW01788

SEQ ID NO: 55946 - RNA, 1410 nt, Artificial Sequence; identical to SEQ ID NO: 55895
  derived and/or modified CDS sequence (wt) from neuraminidase__InfluenzaA__AGW01800

SEQ ID NO: 55947 - RNA, 1410 nt, Artificial Sequence
  derived and/or modified CDS sequence (wt) from neuraminidase__InfluenzaA__AGW01812
augaauccaaaucaaaagauaauaacgauuggcucuguuucucucaccauuuccacaauaugcuucuucaugcaaauugccaucuugauaacuacuguaacauugcauuucaagcaauaugaauucgacucccccccaaacaaccaagugaugcugugugaaccaacaauaauagaaagaaacauaacagagauaguguaucugaccaacaccaccauagagaaggaaauaugccccaaaccagcagaauacagaaauuggucaaaaccgcaauguggcauuacaggauuugcaccuuucucuaaggacaauucgauuaggcuuuccgcugguggggacauuugggugacaagagaaccuuaugugucaugcgauccugacaaguguuaucaauuugcccuuggacagggaacaacacuaaacaacgugcauucaaauaacacaguacgugauaggaccccuuaucggacucuauugaugaaugaguuggguguuccuuuucaucuggggaccaagcaagugugcauagcaugguccagcucaaguugucacgauggaaaagcauggcugcauguuuguauaacgggggaugauaaaaaugcaacugcuagcuucauuuacaaugggaggcuuguagauaguguuguuucaugguccaaagaaauucucaggacccaggagucagaaugcguuuguaucaauggaacuuguacaguaguaaugacugauggaagugcuucaggaaaagcugauacuaaaauacuauucauugaggaggggaaaaucguucauacuagcacauugucaggaagugcucagcauguugaagagugcucuugcuauccucgauauccuggugucagaugugucugcagagacaacuggaaaggcuccaaucggcccaucguagauauaaacauaaaggaucauagcauuguuuccaguuauguguguucaggacuuguuggagacacacccagaaaaaacgacagcuccagcaguagccauuguuuggauccuaacaaugaagaagguggucauggagugaaaggcugggccuuugaugauggaaaugacguguggaugggaagaacaaucaacgagacgucacgcuuaggguaugaaaccuucaaagucauugaaggcugguccaacccuaaguccaaauugcagauaaauaggcaagucauaguugacagaggugauagguccgguuauucugguauuuucucuguugaaggcaaaagcugcaucaaucggugcuuuuauguggaguugauuaggggaagaaaagaggaaacugaagucuuguggaccucaaacaguauuguuguguuuuguggcaccucagguacauauggaacaggcucauggccugauggggcggaccucaaccucaugccuauauaa

SEQ ID NO: 55948 - RNA, 1410 nt, Artificial Sequence; identical to SEQ ID NO: 55883
  derived and/or modified CDS sequence (wt) from neuraminidase__InfluenzaA__AGW01824

SEQ ID NO: 55949 - RNA, 1410 nt, Artificial Sequence
  derived and/or modified CDS sequence (wt) from neuraminidase__InfluenzaA__AGW01848
augaauccaaaucaaaagauaauaacgauuggcucuguuucucucaccauuuccacaauaugcuucuucaugcaaauugccaucuugauaacuacuguaacauugcauuucaagcaauaugaauucaacucccccccaaacaaccaagugaugcugugugaaccaacaauaauagaaagaaacauaacagagauaguguauuugaccaacaccaccauagagaaggaaauaugccccaaaccagcagaauacagaaauuggucaaaaccgcaauguggcauuacaggauuugcaccuuucucuaaggacaauucgauuaggcuuuccgcugguggggacaucugggugacaagagaaccuuaugugucaugcgguccugacaaguguuaucaauuugcccuuggacagggaacaacacuaaacaacaugcauucaaauaacacaguucgugauaggaccccuuaucggacucuauugaugaaugaguuggguguuccuuuucaucuggggaccaagcaagugugcauagcaugguccagcucaaguugucacgauggaaaagcauggcugcauguuuguauaacgggggaugauaaaaaugcaacugcuagcuucauuuacaaugggaggcuuguagauaguguuguuucaugguccaaagaaauucucaggacccaggagucagaaugcguuuguaucaauggaacuuguacaguaguaaugacugauggaagugcuucaggaaaagcugauacuaaaauauuauucauugaggaggggaaaaucguucauacuagcacauugucaggaagugcucagcaugucgaggagugcucuugcuauccucgauauccuggugucagaugugucugcagagacaacuggaaaggcuccaaucggcccaucguagauauaaacauaaaggaucauagcauugucuccaguuauguguguucaggacuuguuggagacacacccagaaaaaacgacagcuccagcaguagccauuguuuggauccuaacaaugaagaagguggucauggagugaaaggcugggccuuugaugauggaaaugacguguggaugggaagaacaaucaacgagacgucacgcuuaggguaugaaaccuucaaagucauugaaggcugguccaacccuaaguccaaauugcagauaaauaggcaagucauaguugacagaggugauagguccgguuauucugguauuuucucuguugaaggcaaaagcugcaucaaucggugcuuuuauguggaguugauuaggggaagaaaagaggaaacugaagucuuguggaccucaaacaguauuguuguguuuuguggcaccucagguacauauggaacaggcucauggccugauggggcggaccucaaucucaugccuauauaa

SEQ ID NO: 55950 - RNA, 1410 nt, Artificial Sequence
  derived and/or modified CDS sequence (wt) from neuraminidase__InfluenzaA__AGW01860
augaauccaaaucaaaagauaauaacgauuggcucuguuucucucaccauuuccacaauaugcuucuucaugcaaauugccaucuugauaacuacuguaacauugcauuucaagcaauaugaauucaacucccucccaaacaaccaagugaugcugugugaaccaacaauaauagaaagaaacauaacagagauaguguaucugaccaacaccaccauagagaaggaaauaugccccaaaccagcagaauacagaaauuggucaaaaccgcaauguggcauuacaggauuugcaccuuucucuaaggacaauucgauuaggcuuuccgcugguggggacaucugggugacaagagaaccuuaugugucaugcgauccugacaaguguuaucaauuugcccuuggacagggaacaacacuaaacaacguacauucaaauaacacaguacgugauaggaccccuuaucggacucuauugaugaaugaguuggguguuccuuuucaucuggggaccaagcaaguguguauagcaugguccagcucaaguugucacgauggaaaagcauggcugcauguuuguauaacgggggaugauaaaaaugcaacugcuagcuucauuuacaaugggaggcuuguagauaguguuguuucaugguccaaagaaauucucaggacccaggagucagaaugcguuuguaucaauggaacuuguacaguaguaaugacugauggaagugcuucaggaaaagcugauacuaaaauacuauucauugaggaggggaaaaucguucauacuagcacauugucaggaagugcucagcaugucgaagagugcucuugcuauccucgauauccuggugucagaugugucugcagagacaacuggaaaggcuccaaucggcccaucguagauauaaacauaaaggaucauagcauuguuuccaguuauguguguucaggacuuguuggagacacacccagaaaaaacgacagcuccagcaguagccauuguuuugauccuaacaaugaagaagguggucauggagugaaaggcugggccuuugaugauggaaaugacguguggaugggaagaacaaucaacgagacgucacgcuuaggguaugaaaccuucaaagucauuggaggcugguccaacccuaaguccaaauugcagauaaauaggcaagucauaguugacagaggugauagguccgguuauucugguauuuucucuguugaaggcaaaagcugcaucaaucggugcuuuuauguggaguugauuaggggaagaaaagaggaaacugaagucuuguggaccucaaacaguauuauuguguuuuguggcaccucagguacauauggaacaggcucauggccugauggggcggaccucaaucucaugccuauauaa

SEQ ID NO: 55951 - RNA, 1410 nt, Artificial Sequence
  derived and/or modified CDS sequence (wt) from neuraminidase__InfluenzaA__AGW01884
augaauccaaaucaaaagauaauaacgauuggcucuguuucucucaccauuuccacaauaugcuucuucaugcaaauugccaucuugauaacuacuguaacauugcauuucaagcaauaugaauucaacucccccccaaacaaccaagugaugcugugugaaccaacaauaauagaaagaaacauaacaaagauaguguaucugaccaacaccaccauagagaaggaaauaugccccaaaccagcagaauacagaaauuggucaaaaccgcaauguggcauuacaggauuugcaccuuucucuaaggacaauucgauuaggcuuuccgcugguggggacaucugggugacaagagaaccuuaugugucaugcgauccugacaaguguuaucaauuugcccuuggacagggaacaacacuaaacaacgugcauucaaauaacacaguacgugauaggaccccuuaucggacucuauugaugaaugaguuggguguuccuuuucaucuggggaccaagcaagugugcauagcaugguccagcucaaguugucacgauggaaaagcauggcugcauguuuguauaacgggggaugauaaaaaugcaacugcuagcuucauuuacaaugggaggcuuguagauaguguuguuucaugguccaaagaaauucucaggacccaggagucagaaugcguuuguaucaauggaacuuguacaguaguaaugacugauggaagugcuucaggaaaagcugauacuaaaauacuauucauugaggaggggaaaaucguccauacuagcacauugucaggaagugcucagcaugucgaagagugcucuugcuauccucgauauccuggugucagaugugucugcagagacaacuggaaaggcuccaaucggcccaucguagauauaaacauaaaggaucauagcauuguuuccaguuauguguguucaggacuuguuggagacacacccagaaaaaacgacagcuccagcaguagccauuguuuggauccuaacaaugaagaagguggucauggagugaaaggcugggccuuugaugauggaaaugacguguggaugggaagaacaaucaacgagacgucacgcuuaggguaugaaaccuucaaagucauugaaggcugguccaacccuaaguccaaauugcagauaaauaggcaagucauaguugacagaggugauagguccgguuauucugguauuuucucuguugaaggcaaaagcugcaucaaucggugcuuuuauguggaguugauuaggggaagaaaagaggaaacugaagucuuguggaccucaaacaguauuguuguguuuuguggcacaucagguacauauggaacaggcucauggccugauggggcggaccucaaucucaugccuauauaa

SEQ ID NO: 55952 - RNA, 1410 nt, Artificial Sequence
  derived and/or modified CDS sequence (wt) from neuraminidase__InfluenzaA__AGW01896
augaauccaaaucaaaagauaauaacgauuggcucuguuucucucaccauuuccacaauaugcuucuucaugcaaauugccaucuugauaacuacuguaacauugcauuucaagcaauaugaauucaacucccccccaaacaaccaagugaugcugugugaaccaacaauaauagaaagaaacauaacagagauaguguaucugaccaacaccaccauagagaaggaaauaugccccaaaccagcagaauacagaaauuggucaaaaccgcaauguggcauuacaggauuugcaccuuucucuaaggacaauucgauuaggcuuuccgcugguggggacaucugggugacaagagaaccuuaugugucaugcgaucccgacaaguguuaucaauuugcccuuggacagggaacaacacuaaacaacgugcauucaaauaacacaguacgugauaggaccccuuaucggacucuauugaugaaugaguuggguguuccuuuucaucuggggaccaagcaagugugcauagcaugguccagcucaaguugucacgauggaaaagcauggcugcauguuuguauaacgggggaugauaaaaaugcaacugcuagcuucauuuacaaugggaggcuuguagauaguguuguuucaugguccaaagaaauucucaggacccaggagucagaaugcguuuguaucaauggaacuuguacaguaguaaugacugauggaagugcuucagggaaagcugauacuaaaauacuauucauugaggaggggaaaaucguucauacuagcacauugucaggaagugcucagcaugucgaagagugcucuugcuauccucgauauccuggugucagaugugucugcagagacaacuggaaaggcuccaaucggcccaucguagauauaaacauaaaggaucauagcauuguuuccaguuauguguguucaggacuuguuggagacacacccagaaaaaacgacagcuccagcaguagccauuguuuggauccuaacaaugaagaagguggucauggagugaaaggcugggccuuugaugauggaaaugacguguggaugggaagaacaaucaacgagacgucacgcuuaggguaugaaaccuucaaagucauugaaggcugguccaacccuaaguccaaauugcagauaaauaggcaagucauaguugacagaggugauagguccgguuauucugguauuuucucuguugaaggcaaaagcugcaucaaucggugcuuuuauguggaguugauuaggggaagaaaagaggaaacugaagucuuguggaccucaaacaguauuguuguguuuuguggcaccucagguacauauggaacaggcucauggccugauggggcggaccucaaucucaugccuauauaa

SEQ ID NO: 55953 - RNA, 1410 nt, Artificial Sequence
  derived and/or modified CDS sequence (wt) from neuraminidase__InfluenzaA__AGW01908
augaauccaaaucaaaagauaauaacgauuggcucuguuucucucaccauuuccacaauaugcuucuucaugcaaauugccaucuugauaacuacuguaacauugcauuucaagcaauaugaauucaacucccccccaaacaaccaagugaugcugugugaaccaacaauaauagaaaggaacauaacagagauaguguaucugaccaacaccaccauagagaaggaaauaugccccaaaccagcagaauacagaaauuggucaaaaccgcaauguggcauuacaggauuugcaccuuucucuaaggacaauucgauuaggcuuuccgcugguggggacaucugggugacaagagaaccuuaugugucaugcgauccugacaaguguuaucaauuugcccuuggacagggaacaacacuaaacaacgugcauucaaauaacacaguacgugauaggaccccuuaucggacucuauugaugaaugaguuggguguuccuuuucaucuggggaccaagcaagugugcauagcaugguccagcucaaguugucacgauggaaaagcauggcugcauguuuguauaacgggggaugauaaaaaugcaacugcuagcuucauuuacaaugggaggcuuguagauaguguuguuucaugguccaaagaaauucucaggacccaggagucagaaugcguuuguaucaauggaacuuguacaguaguaaugacugauggaagugcuucaggaaaagcugauacuaaaauacuauucauugaggaggggaaaaucguucauacuagcacauugucaggaagugcucagcaugucgaagagugcucuugcuauccucgauauccuggugucagaugugucugcagagacaacuggaaaggcuccaaucggcccaucguagauauaaacauaaaggaucauagcauuguuuccaguuauguguguucaggacuuguuggagacacacccagaaaaaacgacagcuccagcaguagccauuguuuggauccuaacaaugaagaagguggucauggagugaaaggcugggccuuugaugauggaaaugacguguggaugggaagaacaaucaacgagacgucacgcuuaggguaugaaaccuucaaagucauugaaggcugguccaauccuaaguccaaauugcagauaaauaggcaagucauaguugacagaggugauagguccgguuauucugguauuuucucuguugaaggcaaaagcugcaucaaucggugcuuuuauguagaguugauuaggggaagaaaagaggaaacugaagucuuguggaccucaaacaguauuguuguguuuuguggcaccucagguacauauggaacaggcucauggccugauggggcggaccucaaucucaugccuauauaa

SEQ ID NO: 55954 - RNA, 1410 nt, Artificial Sequence; identical to SEQ ID NO: 55865
  derived and/or modified CDS sequence (wt) from neuraminidase__InfluenzaA__AGW01920

SEQ ID NO: 55955 - RNA, 1410 nt, Artificial Sequence
  derived and/or modified CDS sequence (wt) from neuraminidase__InfluenzaA__AGW01932
augaauccaaaucaaaagauaauaacgauuggcucuguuucucucaccauuuccacaauaugcuucuucaugcaaauugccaucuuaauaacuacuguaacauugcauuucaagcaauaugaauucaacucccccccaaacaaccaagugaugcugugugaaccaacaauaauagaaagaaacauaacagagauaguguauuugaccaacaccaccauagagaaggaaauaugccccaaaccagcagaauacagaaauuggucaaaaccgcaauguggcauuacaggauuugcaccuuucucuaaggacaauucgauuaggcuuuccgcugguggggacaucugggugacaagagaaccuuaugugucaugcgauccugacaaguguuaucaauuugcccuuggacagggaacaacacuaaacaacgugcauucaaauaacacaguacgugauaggaccccuuaucggacucuauugaugaaugaguuggguguuccuuuucaucuggggaccaagcaagugugcauagcaugguccagcucaaguugucacgauggaaaagcauggcugcauguuuguauaacgggggaugauaaaaaugcaacugcuagcuucauuuacaaugggaggcuuguagauaguguuguuucaugguccaaagaaauucucaggacccaggagucagaaugcguuuguaucaauggaacuuguacaguaguaaugacugauggaagugcuucaggaaaagcugauacuaaaauacuauucauugaggaggggaaaaucguucauacuagcacauugucaggaagugcucagcaugucgaagagugcucuugcuauccucgauauccuggugucagaugugucugcagagacaacuggaaaggcuccaaucggcccaucguagauauaaacauaaaggaucauagcauuguuuccaguuauguguguucaggacuuguuggagacacacccagaaaaaacgacagcuccagcaguagccauuguuuggauccuaacaaugaagaagguggucauggagugaaaggcugggccuuugaugauggaaaugacguauggaugggaagaacaaucaacgagacgucacgcuuaggguaugaaaccuucaaagucauugaaggcugguccaacccuaaguccaaauugcagauaaauaggcaagucauaguugacagaggugauagguccgguuauucugguauuuucucuguugaaggcaaaagcugcaucaaucggugcuuuuauguggaguugauuaggggaagaaaagaggaaacugaagucuuguggaccucaaacaguauuguuguguuuuguggcaccucagguacauauggaacaggcucauggccugauggggcggaccucaaucucaugccuauauaa

SEQ ID NO: 55956 - RNA, 1410 nt, Artificial Sequence
  derived and/or modified CDS sequence (wt) from neuraminidase__InfluenzaA__AGW01944
augaauccaaaucaaaagauaauaacgauuggcucuguuucucucaccauuuccacaauaugcuucuucaugcaaauugccaucuugauaacuacuguaacauugcauuucaagcaauaugaauucaacuuccccccaaacaaccaagugaugcugugugaaccaacaauaauagaaagaaacauaacagagauaguguaucugaccaacaccaccauagagaaggaaauaugccccaaaccagcagaauacagaaauuggucaaaaccgcaauguggcauuacaggauuugcaccuuucucuaaggacaauucgauuaggcuuuccgcugguggggacaucugggugacaagagaaccuuaugugucaugcgauccugacaaguguuaucaauuugcccuuggacagggaacaacacuaaacaacgugcauucaaauaacacaguacgugauaggaccccuuaucggacucuauugaugaaugaguuggguguuccuuuucaucuggggaccaagcaagugugcauagcaugguccagcucaaguugucacgauggaaaagcauggcugcauguuugcauaacgggggaugauaaaaaugcaacugcuagcuucauuuacaaugggaggcuuguagauaguguuguuucaugguccaaagaaauucucaggacccaggagucagaaugcguuuguaucaauggaacuuguacaguaguaaugacugauggaagugcuucaggaaaagcugauacuaaaauacuauucauugaggagggaaaaaucguucauacuagcacauugucaggaagugcucagcaugucgaagagugcucuugcuauccucgauauccuggugucagaugugucugcagagacaacuggaaaggcuccaaucggcccaucguagauauaaacauaaaggaucauagcauuguuuccaguuauguguguucaggacuuguuggagacacacccagaaaaaacgacagcuccagcaguagccauuguuuggcuccuaacaaugaagaagguggucauggagugaaaggcugggccuuugaugauggaaaugacguguggaugggaagaacaaucaacgagacgucacgcuuaggguaugaaaccuucaaagucauugaaggcugguccaacccuaaguccaaauugcagauaaauaggcaagucauaguugacagaggugauagguccgguuauucugguauuuucucuguugaaggcaaaagcugcaucaaucggugcuuuuauguggaguugauuaggggaagaaaagaggaaacugaagucuuguggaccucaaacaguauuguuguguuuuguggcaccucagguacauauggaacaggcucauggccugauggggcggaccucaaucucaugccuauauaa

SEQ ID NO: 55957 - RNA, 1410 nt, Artificial Sequence
  derived and/or modified CDS sequence (wt) from neuraminidase__InfluenzaA__AGW01956
augaauccaaaucaaaagauaauaacgauuggcucuguuucucucaccauuuccacaauaugcuucuucaugcaaauugccaucuugauaacuacuguaacauugcauuucaagcaauaugaauucaacucccccccaaacaaccaagugaugcugugugaaccaacaauaauagaaagaaacauaacagagauaguguauuugaccaacaccaccauagagaaggaaauaugccccaaaccagcagaauacagaaauuggucaaaaccgcaauguggcauuacaggauuugcaccuuucucuaaggacaauucgauuaggcuuuccgcugguggggacaucugggugacaagagaaccuuaugugucaugcgauccugacaaguguuaucaauuugcccuuggacagggaacaacacuaaacaacgugcauucaaauaacacaguacgugauaggaccccuuaucggacucuauugaugaaugaguuggguguuccuuuucaucuggggaccaagcaagugugcauagcaugguccagcucaaguugucacgauggaaaagcauggcugcauguuuguauaacgggggaugauaaaaaugcaacugcuagcuucauuuacaaugggaggcuuguagauaguguuguuucaugguccaaagaaauucucaggacccaggagucagaaugcguuuguaucaauggaacuuguacaguaguaaugacugauggaagugcuucaggaaaagcugauacuaaaauacuauucauugaggaggggaaaaucguucauacuagcacauugucaggaagugcucagcaugucgaagagugcucuugcuauccucgauauccuggugucagaugugucugcagagacaacuggaaaggcuccaaucggcccaucguagauauaaacauaaaggaucauagcauuguuuccaguuauguguguucaggacuuguuggagacacacccagaaaaaacgacagcuccagcaguagccauuguuuggauccuaacaaugaagaagguggucauggagugaaaggcugggccuuugaugauggaaaugacguauggaugggaagaacaaucaacgagacgucacgcuuaggguaugaaaccuucaaagucauugaaggcugguccaacccuaaguccaaauugcagauaaauaggcaagucauaguugacagaggugauagguccgguuauucugguauuuucucuguugaaggcaaaagcugcaucaaucggugcuuuuauguggaguugauuaggggaagaaaagaggaaacugaagucuuguggaccucaaacaguauuguuguguuuuguggcaccucagguacauauggaacaggcucauggccugauggggcggaccucaaucucaugccuauauaa

SEQ ID NO: 55958 - RNA, 1410 nt, Artificial Sequence
  derived and/or modified CDS sequence (wt) from neuraminidase__InfluenzaA__AGW01968
augaauccaaaucaaaagauaauaacgauuggcucuguuucucucaccauuuccacaauaugcuucuucaugcaaauugccaucuugauaacuacuguaacauugcauuucaagcaauaugaauucaacucccccccaaacaaccaagugaugcugugugaaccaacaauaauagaaagaaacauaacagagauaguguaucuaaccaacaccaccauagagaaggaaauaugccccaaaccagcagaauacagaaauuggucaaagccgcagugugacauuacaggauuugcaccuuuuucuaaggacaauucgauuaggcuuuccgcugguggggacaucugggugacaagagaaccuuaugugucaugcgauccugacaaguguuaucaauuugcucuuggacagggaacaacacuaaacaacgugcauucaaauaacacaauacgugauaggaccccuuaucggacccuauugaugaaugaguuagguguuccuuuucaucuggggaccaagcaagugugcauagcaugguccagcucaaguugucacgauggaaaagcauggcugcauguuuguauaacgggggaugaugaaaaugcaacugcuagcuucauuuacaaugggaggcuuguagauaguguuguuucaugguccaaagaaauccucaggacccaggagucagaaugcguuuguaucaauggaacuuguacaguaguaaugacugaugggagugcuucaggaaaagcugauacuaaaauacuauucauugaggaggggaaaaucguucauacuagcacauugucaggaagugcucagcaugucgaggagugcucuugcuauccucgauauccuggugucagaugugucugcagagacaacuggaaaggcuccaauaggccuaucguagauauaaacauaaaggaucauagcauuguuuccagguauguguguucaggacuuguuggagacacacccagaaaaaacgacagcuccagcaguagccauuguuuggauccuaacaaugaagaagguggucauggagugaaaggcugggccuucgaugauggaaaugacguguggaugggaagaacgaucaacgagacgucacguuuaggguaugaaaccuucaaagucauugaaggcugguccaacccuaaguccaaauugcagauaaauaggcaggucauaguugacagaggugauagguccgguuauucugguauuuucucuguugaaggcaaaagcugcaucaaucggugcuuuuauguggaguugauuaggggaagaaaagaggaaacugaagucuuguggaccucaaacaguauuguuguguuuuguggcaccucagguacauauggaacaggcucauggccugauggggcggaccucaaucucaugccuauauaa

SEQ ID NO: 55959 - RNA, 1410 nt, Artificial Sequence; identical to SEQ ID NO: 55883
  derived and/or modified CDS sequence (wt) from neuraminidase__InfluenzaA__AGW01980

SEQ ID NO: 55960 - RNA, 1410 nt, Artificial Sequence; identical to SEQ ID NO: 55865
  derived and/or modified CDS sequence (wt) from neuraminidase__InfluenzaA__AGW01992

SEQ ID NO: 55961 - RNA, 1410 nt, Artificial Sequence; identical to SEQ ID NO: 55869
  derived and/or modified CDS sequence (wt) from neuraminidase__InfluenzaA__AGW02004

SEQ ID NO: 55962 - RNA, 1410 nt, Artificial Sequence
  derived and/or modified CDS sequence (wt) from neuraminidase__InfluenzaA__AGW02016
augaauccaaaucaaaagauaauaacgauuggcucuguuucucucaccauuuccacaauaugcuucuucaugcaaauugccaucuugauaacuacuguaacauugcauuucaagcaauaugaauucaacucccccccaaacaaccaagugaugcugugugaaccaacaauaauagaaagaaacauaacagagauaguguaucugaccaacaccaccauagagaaggaaauaugccccaaaccagcagaauacagaaauuggucaaaaccgcaauguggcauuacaggauuugcaccuuucucuaaggacaauucgauuaggcuuuccgcugguggggacaucugggugacaagagaaccuuaugugucaugcgauccugacaaguguuaucaauuugcccuuggacagggaacaacacuaaacaacgugcauucaaauaacacaguacgugauaggaccccuuaucggacucuauugaugaaugaguuggguguuccuuuucaucuggggaccaagcaagugugcauagcaugguccagcucaaguugucacgauggaaaagcauggcugcauguuugcauaacgggggaugauaaaaaugcaacugcuagcuucauuuacaaugggaggcuuguagauaguguuguuucaugguccaaagaaauucucaggacccaggagucagaaugcguuuguaucaauggaacuuguacaguaguaaugacugauggaagugcuucaggaaaagcugauacuaaaauacuauucauugaggagggaaaaaucguucauacuagcacauugucaggaagugcccagcaugucgaagagugcucuugcuauccucgauauccuggugucagaugugucugcagagacaacuggaaaggcuccaaucggcccaucguagauauaaacauaaaggaucauagcauuguuuccaguuauguguguucaggacuuguuggagacacacccagaaaaaacgacagcuccagcaguagccauuguuuggauccuaacaaugaagaagguggucauggagugaaaggcugggccuuugaugauggaaaugacguguggaugggaagaacaaucaacgagacgucacgcuuaggguaugaaaccuucaaagucauugaaggcugguccaacccuaaguccaaauugcagauaaauaggcaagucauaguugacagaggugauagguccgguuauucugguauuuucucuguugaaggcaaaagcugcaucaaucggugcuuuuauguggaguugauuaggggaagaaaagaggaaacugaagucuuguggaccucaaacaguauuguuguguuuuguggcaccucagguacauauggaacaggcucauggccugauggggcggaccucaaucucaugccuauauaa

SEQ ID NO: 55963 - RNA, 1410 nt, Artificial Sequence
  derived and/or modified CDS sequence (wt) from neuraminidase__InfluenzaA__AGW02040
augaauccaaaucaaaagauaauaacgauuggcucuguuucucucaccauuuccacaauaugcuucuucaugcaaauugccaucuugauaacuacuguaacauugcauuucaagcaauaugaauucaacucccccccaaacaaccaagugaugcugugugaaccaacaauaauagaaagaaacauaacagagauaguguaucugaccaacaccaccauagagaaggaaauaugccccaaaccagcagaauacagaaauuggucaaaaccgcaauguggcauuacaggauuugcaccuuucucuaaggacaauucgauuaggcuuuccgcugguggggacaucugggugacaagagaaccuuaugugucaugcgauccugacaaguguuaucaauuugcccuuggacagggaacaacacuaaacaacgugcauucaaauaacacaguacgugauaggaccccuuaucggacucuauugaugaaugaguuggguguuccuuuucaucuggggaccaagcaagugugcauagcaugguccagcucaaguugucacgauggaaaagcauggcugcauguuugcauaacgggggaugauaaaaaugcaacugcuagcuucauuuacaauggaaggcuuguagauaguguuguuucaugguccaaagaaauucucaggacccaggagucagaaugcguuuguaucaauggaacuuguacaguaguaaugacugauggaagugcuucaggaaaagcugauacuaaaauacuauucauugaggagggaaaaaucguucauacuagcacauugucaggaagugcucagcaugucgaagagugcucuugcuauccucgauauccuggugucagaugugucugcagagacaacuggaaaggcuccaaucggcccaucguagauauaaacauaaaggaucauagcauuguuuccaguuauguguguucaggacuuguuggagacacacccagaaaaaacgacagcuccagcaguagccauuguuuggauccuaacaaugaagaagguggucauggagugaaaggcugggccuuugaugauggaaaugacguguggaugggaagaacaaucaacgagacgucacgcuuaggguaugaaaccuucaaagucauugaaggcugguccaacccuaaguccaaauugcagauaaauaggcaagucauaguugacagaggugauagguccgguuauucugguauuuucucuguugaaggcaaaagcugcaucaaucggugcuuuuauguggaguugauuaggggaagaaaagaggaaacugaagucuuguggaccucaaacaguauuguuguguuuuguggcaccucagguacauauggaacaggcucauggccugauggggcggaccucaaucucaugccuauauaa

SEQ ID NO: 55964 - RNA, 1410 nt, Artificial Sequence
  derived and/or modified CDS sequence (wt) from neuraminidase__InfluenzaA__AGW02064
augaauccaaaucaaaagauaauaacgauuggcucuguuucucucaccauuuccacaauaugcuucuucaugcaaauugccaucuugauaacuacuguaacauugcauuucaagcaauaugaauucgacucccccccaaacaaccaagugaugcugugugaaccaacaauaauagaaagaaacauaacagagauaguguaucugaccaacaccaccauagagaaggaaauaugccccaaaccagcagaauacagaaauuggucaaaaccgcaauguggcauuacaggauuugcaccuuucucuaaggacaauucgauuaggcuuuccgcugguggggacaucugggugacaagagaaccuuaugugucaugcgauccugacaaguguuaucaauuugcccuuggacagggaacaacacuaaacaacgugcauucaaauaacacaguacgugauaggaccccuuaucggacucuauugaugaaugaguuggguguuccuuuucaucuggggaccaagcaagugugcauagcaugguccagcucaaguugucacgauggaaaagcauggcugcauguuuguauaacgggggaugauaaaaaugcaacugcuagcuucauuuacaaugggaggcuuguagauaguguuguuucaugguccaaagaaauucucaggacccaggagucagaaugcguuuguaucaauggaacuuguacaguaguaaugacugauggaagugcuucaggaaaagcugauacuaaaauacuauucauugaggaggggaaaaucguucauacuagcacauugucaggaagugcucagcauguugaagagugcucuugcuauccucgauauccuggugucagaugugucugcagagacaacuggaaaggcuccaaucggcccaucguagauauaaacauaaaggaucauagcauuguuuccaguuauguguguucaggacuuguuggagacacacccagaaaaaacgacagcuccagcaguggccauuguuuggauccuaacaaugaagaagguggucauggagugaaaggcugggccuuugaugauggaaaugacguguggaugggaagaacaaucaacgagacgucacgcuuaggguaugaaaccuucaaagucauugaaggcugguccaacccuaaguccaaauugcagauaaauaggcaagucauaguugacagaggugauagguccgguuauucugguauuuucucuguugaaggcaaaagcugcaucaaucggugcuuuuauguggaguugauuaggggaagaaaagaggaaacugaagucuuguggaccucaaacaguauuguuguguuuuguggcaccucagguacauauggaacaggcucauggccugauggggcggaccucaaccucaugccuauauaa

SEQ ID NO: 55965 - RNA, 1410 nt, Artificial Sequence; identical to SEQ ID NO: 55865
  derived and/or modified CDS sequence (wt) from neuraminidase__InfluenzaA__AGW02076

SEQ ID NO: 55966 - RNA, 1410 nt, Artificial Sequence; identical to SEQ ID NO: 55865
  derived and/or modified CDS sequence (wt) from neuraminidase__InfluenzaA__AGW02088

SEQ ID NO: 55967 - RNA, 1410 nt, Artificial Sequence
  derived and/or modified CDS sequence (wt) from neuraminidase__InfluenzaA__AGW02100
augaauccaaaucaaaagauaauaacgauuggcucuguuucucucaccauuuccacaauaugcuucuucaugcaaauugccaucuugauaacuacuguaacauugcauuucaagcaauaugaauccaacucccccccaaacaaccaagugaugcugugugaaccaacaauaauagaaagaaacauaacagagauaguguaucugaccaacaccaccauagagaaggaaauaugccccaaaccagcagaauacagaaauuggucaaaaccgcaauguggcauuacaggauuugcaccuuucucuaaggacaauucgauuaggcuuuccgcugguggggacaucugggugacaagagaaccuuaugugucaugcgauccugacaaguguuaucaauuugcccuuggacagggaacaacacuaaacaacgugcauucaaauaacacaguacgugauaggaccccuuaucggacucuauugaugaaugaguuggguguuccuuuucaucuggggaccaagcaagugugcauagcaugguccagcucaaguugucacgauggaaaagcauggcugcauguuuguauaacgggggaugauaaaaaugcaacugcuagcuucauuuacaaugggaggcuuguagauaguguuguuucaugguccaaagaaauucucaggacccaggagucagaaugcguuuguaucaauggaacuuguacaguaguaaugacugauggaagugcuucaggaaaagcugauacuaaaauacuauucauugaggaggggaaaaucguucauacuagcacauugucaggaagugcucagcaugucgaagagugcucuugcuauccucgauauccuggugucagaugugucugcagagacaacuggaaaggcuccaaucggcccaucguagauauaaacauaaaggaucauagcauuguuuccaguuauguguguucaggacuuguuggagacacacccagaaaaaacgacagcuccagcaguagccauuguuuggauccuaacaaugaagaagguggucauggagugaaaggcugggccuuugaugauggaaaugacguguggaugggaagaacaaucaacgagacgucacgcuuaggguaugaaaccuucaaagucauugaaggcugguccaauccuaaguccaaauugcagauaaauaggcaagucauaguugacagaggugauagguccgguuauucugguauuuucucuguugaaggcaaaagcugcaucaaucggugcuuuuauguagaguugauuaggggaagaaaagaggaaacugaagucuuguggaccucaaacaguauuguuguguuuuguggcaccucagguacauauggaacaggcucauggccugauggggcggaccucaaucucaugccuauauaa

SEQ ID NO: 55968 - RNA, 1410 nt, Artificial Sequence; identical to SEQ ID NO: 55895
  derived and/or modified CDS sequence (wt) from neuraminidase__InfluenzaA__AGW02112

SEQ ID NO: 55969 - RNA, 1410 nt, Artificial Sequence
  derived and/or modified CDS sequence (wt) from neuraminidase__InfluenzaA__AGW02124
augaauccaaaucaaaagauaauaacgauuggcucuguuucucucaccauuuccacaauaugcuucuucaugcaaauugccaucuugauaacuacuguaacauugcauuucaagcaauaugaauucaacucccccccaaacaaccaagugaugcugugugaaccaacaauaauagaaagaaacauaacagagauaguguauuugaccaacaccaccauagagaaggaaauaugccccaaaccagcagaauacagaaauuggucaaaaccgcaauguggcauuacaggauuugcaccuuucucuaaggacaauucgauuaggcuuuccgcugguggggacaucugggugacaagagaaccuuaugugucaugcgauccugacaaguguuaucaauuugcccuuggacagggaacaacacuaaacaacgugcauucaaauaacacaguaagugauaggaccccuuaucggacucuauugaugaaugaguuggguguuccuuuucaucuggggaccaagcaagugugcauagcaugguccagcucaaguugucacgauggaaaagcauggcugcauguuuguauaacgggggaugauaaaaaugcaacugcuagcuucauuuacaaugggaggcuuguagauaguguuguuucaugguccaaagaaauucucaggacccaggagucagaaugcguuuguaucaauggaacuuguacaguaguaaugacugauggaagugcuucaggaaaagcugauacuaaaauacuauucauugaggaggggaaaaucguucauacuagcacauugucaggaagugcucagcaugucgaagagugcucuugcuauccucgauauccuggugucagaugugucugcagagacaacuggaaaggcuccaaucggcccaucguagauauaaacauaaaggaucauagcauuguuuccaguuauguguguucaggacuuguuggagacacacccagaaaaaacgacagcuccagcaguagccauuguuuggauccuaacaaugaagaagguggucauggagugaaaggcugggccuuugaugauggaaaugacguauggaugggaagaacaaucaacgagacgucacgcuuaggguaugaaaccuucaaagucauugaaggcugguccaacccuaaguccaaauugcagauaaauaggcaagucauaguugacagaggugauagguccgguuauucugguauuuucucuguugaaggcaaaagcugcaucaaucggugcuuuuauguggaguugauuaggggaagaaaagaggaaacugaagucuuguggaccucaaacaguauuguuguguuuuguggcaccucagguacauauggaacaggcucauggccugauggggcggaccucaaucucaugccuauauaa

SEQ ID NO: 55970 - RNA, 1410 nt, Artificial Sequence; identical to SEQ ID NO: 55883
  derived and/or modified CDS sequence (wt) from neuraminidase__InfluenzaA__AGW02136

SEQ ID NO: 55971 - RNA, 1410 nt, Artificial Sequence; identical to SEQ ID NO: 55895
  derived and/or modified CDS sequence (wt) from neuraminidase__InfluenzaA__AGW02148

SEQ ID NO: 55972 - RNA, 1410 nt, Artificial Sequence
  derived and/or modified CDS sequence (wt) from neuraminidase__InfluenzaA__AGW02160
augaauccaaaucaaaagauaauaacgauuggcucuguuucucucaccauuuccacaauaugcuucuucaugcaaauugccaucuugauaacuacuguaacauugcauuucaagcaauaugaauucgacucccccccaaacaaccaagugaugcugugugaaccaacaauaauagaaagaaacauaacagagauaguguaucugaccaacaccaccauagagaaggaaauaugccccaaaccagcagaauacagaaauuggucaaaaccgcaauguggcauuacaggauuugcaccuuucucuaaggacaauucgauuaggcuuuccgcugguggggacaucugggugacaagagaaccuuaugugucaugcgauccugacaaguguuaucaauuugcccuuggacagggaacaacacuaaacaacgugcauucaaauaacacaguacgugauaggaccccuuaucggacucuauugaugaaugaguuggguguuccuuuucaucuggggaccaagcaagugugcauagcaugguccagcucaaguugucacgauggaaaagcauggcugcauguuuguauaacgggggaugauaaaaaugcaacugcuagcuucauuuacaaugggaggcuuguagauaguguuguuucaugguccaaagaaauucucaggacccaggagucagaaugcguuuguaucaauggaacuuguacaguaguaaugacugauggaagugcuucaggaaaagcugauacuaaaauacuauucauugaggaggggaaaaucguucauacuagcacauugucaggaagugcucagcauguugaagagugcucuugcuauccucgauauccuggugucagaugugucugcagagacaacuggaaaggcuccaaucggcccaucguagauauaaacauaaaggaucauagcauuguuuccaguuauguguguucaggacuuguuggagacacacccagaaaaaacgacagcuccagcaguagccauuguuuggauccuaacaaugaagaagguggucauggagugaaaggcugggccuuugaugauggaaaugacguguggaugggaagaacaaucaacgagacgucacgcuuaggguaugaaaccuucaaagucauugaaggcugguccaacccuaaguccaaauugcagauaaauaggcaagucauaguugacagaagugauagguccgguuauucugguauuuucucuguugaaggcaaaagcugcaucaaucggugcuuuuauguggaguugauuaggggaagaaaagaggaaacugaagucuuguggaccucaaacaguauuguuguguuuuguggcaccucagguacauauggaacaggcucauggccugauggggcggaccucaaccucaugccuauauaa

SEQ ID NO: 55973 - RNA, 1410 nt, Artificial Sequence
  derived and/or modified CDS sequence (wt) from neuraminidase__InfluenzaA__AGW02172
augaauccaaaucaaaagauaauaacgauuggcucuguuucucucaccauuuccacaauaugcuucuucaugcaaauugccaucuugauaacuacuguaacauugcauuucaagcaauaugaauucaacucccccccaaacaaccaagugaugcuaugugaaccaacaauaauagaaagaaacauaacagagauaguguauuugaccaacaccaccauagagaaggaaauaugccccaaaccagcagaauacagaaauuggucaaaaccgcaauguggcauuacaggauuugcaccuuucucuaaggacaauucgauuaggcuuuccgcugguggggacaucugggugacaagagaaccuuaugugucaugcgauccugacaaguguuaucaauuugcccuuggacagggaacaacacuaaacaacgugcauucaaauaacacaguacgugauaggaccccuuaucggacucuauugaugaaugaguuggguguuccuuuucaucuggggaccaagcaagugugcauagcaugguccagcucaaguugucacgauggaaaagcauggcugcauguuuguauaacgggggaugauaaaaaugcaacugcuagcuucauuuacaaugggaggcuuguagauaguguuguuucaugguccaaagaaauucucaggacccaggagucagaaugcguuuguaucaauggaacuuguacaguaguaaugacugauggaagugcuucaggaaaagcugauacuaaaauacuauucauugaggaggggaaaaucguucauacuagcacauugucaggaagugcucagcaugucgaagagugcucuugcuauccucgauauccuggugucagaugugucugcagagacaacuggaaaggcuccaaucggcccaucguagauauaaacauaaaggaucauagcauuguuuccaguuauguguguucaggacuuguuggagacacacccagaaaaaacgacagcuccagcaguagccauuguuuggauccuaacaaugaagaagguggucauggagugaaaggcugggccuuugaugauggaaaugacguauggaugggaaggacaaucaacgagacgucacgcuuaggguaugaaaccuucaaagucauugaaggcugguccaacccuaaguccaaauugcagauaaauaggcaagucauaguugacagaggugauagguccgguuauucugguauuuucucuguugaaggcaaaagcugcaucaaucggugcuuuuauguggaguugauuaggggaagaaaagaggaaacugaagucuuguggaccucaaacaguauuguuguguuuuguggcaccucagguacauauggaacaggcucauggccugauggggcggaccucaaucucaugccuauauaa

SEQ ID NO: 55974 - RNA, 1410 nt, Artificial Sequence; identical to SEQ ID NO: 55869
  derived and/or modified CDS sequence (wt) from neuraminidase__InfluenzaA__AGW02184

SEQ ID NO: 55975 - RNA, 1410 nt, Artificial Sequence
  derived and/or modified CDS sequence (wt) from neuraminidase__InfluenzaA__AGW02196
augaauccaaaucaaaagauaauaacgauuggcucuguuucucucaccauuuccacaauaugcuucuucaugcaaauugccaucuugauaacuacuguaacauugcauuucaagcaauaugaauucaacucccccccaaacaaccaagugaugcugugugaaccaacaauaauagaaagaaacauaacagagauaguguaucugaucaacaccaccauagagaaggaaauaugccccaaaccagcagaauacagaaauuggucaaaaccgcaauguggcauuacaggauuugcaccuuucucuaaggacaauucgauuaggcuuuccgcugguggggacaucugggugacaagagaaccuuaugugucaugcgaucccuacaaguguuaucaauuugcccuuggacagggaacaacacuaaacaacgugcauucaaauaacacaguacgugauaggaccccuuaucggacucuauugaugaaugaguuggguguuccuuuucaucuggggaccaagcaagugugcauagcaugguccagcucaaguugucacgauggaaaagcauggcugcauguuuguauaacgggggaugauaaaaaugcaacugcuagcuucauuuacaaugggaggcuuguagacaguguuguuucaugguccaaagaaauucucaggacccaggagucagaaugcguuuguaucaauggaacuuguacaguaguaaugacugauggaagugcuucaggaaaagcugauacuaaaauacuauucauugaggaggggaaaaucguucauacuagcacauugucaggaagugcucagcaugucgaagagugcucuugcuauccucgauauccuggugucagaugugucugcagagacaacuggaaaggcuccaaucggcccaucguagauauaaacauaaaggaucauagcauuguuuccaguuauguguguucaggacuuguuggagacacacccagaaaaaacgacagcuccagcaguagccauuguuuggauccuaacaaugaagaagguggucauggagugaaaggcugggccuuugaugauggaaaugacguguggaugggaagaacaaucaacgagacgucacgcuuaggguaugaaaccuucaaagucauugaaggcugguccaacccuaaguccaaauugcagauaaauaggcaagucauaguugacagaggugauagguccgguuauucugguauuuucucuguugaaggcaaaagcugcaucaaucggugcuuuuauguggaguugauuaggggaagaaaagaggaaacugaagucuuguggaccucaaacaguauuguuguguuuuguggcaccucagguacauauggaacaggcucauggccugauggggcggaccucaaucucaugccuauauaa

SEQ ID NO: 55976 - RNA, 1410 nt, Artificial Sequence
  derived and/or modified CDS sequence (wt) from neuraminidase__InfluenzaA__AGW04174
augaauccaaaucaaaagauaauaacgauuggcucuguuucucucaccauuuccacaauaugcuucuucaugcaaauugccaucuugauaacuacuguaacauugcauuucaagcaauaugaauucaauucccccccaaacaaccaagugaugcugugugaaccaacaauaauagaaagaaacauaacagagauaguguaucuaaccaacaccaccauagagaaggaaauaugccccaaaccagcagaauacagaaauuggucaaagccgcagugugacauuacaggauuugcaccuuuuucuaaggacaauucgauuaggcuuuccgcugguggggacaucugggugacaagagaaccuuaugugucaugcgauccugacaaguguuaucaauuugcucuuggacagggaacaacacuaaacaacgugcauucaaauaacacaguacgugauaggaccccuuaucggacccuauugaugaaugaguuagguguuccuuuucaucuggggaccaagcaagugugcauagcaugguccagcucaaguugucacgauggaaaagcauggcugcauguuuguauaacgggggaugauaaaaaugcaacugcuagcuucauuuacaaugggaggcuuguagauaguguuguuucaugguccaaagaaauccucaggacccaggaaucagaaugcguuuguaucaauggaacuuguacaguaguaaugacugaugggagugcuucaggaaaagcugauacuaaaauacuauucauugaggaggggaaaaucguucauacuagcacauugucaggaagugcucagcaugucgaggagugcucuugcuauccucgauauccuggugucagaugugucugcagagacaacuggaaaggcuccaauaggccuaucguagauauaaacauaaaggaucauagcauuguuuccagguauguguguucaggacuuguuggagacacacccagaaaaaacgacagcucaagcaguagccauuguuuggauccuaacaaugaagaagguggucauggagugaaaggcugggccuucgaugauggaaaugacguguggaugggaagaacgaucaacgagacgucacguuuaggguaugaaaccuucaaagucauugaaggcugguccaacccuaaguccaaauugcagauaaauaggcaggucauaguugacagaggugauagguccgguuauucugguauuuucucuguugaaggcaaaagcugcaucaaucggugcuuuuauguggaguugauuaggggaagaaaagaggaaacugaagucuuguggaccucaaacaguauuguuguguuuuguggcaccucagguacauauggaacaggcucauggccugauggggcggaccucaaucucaugccuauauaa

SEQ ID NO: 55977 - RNA, 1410 nt, Artificial Sequence
  derived and/or modified CDS sequence (wt) from neuraminidase__InfluenzaA__AGW25784
augaauccaaaucaaaagauaauaacgauuggcucuguuucucucauuauugccacaauaugcuuccuuaugcaaauugccauccugguaacuaccgugacauugcauuuuaagcaauauggauacaauucccucccaaacaaccaaguaaugcugugugaaccaacaauaauagaaagaaacauaacagagauaguguaucugaccaacaccaccauagagaaggagauaugccccaaauuagcagaauacagaaauuggucaaagccgcaauguaagauuacaggauuugcaccuuuuucuaaggacaauucaauccggcuuuccgcugguggggacauuugggugacaagggaaccuuaugugucaugcgauccuuacaaguguuaucaauuugcccuuggacagggaacaacacuaaacaauaagcacucaaaugacacaguacaugauaggaccccuuaucgaacccuauugaugaaugaauuagguguuccauuucauuuaggaaccaagcaaguaugcauagcaugguccaguucaaguugucacgauggaaaagcauggcugcauauuuguguaacugggcacgaugaaaaugcaacugcuagcuucauuuacgaugggaagcuuguagauaguauuggcucaugguccaaaaaaauccuuaggacccaggagucggaaugcguuugcaucaauggaacuuguacagugguaaugacugaugggagugcuucaggaagagcugauaccaaaauauuauuuauugaggaggggaaaaucauucauauuagccaauugucaggaagugcucagcaugucgaggaauguucuuguuacccucgauauccugguauuagaugcgucugcagagacaacuggaaaggcuccaauaggcccauuguagauauaaauguaaaggauuauagcauuacuuccaguuaugugugcucaggacuuguuggagacacacccagaaaaaccgacaacuccagcaguagccauugccugaauccuaacaaugaggaagguggccauggagugaaaggcugggccuuugaugauggaaaugacguguggaugggaagaacgaucagcgagaaauuccgcucagguuaugaaaccuucaaagucaucaaaggcugguccaaaccuaacuccaaauugcagauaaauaggcaagucauaguugacagagauaauagguccgguuacucugguauuuuuucuguugaaggcaaaagcugcaucaaucgguguuuuuauguggaauugauaagaggaaggaaacgggaagcugaagucugguggaccucaaacagcauuguuguguuuuguggcacaucaggaacauauggaacaggcucauggccugauggggcggacaucaaucucaugccuauauaa

SEQ ID NO: 55978 - RNA, 1350 nt, Artificial Sequence
  derived and/or modified CDS sequence (wt) from neuraminidase__InfluenzaA__AGW27062
augaauccaaaucagaagauaguaaccauuggaucaaucuguaugguaauuggaacaauuagcuugauguuacagauugggaacauaaucucaauaugggucagucauucaauccaaacagggaaucaacaccaaacugaaccaaucagaaauacuaauuuucuuacugagaacgcuguagcuucaguaacauuagcuggcaauucaucucuuugccccauuagaggaugggcuguacacaguaaagacaacaguauaaggauuggguccaagggggauguguuuguaauuagagagccguucaucucaugcucccaucuggaaugcagaacuuucuuuuugacucagggagcuuuacugaaugacaagcacuccaacggaacugucaaagauaggagcccucacagaacgcuaaugaguugucccauaggugaggcucccuccccauauaacucgagguuugagucuguugcuuggucggcaagugcuugccaugauggcaccagcugguugguaauuggaauuucugguccagacaauggggcuguggcgguauugaaauacaauggcauaauaacagacacuaucaggaguuggaggaauaacauacugaggacccaagagucugaaugugcauguguaaauggcucuugcuuuacugugaugacagauggaccaaguaaugggcaggcaucauauaagauuuucaaaauagaaaaagggaaaguaguuaagucagucgaauugaaugcuccuaauuaucacuaugaggaaugcuccuguuauccugaugcuggcgaaaucacaugugugugcagggauaauuggcauggcucaaacaggccauggguaucuuucaaucagaauuuggaguaucaaauaggauacauuugcaguggaguuuucggagacaauccacgaccaaaugacggaacagguaguugugguccaguguccucuaacggggcauaugggguaaaaggguucucauuuaaauacggcaauggugucuggaucgggaggaccaaaagcacucauuccaggagcggcuuugaaaugauuugggauccaaacggguggacuggaacggacagugaauuuucgaugaaacaagauauaguagcaauaacugauuggucaggauacagcgggaguuuuguccagcacccagaacugacaggauuagauugcauaagaccuugcuucuggguugaguuaaucagagggcggcccaaagagagcacaauuuggacuagugggagcagcauaucuuuuugugguguaaauagugacacugugaguuggucuuggccagacggugcugaguugccauucaccauugacaaguag

SEQ ID NO: 55979 - RNA, 1410 nt, Artificial Sequence
  derived and/or modified CDS sequence (wt) from neuraminidase__InfluenzaA__AGY14472
augaauccaaaucaaaagauaauaacgauuggcucuguuucucucacccuugccacaauaugcuuccuuaugcaaauagccaucuugguaacuacuguaacauugcauuucaagcaauaugaaugcaacuccaccccaaacaaccaaguaaugcugugugagccaacaguaauagaaagaaauauaacaaagauaguguaucugaccaacaccacuguagagaaggaaauaugccccaaaccagcagaauacagaaauuggucaaagccacaauguaaaaucacuggauuugcuccuuuuucuaaggacaacucaauccggcuuucugccgguggagacauuuggguaacaagagaaccuuauguaucaugcgauccuaacaaguguuaucaauuugcccuuggacagggaacaacauuaaauaacaggcauucaaaugacacagugcaugauagaaccccuuaucgaacccuauugaugaaugaguuggguaucccauuucauuugggaaccaaacaagugugcauagcaugguccagcucaaguugucacgacggaaaagcauggcugcacguuuguguaacugggcaugauaaaaaugcaacugccagcuucauuuacgaugggaagcuuguagauaguauuggcucaugguccaaaaaaauccuuaggacccaggagucggaaugcguuugcaucaauggaacuuguacagugguaaugacugaugggagugcuucaggaagagcugauaccaaaauauuauuuauugaggaggggaaaaucauucauauuagccaauugucaggaagugcucagcaugucgaggaauguucuuguuacccucgauauccugguauuagaugcgucugcagagacaacuggaaaggcuccaauaggcccauuguagauauaaauguaaaggauuauagcauuacuuccaguuaugugugcucaggacuuguuggagacacacccagaaaaaccgacaacuccagcaguagccauugccugaauccuaacaaugaggaagguggccauggagugaaaggcugggccuuugaugauggaaaugacguguggaugggaagaacgaucagcgagaaauuccgcucagguuaugaaaccuucaaagucaucaaaggcugguccaaaccuaacuccaaauugcagauaaauaggcaagucauaguugacagagauaauagguccgguuacucugguauuuuuucuguugaaggcaaaagcugcaucaaucgguguuuuuauguggaauugauaagaggaaggaaacgggaagcugaagucugguggaccucaaacagcauuguuguguuuuguggcacaucaggaacauauggaacaggcucauggccugauggggcggacaucaaucucaugccuauauaa

SEQ ID NO: 55980 - RNA, 1398 nt, Artificial Sequence
  derived and/or modified CDS sequence (wt) from neuraminidase__InfluenzaA__AHA11501
augaauccaaaucagaagauucuaugcacuucagccacugcuaucauaauaggcgcaaucgcaguacucauuggaauagcaaaccuaggauugaacauaggacugcaucuaaaaccgggcugcaauugcucacacucacaaccugaaacaaccaacacaagccaaacaauaauaaacaacuauuauaaugaaacaaacaucaccaacauccaaauggaagagagaacaagcaggaauuucaauaacuuaacuaaagggcucuguacuauaaauucauggcacauauaugggaaagacaaugcaguaagaauuggagagagcucggauguuuuagucacaagagaacccuauguuucaugcgacccagaugaaugcagguucuaugcucucagccaaggaacaacaaucagagggaaacacucaaacggaacaauacacgauaggucccaguaucgcgcccugauaagcuggccacuaucaucaccgcccacaguguacaacagcaggguggaaugcauuggguggucaaguacuaguugccaugauggcaaauccaggaugucaauauguauaucaggaccaaacaacaaugcaucugcaguaguaugguacaacagaaggccuguugcagaaauuaacacaugggcccgaaacauacuaagaacacaggaaucugaauguguaugccacaacggcguaugcccaauaguguucaccgaugggucugccacuggaccugcagacacaagaauauacuauuuuaaagaggggaaaauauuggaaugggagucucugacuggaacugcuaagcauauagaagaaugcucauguuacggagaacgaacaggaauuaccugcacaugcagggacaauuggcagggcucaaauagaccagugauucagauagacccaguagcaaugacacacacuagucaauauauaugcaguccuguucuuacagacacuccccgaccgaaugacccaaauauagguaaguguaaugacccuuauccagguaaugacaacaauggagucaagggauucucauaccuggauggggcuaacacuuggcuagggaggacaauaagcacagccucgaggucuggauacgagauguuaaaagugccaaaugcauugacagaugauagaucaaagcccauucaaggucagacaauuguauuaaacgcugacuggagugguuacaguggaucuuucauggacuauugggcugaaggggacugcuaucgagcguguuuuuauguggaguugauacguggaagacccaaggaggauaaagugugguggaccagcaauaguauaguaucgauguguuccaguacagaauuccugggacaauggaacuggccugauggggcuagaauagaguacuuccucuaa

SEQ ID NO: 55981 - RNA, 1410 nt, Artificial Sequence
  derived and/or modified CDS sequence (wt) from neuraminidase__InfluenzaA__AHC57462
augaauccaaaucaaaagauaauaacgauuggcucuguuucucucaccauuuccacaauaugcuucuucaugcaaauugccaucuugauaacuacuguaacauugcauuucaagcaauaugaauucaacucccccccaaacaaccaagugaugcugugugaaccaacaauaauagaaagaaacauaacagagauaguguaucugaccaacaccaccauagagaaggaaauaugccccaaacuagcagaauacagaaauuggucaaagccgcaaugugacauuacaggauuugcaccuuuuucuaaggacaauucgauuaggcuuuccgcugguggggacaucugggugacaagagaaccuuaugugucaugugauccugacaaguguuaucaauuugcccuuggacagggaacaacacuaaacaacgugcauucaaauaacacaguacgugauaggaccccuuaucggacccuauugaugaaugaguuagguguuccuuuucaucuggggaccaagcaagugugcauagcaugguccagcucaagcugucacgauggaaaagcauggcugcauguuuguauaacgggggaugauaaaaaugcaacugcuagcuucauuuacaaugggaggcuuguagauaguguuguuucaugguccaaagaaauccucaggacccaggagucagaaugcguuugcaucaauggaacuuguacaguaguaaugacugaugggagugcuucaggaaaagcugauacuaaaauacuauucauugaggaggggaaaaucguucauacuagcacauugucaggaagugcucagcaugucgaggagugcucuugcuauccucgauauccuggugucagaugugucugcagagacaacuggaaaggcuccaauaggcccaucguagauauaaacauaaaggaucauagcauuguuuccaguuaugugugcucaggacuuguuggagacacacccagaaaaaacgacagcuccagcaguagccauuguugggauccuaacaaugaagaagguggucauggagugaaaggcugggccuuugaugauggaaaugacguguggaugggaagaacgaucaacgagacgucacguuuaggguaugaaaccuucaaagucauugaaggcugguccaacccuaaguccaaauugcagguaaauaggcaagucauaguugacagaggugauagguccgguuauucugguauuuucucuguugaaggcaaaagcugcaucaaucggugcuuuuauguggaguugauuaggggaagaaaagaggaaacugaagucuuguggaccucaaacaguauuguuguguuuuguggcaccucagguacauauggaacaggcucauggccugauggggcggaccucaaucucaugccuauauaa

SEQ ID NO: 55982 - RNA, 1410 nt, Artificial Sequence
  derived and/or modified CDS sequence (wt) from neuraminidase__InfluenzaA__AHC57490
augaauccaaaucaaaagauaauaacgauuggcucuguuucucucaccauuuccacaauaugcuucuucaugcaaauugccaucuugauaaccacuguaacauugcauuucaagcaauaugaauucaacucccccccaaacaaccaagugaugcugugugaaccaacaauaauagaaagaaacauaacagagauaguguaucugaccaacaccaccauagagaaggaaauaugccccaaacuagcagaauacagaaauuggucaaagccgcaaugugacauuacaggauuugcaccuuuuucuaaggacaauucgauuaggcuuuccgcugguggggacaucugggugacaagagaaccuuaugugucaugcgauccugacaaguguuaucaauuugcccuuggacagggaacaacacuaaacaacgugcauucaaauaacacaguacgugauaggaccccuuaucggacccuauugaugaaugaguuagguguuccuuuucaucuggggaccaagcaagugugcauagcaugguccagcucaaguugucacgauggaaaagcauggcugcauguuuguauaacgggggaugauaaaaaugcaacugcuagcuucauuuacaaugggaggcuuguagauaguguuguuucaugguccaaagaaauccucaggacccaggagucagaaugcguuuguaucaauggaacuuguacaguaguaaugacugaugggagugcuucaggaaaagcugauacuaaaauacuauucauugaggaggggaaaauuguucauacuagcacauugucaggaagugcucagcaugucgaggagugcucuugcuauccucgauauccuggugucagaugugucugcagagacaacuggaaaggcuccaauaggcccaucguagauauaaacauaaaggaucauagcauuguuuccaguuauguguguucaggacuuguuggagacacacccagaaaaaacgacagcuccagcaguagccauuguuuggauccuaacaaugaagaagguggucauggagugaaaggcugggccuuugaugauggaaaugacguguggaugggaagaacgaucaacgagacgucacguuuaggguaugaaaccuucaaagucauugaaggcugguccaacccuaaguccaaauugcagauaaauaggcaagucauaguugacagagguaauagguccgguuauucugguauuuucucuguugaaggcaaaagcugcaucaaucggugcuuuuauguggaguugauuaggggaagaaaagaggaaacugaagucuuguggaccucaaacaguauuguuguguuuuguggcaccucagguacauauggaacaggcucauggccugauggggcggaccucaaucucaugccuauauaa

SEQ ID NO: 55983 - RNA, 1410 nt, Artificial Sequence
  derived and/or modified CDS sequence (wt) from neuraminidase__InfluenzaA__AHC57514
augaacccaaaucaaaagauaauaacgauuggcucuguuucucucaccauuuccacaauaugcuucuucaugcaaauugccaucuugauaacuacuguaacauugcauuucaagcaauaugaauucuacucccccccaaacaaccaagugaugcugugugaaccaacaauaauagaaagaaacauaacagagauaguguaucugaccaacaccaccauagagaaggaaauaugccccaaacuagcagaauacagaaauuggucaaagccgcaaugugacauuacaggauuugcaccuuuuucuaaggacaauucgauuaggcuuuccgcugguggggacaucugggugacaagagaaccuuaugugucaugcgauccugacaaguguuaucaauuugcccuuggacagggaacaacacuaaacaacgugcauucaaauaacacaguacgugauaggaccccuuaucggacccuauugaugaaugaguuagguguuccuuuucaucuggggaccaagcaagugugcauagcaugguccagcucaaguugucacgauggaaaagcauggcugcauguuuguauaacgggggaugauaaaaaugcaacugcuagcuucauuuacaaugggaggcuuguagauaguguuguuucaugguccaaagaaauccucaggacccaggagucagaaugcguuuguaucaauggaacuuguacaguaguaaugacugaugggagugcuucaggaaaagcugauacuaaaauacuauucauugaggaggggaaaaucguucauacuagcacauugucaggaagugcucagcaugucgaggagugcucuugcuauccucgauauccuggugucagaugugucugcagagacaacuggaaaggcuccaauaggcccaucguugauauaaacauaaaggaucauagcauuguuuccaguuauguguguucaggacuuguuggagacacacccagaaaaaacgacagcuccagcaguagccauuguuuggauccuaacaaugaagaagguggucauggagugaaaggcugggccuuugaugauggaaaugacguguggaugggaagaacgaucaacgagacgucacgcuuaggguaugaaaccuucaaagucauugaaggcugguccaacccuaaguccaaauugcagauaaauaggcaagucauaguugacagagguaauagguccgguuauucugguauuuucucuguugaaggcaagagcugcaucaaucggugcuuuuauguggaguugauuaggggaagaaaagaggaaacugaagucuuguggaccucaaacaguauuguuguguuuuguggcaccucagguacauauggaacaggcucauggccugauggggcggaccucaaucucaugccuauauaa

SEQ ID NO: 55984 - RNA, 1410 nt, Artificial Sequence
  derived and/or modified CDS sequence (wt) from neuraminidase__InfluenzaA__AHC57526
augaacccaaaucaaaagauaauaacgauuggcucuguuucucucaccauuuccacaauaugcuucuucaugcaaauugccaucuugauaacuacuguaacauugcauuucaagcaauacgaauucuacucccccccaaacaaccaagugaugcugugugaaccaacaauaauagaaagaaacauaacagagauaguguaucugaccaacaccaccauagagaaggaaauaugccccaaacuagcagaauacagaaauuggucaaagccgcaaugugacauuacaggauuugcaccuuuuucuaaggacaauucgauuaggcuuuccgcugguggggacaucugggugacaagagaaccuuaugugucaugcgauccugacaaguguuaucaauuugcccuuggacagggaacaacacuaaacaacgugcauucaaauaacacaguacgugauaggaccccuuaucggacccuauugaugaaugaguuagguguuccuuuucaucuggggaccaagcaagugugcauagcaugguccagcucaaguugucacgauggaaaagcauggcugcauguuuguauaacgggggaugauaaaaaugcaacugcuagcuucauuuacaaugggaggcuuguagauaguguuguuucaugguccaaagaaauccucaggacccaggagucagaaugcguuuguaucaauggaacuuguacaguaguaaugacugaugggagugcuucaggaaaagcugauacuaaaauacuauucauugaggaggggaaaaucguucauacuagcacauugucaggaagugcucagcaugucgaggagugcucuugcuauccucgauauccuggugucagaugugucugcagagacaacuggaaaggcuccaauaggcccaucguugauauaaacauaaaggaucauagcauuguuuccaguuauguguguucaggacuuguuggagacacacccagaaaaaacgacagcuccagcaguagccauuguuuggauccuaacaaugaagaagguggucauggagugaaaggcugggccuuugaugauggaaaugacguguggaugggaagaacgaucaacgagacgucacgcuuaggguaugaaaccuucaaagucauugaaggcugguccaacccuaaguccaaguugcagauaaauaggcaagucauaguugacagagguaauagguccgguuauucugguauuuucucuguugaaggcaagagcugcaucaaucggugcuuuuauguggaguugauuaggggaagaaaagaggaaacugaagucuuguggaccucaaacaguauuguuguguuuuguggcaccucagguacauauggaacaggcucauggccugauggggcggaccucaaucucaugccuauauaa

SEQ ID NO: 55985 - RNA, 1410 nt, Artificial Sequence
  derived and/or modified CDS sequence (wt) from neuraminidase__InfluenzaA__AHC57806
augaacccaaaucaaaagauaauaacgauuggcucuguuucucucaccauuuccacaauaugcuucuucaugcaaauugccaucuugauaacuacuguaacauugcauuucaagcaauaugaauucuacucccccccaaacaaccaagugaugcugugugaaccaacaauaauagaaagaaacauaacagagauaguguaucugaccaacaccaccauagagaaggaaauaugccccaaacuagcagaauacagaaauuggucaaagccgcaaugugacauuacaggauuugcaccuuuuucuaaagacaauucgauuaggcuuuccgcugguggggacaucugggugacaagagaaccuuaugugucaugcgauccugacaaguguuaucaauuugcccuuggacagggaacaacacuaaacaacgugcauucaaauaacacaguacgugauaggaccccuuaucggacccuauugaugaaugaguuagguguuccuuuucaucuggggaccaagcaagugugcauagcaugguccagcucaaguugucacgauggaaaagcauggcugcauguuuguauaacgggggaugauaaaaaugcaacugcuagcuucauuuacaaugggaggcuuguagauaguguuguuucaugguccaaagaaauccucaggacccaggagucagaaugcguuuguaucaauggaacuuguacaguaguaaugacugaugggagugcuucaggaaaagcugauacuaaaauacuauucauugaggaggggaaaaucguucauacuagcacauugucaggaagugcucagcaugucgaggagugcucuugcuauccucgauauccuggugucagaugugucugcagagacaacuggaaaggcuccaauaggcccaucguugauauaaacauaaaggaucauagcauuguuuccaguuauguguguucaggacuuguuggagacacacccagaaaaaacgacagcuccagcaguagccauuguuuggauccuaacaaugaagaagguggucauggagugaaaggcugggccuuugaugauggaaaugacguguggaugggaaggacgaucaacgagacgucacgcuuaggguaugaaaccuucaaagucauugaaggcugguccaacccuaaguccaaauugcagauaaauaggcaagucauaguugacagagguaauagguccgguuauucugguauuuucucuguugaaggcaagagcugcaucaaucggugcuuuuauguggaguugauuaggggaagaaaagaggaaacugaagucuuguggaccucaaacaguauuguuguguuuuguggcaccucagguacauauggaacaggcucauggccugauggggcagaccucaaucucaugccuauauaa

SEQ ID NO: 55986 - RNA, 1410 nt, Artificial Sequence; identical to SEQ ID NO: 55983
  derived and/or modified CDS sequence (wt) from neuraminidase__InfluenzaA__AHC57818

SEQ ID NO: 55987 - RNA, 1410 nt, Artificial Sequence
  derived and/or modified CDS sequence (wt) from neuraminidase__InfluenzaA__AHC57830
augaauccaaaucaaaagauaauaacgauuggcucuguuucucucaccauuuccacaauaugcuucuucaugcaaauugccaucuugauaacuacuguaacauugcauuucaagcaauaugaauucaacucccccccaaacaaccaagugaugcugugugaaccaacaauaauagaaagaaacauaacagagauaguguaucugaccaacaccaccauagagaaggaaauaugccccaaacuagcagaauacagaaauuggucaaagccgcaaugugacauuacaggauuugcaccuuuuucuaaggacaauucgauuaggcuuuccgcugguggggacaucugggugacaagagaaccuuaugugucaugcgauccuaacaaguguuaucaauuugcccuuggacagggaacaacacuaaacaacgugcauucaaauaacacaguacgugauaggaccccuuaucggacccuauugaugaaugaguuagguguuccuuuucaucuggggaccaagcaagugugcauagcaugguccagcucaaguugucacgauggaaaagcauggcugcauguuuguauaacgggggaugauaaaaaugcaacugcuagcuucauuuacaaugggaagcuuguagauaguguuguuucaugguccaaagaaauccucaggacccaggagucagaaugcguuuguaucaauggaacuuguacaguaguaaugacugaugggagugcuucaggaaaagcugauacuaaaauacuauucauugaggaggggaaaaucguucauacuagcacauugucaggaagugcucagcaugucgaggagugcucuugcuauccucgauauccuggugucagaugugucugcagagacaacuggaaaggcuccaauaggcccaucguagauauaaacauaaaggaucauagcauuguuuccaguuauguguguucaggacuuguuggagacacacccagaaaaaacgacagcuccagcaguagccauuguuuggauccuaacaaugaagaagguggucauggagugaaaggcugggccuuugaugauggaaaugacguguggaugggaagaacgaucaacgagacuucacguuuaggguaugaaaccuucaaagucauugaaggcugguccaacccuaaguccaaauugcagauaaauaggcaagucauaguugacagagguaauagguccgguuauucugguauuuucucuguugaaggcaaaagcugcaucaaucggugcuuuuauguggaguugauuaggggaagaaaagaggaaacugaagucuuguggaccucaaacaguauuguuguguuuuguggcaccucagguacauauggaacaggcucauggccugauggggcggaccucaaucucaugccuauauaa

SEQ ID NO: 55988 - RNA, 1410 nt, Artificial Sequence; identical to SEQ ID NO: 55987
  derived and/or modified CDS sequence (wt) from neuraminidase__InfluenzaA__AHC57971

SEQ ID NO: 55989 - RNA, 1410 nt, Artificial Sequence; identical to SEQ ID NO: 55983
  derived and/or modified CDS sequence (wt) from neuraminidase__InfluenzaA__AHC57984

SEQ ID NO: 55990 - RNA, 1410 nt, Artificial Sequence
  derived and/or modified CDS sequence (wt) from neuraminidase__InfluenzaA__AHC57996
augaacccaaaucaaaagauaauaacgauuggcucuguuucucucaccauuuccacaauaugcuucuucaugcaaauugccaucuugauaacuacuguaacauugcauuucaagcaauaugaauucuacucccccccaaacaaccaagugaugcugugugaaccaacaauaauagaaagaaacauaacagagauaguguaucugaccaacaccaccauagagaaggaaauaugccccaaacuagcagaauacagaaauuggucaaagccgcaaugugacauuacaggauuugcaccuuuuucuaaggacaauucgauuaggcuuuccgcugguggggacaucugggugacaagagaaccuuaugugucaugcgauccugacaaguguuaucaauuugcccuuggacagggaacaacacuaaacaacgugcauucaaauaacacaguacgugauaggaccccccaucggacccuauugaugaaugaguuagguguuccuuuucaucuggggaccaagcaagugugcauagcaugguccagcucaaguugucacgauggaaaagcauggcugcauguuuguauaacgggggaugauaaaaaugcaacugcuagcuucauuuacaaugggaggcuuguagauaguguuguuucaugguccaaagaaauccucaggacccaggagucagaaugcguuuguaucaauggaacuuguacaguaguaaugacugaugggagugcuucaggaaaagcugauacuaaaauacuauucauugaggaggggaaaaucguucauacuagcacauugucaggaagugcucagcaugucgaggagugcucuugcuauccucgauauccuggugucagaugugucugcagagacaacuggaaaggcuccaauaggcccaucguugauauaaacauaaaggaucauagcauuguuuccaguuauguguguucaggacuuguuggagacacacccagaaaaaacgacagcuccagcaguagccauuguuuggauccuaacaaugaagaagguggucauggagugaaaggcugggccuuugaugauggaaaugacguguggaugggaagaacgaucaacgagacgucacgcuuaggguaugaaaccuucaaagucauugaaggcugguccaacccuaaguccaaauugcagauaaauaggcaagucauaguugacagagguaauagguccgguuauucugguauuuucucuguugaaggcaagagcugcaucaaucggugcuuuuauguggaguugauuaggggaagaaaagaggaaacugaagucuuguggaccucaaacaguauuguuguguuuuguggcaccucagguacauauggaacaggcucauggccugauggggcggaccucaaucucaugccuauauaa

SEQ ID NO: 55991 - RNA, 1410 nt, Artificial Sequence
  derived and/or modified CDS sequence (wt) from neuraminidase__InfluenzaA__AHC58008
augaauccaaaucaaaagauaauaacgauuggcucuguuucucucaccauuuccacaauaugcuucuucaugcaaauugccaucuugauaacuacuguaacauugcauuucaagcaauaugaauucaacucccccccaaacaaccaagugaugcugugugaaccaacaauaauagaaagaaacaucacagagauaguguaucugaccaacaccaccauagagaaggaaauaugccccaaaccagcagaauacagaaauuggucaaaaccgcaaugugacauuacaggauuugcaccuuuuucuaaggacaauucgauuaggcuuuccgcugguggggacaucugggugacaagagaaccuuaugugucaugcgauccugacaaguguuaucaauuugcccuuggacagggaacaacacuaaacaaugugcauucaaauaacacaguacgugauaggaccccuuaucggacuuuauugaugaaugaguuagguguuccuuuucaucuggggaccaagcaagugugcauagcaugguccagcucaaguugucacgauggaaaagcauggcugcauguuuguauaacgggggaugauaaaaaugcaacugcuagcuucauuuacaaugggaggcuuguagauaguguuguuucaugguccaaagaaauucucaggacccaggagucagaaugcguuuguaucaauggaacuuguacaguaguaaugacugauggaagugcuucaggaaaagcugauacuaaaauacuauucauugaggaggggaaaaucguucauacuagcacauugucaggaagugcucagcaugucgaggagugcucuugcuauccucgauauccuggugucagaugugucugcagagacaacuggaaaggcuccaauaggcccaucguagauauaaacauaaaggaucauagcauugucuccaguuauguguguucaggacuuguuggagacacacccagaaaaaacgacagcuccagcaguagccauuguuuggauccuaacaaugaagaagguggucauggagugaaaggcugggccuuugaugauggaaaugacguguggaugggaagaacaaucaacgagacgucacgcuuaggguaugaaaccuucaaagucauugaaggcugguccaacccuaaguccaaauugcagauaaauaggcaagucauaguugacagaggugauagguccgguuauucugguauuuucucuguugaaggcaaaagcugcaucaaucggugcuuuuauguggaguugauuaggggaagaaaagaggaaacugaagucuuguggaccucaaacaguauuguuguguuuuguggcaccucagguacauauggaacaggcucauggccugauggggcggaccucaaucucaugccuauauaa

SEQ ID NO: 55992 - RNA, 1410 nt, Artificial Sequence
  derived and/or modified CDS sequence (wt) from neuraminidase__InfluenzaA__AHC58020
augaauccaaaucaaaagauaauaacgauuggcucuguuucucucaccauuuccacaauaugcuucuucaugcaaauugccaucuugauaacuacuguaacauugcauuucaagcaauaugaauucaacucccccccaaacaaccaagugaugcugugugaaccaacaauaauagaaagaaacauaacagagauaguguaucugaccaacaccaccauagagaaggaaauaugccccaaacuagcagaauacagaaauuggucaaagccgcaaugugacauuacaggauuugcaccuuuuucuaaggacaauucgauuaggcuuuccgcugguggggacaucugggugacaagagaaccuuaugugucaugcgauccugacaaguguuaucaauuugcccuuggacagggaacaacacuaaacaacgugcauucaaauaacacaguacgugauaggaccccuuaucggacccuauugaugaaugaguuagguguuccuuuucaucuggggaccaagcaagugugcauagcaugguccagcucaaguugucacgauggaaaagcauggcugcauguuuguauaacgggggaugauaaaaaugcaacugcuagcuucauuuacaaugggaggcuuguagauaguguuguuucaugguccaaagaaauccucaggacccaggagucagaaugcguuuguaucaauggaacuuguacaguaguaaugacugaugggagugcuucaggaaaagcugauacuaaaauacuauucauugaggaggggaaaaucguucauacuagcacauugucaggaagugcucagcaugucgaggagugcucuugcuauccucgauauccuggugucagaugugucugcagagacaacuggaaaggcuccaauaggcccaucguagauauaaacauaaaggaucauagcauuguuuccaguuauguguguucaggacuuguuggagacacacccagaaaaaacgacagcuccagcaguagccauuguuuggauccuaacaaugaagaagguggucauggagugaaaggcugggccuuugaugauggaaaugacguguggaugggaagaacgaucaacgagacgucacguuuaggguaugaaaccuucaaagucauugaaggcugguccaacccuaaguccaaauugcagauaaauaggcaaguuauaguugacagagguaauagguccgguuauucugguauuuucucuguugaaggcaaaagcugcaucaaucggugcuuuuauguggaguugauuaggggaagaaaagaggaaacugaagucuuguggaccucaaacaguauuguuguguuuuguggcaccucagguacauauggaacaggcucauggccugauggggcggaccucaaucucaugccuauauaa

SEQ ID NO: 55993 - RNA, 1410 nt, Artificial Sequence
  derived and/or modified CDS sequence (wt) from neuraminidase__InfluenzaA__AHC58032
augaauccaaaucaaaagauaauaacgauuggcucuguuucucucaccauuuccacaauaugcuucuucaugcaaauugccaucuugauaacuacuguaacauuacauuucaagcaauaugaauucaacucccccccaaacaaccaagugaugcugugugaaccaacaauaauagaaagaaacauaacagagauaguguaucugaccaacaccaccauagagaaggaaauaugccccaaacuagcagaauacagaaauuggucaaagccgcaaugugacauuacaggauuugcaccuuuuucuaaggacaauucgauuaggcuuuccgcugguggggacaucugggugacaagagaaccuuaugugucaugcgauccuaacaaguguuaucaauuugcccuuggacagggaacaacacuaaacaacgugcauucaaauaacacaguacgugauaggaccccuuaucggacccuauugaugaaugaguuagguguuccuuuucaucuggggaccaagcaagugugcauagcaugguccagcucaaguugucacgauggaaaagcauggcugcauguuuguauaacgggggaugauaaaaaugcaacugcuagcuucauuuacaaugggaagcuuguagauaguguuguuucaugguccaaagaaauccucaggacccaggagucagaaugcguuuguaucaauggaacuuguacaguaguaaugacugaugggagugcuucaggaaaagcugauacuaaaauacuauucauugaggaggggaaaaucguucauacuagcacauugucaggaagugcucagcaugucgaggagugcucuugcuauccucgauauccuggugucagaugugucugcagagacaacuggaaaggcuccaauaggcccaucguagauauaaacauaaaggaucauagcauuguuuccaguuauguguguucaggacuuguuggagacacacccagaaaaaacgacagcuccagcaguagccauuguuugaauccuaacaaugaagaagguggucauggagugaaaggcugggccuuugaugauggaaaugacguguggaugggaagaacgaucaacgagacuucacguuuaggguaugaaaccuucaaagucauugaaggcugguccaacccuaaguccaaauugcagauaaauaggcaagucauaguugacagagguaauagguccgguuauucugguauuuucucuguugaaggcaaaagcugcaucaaucggugcuuuuauguggaguugauuaggggaagaaaagaggaaacugaagucuuguggaccucaaacaguauuguuguguuuuguggcaccucagguacauauggaacaggcucauggccugauggggcggaccucaaucucaugccuauauaa

SEQ ID NO: 55994 - RNA, 1410 nt, Artificial Sequence
  derived and/or modified CDS sequence (wt) from neuraminidase__InfluenzaA__AHC58053
augaauccaaaucaaaagauaauaacgauuggcucuguuucucucaccauuuccacaauaugcuucuucaugcaaauugccaucuugauaacuacuguaacauugcauuucaagcaauaugaauucaacucccccccaaacaaccaagugaugcugugugaaccaacaauaauagaaagaaacaucacagagauaguguaucuaaccaacaccaccauagagaaggaaauaugccccaaaccagcagaauacagaaauuggucaaaaccgcaaugugacauuacaggauuugcaccuuuuucuaaggacaauucgauuaggcuuuccgcugguggggacaucugggugacaagagaaccuuaugugucaugcgauccugacaaguguuaucaauuugcccuuggacagggaacaacacuaaacaaugugcauucaaauaacacaguacgugauaggaccccuuaucggacuuuauugaugaaugaguuagguguuccuuuucaucuggggaccaagcaagugugcauagcaugguccagcucaaguugucacgauggaaaagcauggcugcauguuuguauaacgggggaugauaaaaaugcaacugcuagcuucauuuacaaugggaggcuuguagauaguguuguuucaugguccaaagaaauucucaggacccaggagucagaaugcguuuguaucaauggaacuuguacaguaguaaugacugauggaagugcuucaggaaaagcugauacuaaaauacuauucauugaggaggggaaaaucguucauacuagcacauugucaggaagugcucagcaugucgaggagugcucuugcuauccucgauauccuggugucagaugugucugcagagacaacuggaaaggcuccaauaggcccaucguagauauaaacauaaaggaucauagcauugucuccaguuauguguguucaggacuuguuggagacacacccagaaaaaacgacagcuccagcaguagccauuguuuggauccuaacaaugaagaagguggucauggagugaaaggcugggccuuugaugauggaaaugacguguggaugggaagaacaaucaacgagacgucacgcuuaggguaugaaaccuucaaagucauugaaggcugguccaacccuaaguccaaauugcagauaaauaggcaagucauaguugacagaggugauagguccgguuauucugguauuuucucuguugaaggcaaaagcugcaucaaucggugcuuuuauguggaguugauuaggggaagaaaagaggaaacugaagucuuguggaccucaaacaguauuguuguguuuuguggcaccucagguacauauggaacaggcucauggccugauggggcggaccucaaucucaugccuauauaa

SEQ ID NO: 55995 - RNA, 1410 nt, Artificial Sequence
  derived and/or modified CDS sequence (wt) from neuraminidase__InfluenzaA__AHC58077
augaacccaaaucaaaagauaauaacgauuggcucuguuucucucaccauuuccacaauaugcuucuucaugcaaauugccaucuugauaacuacuguaacauugcauuucaagcaauaugaauucuacucccccccaaacaaccaagugaugcugcgugaaccaacaauaauagaaagaaacauaacagagauaguguaucugaccaacaccaccacagagaaggaaauaugccccaaacuagcagaauacagaaauuggucaaagccgcaaugugacauuacaggauuugcaccuuuuucuaaggacaauucgauuaggcuuuccgcugguggggacaucugggugacaagagaaccuuaugugucaugcgauccugacaaguguuaucaauuugcccuuggacagggaacaacacuaaacaacgugcauucaaauaacacaguacgugauaggaccccuuaucggacccuauugaugaaugaguuagguguuccuuuucaucuggggaccaagcaagugugcauagcaugguccagcucaaguugucacgauggaaaagcauggcugcauguuuguauaacgggggaugauaaaaaugcaacugcuagcuucauuuacaaugggaggcuuguagauaguguuguuucaugguccaaagaaauccucaggacccaggagucagaaugcguuuguaucaauggaacuuguacaguaguaaugacugaugggagugcuucaggaaaagcugauacuaaaauacuauucauugaggaggggaaaaucguucauacuagcacauugucaggaagugcucagcaugucgaggagugcucuugcuauccucgauauccuggugucagaugugucugcagagacaacuggaaaggcuccaauaggcccaucguugauauaaacauaaaggaucauagcauuguuuccaguuauguguguucaggacuuguuggagacacacccagaaaaaacgacagcuccagcaguagccauuguuuggauccuaacaaugaagaagguggucauggagugaaaggcugggccuuugaugauggaaaugacguguggaugggaagaacgaucaacgagacgucacgcuuaggguaugaaaccuucaaagucauugaaggcugguccaacccuaaguccaaauugcagauaaauaggcaagucauaguugacagagguaauagguccgguuauucugguauuuucucuguugaaggcaagagcugcaucaaucggugcuuuuauguggaguugauuaggggaagaaaagaggaaacugaagucuuguggaccucaaacaguauuguuguguuuuguggcaccucagguacauauggaacaggcucauggccugauggggcggaccucaaucucaugccuauauaa

SEQ ID NO: 55996 - RNA, 1410 nt, Artificial Sequence
  derived and/or modified CDS sequence (wt) from neuraminidase__InfluenzaA__AHC58089
augaauccaaaucaaaagauaauaacgauuggcucuguuucucucaccauuuccacaauaugcuucuucaugcaaauugccaucuugauaacuacuguaacauuacauuucaagcaauaugaauucaacucccccccaaacaaccaagugaugcugugugaaccaacaauaauagaaagaaacauaacagagauaguguaucugaccaacaccaccauagagaaggaaauaugccccaaacuagcagaauacagaaauuggucaaagccucaaugugacauuacaggauuugcaccuuuuucuaaggacaauucgauuaggcuuuccgcugguggggacaucugggugacaagagaaccuuaugugucaugcgauccuaacaaguguuaucaauuugcccuuggacagggaacaacacuaaacaacgugcauucaaauaacacaguacgugauaggaccccuuaucggacccuauugaugaaugaguuagguguuccuuuucaucuggggaccaagcaagugugcauagcaugguccagcucaaguugucacgauggaaaagcauggcugcauguuuguauaacgggggaugauaaaaaugcaacugcuagcuucauuuacaaugggaagcuuguagauaguguuguuucaugguccaaagaaauccucaggacccaggagucagaaugcguuuguaucaauggaacuuguacaguaguaaugacugaugggagugcuucaggaaaagcugauacuaaaauacuauucauugaggaggggaaaaucguucauacuagcacauugucaggaagugcucagcaugucgaggagugcucuugcuauccucgauauccuggugucagaugugucugcagagacaacuggaaaggcuccaauaggcccaucguagauauaaacauaaaggaucauagcauuguuuccaguuauguguguucaggacuuguuggagacacacccagaaaaaacgacagcuccagcaguagccauuguuuggauccuaacaaugaagaagguggucauggagugaaaggcugggccuuugaugauggaaaugacguguggaugggaagaacgaucaacgagacuucacguuuaggguaugaaaccuucaaagucauugaaggcugguccaacccuaaguccaaauugcagauaaauaggcaagucauaguugacagagguaauagguccgguuauucugguauuuucucuguugaaggcaaaagcugcaucaaucggugcuuuuauguggaguugauuaggggaagaaaagaggaaacugaagucuuguggaccucaaacaguauuguuguguuuuguggcaccucagguacauauggaacaggcucauggccugauggggcggaccucaaucucaugccuauauaa

SEQ ID NO: 55997 - RNA, 1410 nt, Artificial Sequence; identical to SEQ ID NO: 55983
  derived and/or modified CDS sequence (wt) from neuraminidase__InfluenzaA__AHC58101

SEQ ID NO: 55998 - RNA, 1410 nt, Artificial Sequence
  derived and/or modified CDS sequence (wt) from neuraminidase__InfluenzaA__AHC58113
augaacccaaaucaaaagauaauaacgauuggcucuguuucucucaccauuuccacaauaugcuucuucaugcaaauugccaucuugauaacuacuguaacauugcauuucaagcaauaugaauucuacucccccccaaacaaccaagugaugcugugugaaccaacaauaauagaaagaaacauaacagagauaguguaucugaccaacaccaccauagagaaggaaauaugccccaaacuagcagaauacagaaauuggucaaagccgcaaugugacauuacaggauuugcaccuuuuucuaaggacaauucgauuaggcuuuccgcugguggggacaucugggugacaagagaaccuuaugugucaugcgauccugacaaguguuaucaauuugcccuuggacagggaacaacacuaaacaacgugcauucaaauaacacaguacgugauaggaccccuuaucggacccuauugaugaaugaguuagguguuccuuuucaucuggggaccaagcaagugugcauagcaugguccagcucaaguugucacgauggaaaagcauggcugcauguuuguauaacgggggaugauaaaaaugcaacugcuagcuucauuuacaaugggaggcuuguagauaguguuguuucaugguccaaaaaaauccucaggacccaggagucagaaugcguuuguaucaauggaacuuguacaguaguaaugacugaugggagugcuucaggaaaagcugauacuaaaauacuauucauugaggaggggaaaaucguucauacuagcacauugucaggaagugcucagcaugucgaggagugcucuugcuauccucgauauccuggugucagaugugucugcagagacaacuggaaaggcuccaauaggcccaucguugauauaaacauaaaggaucauagcauuguuuccaguuauguguguucaggacuuguuggagacacacccagaaaaaacgacagcuccagcaguagccauuguuuggauccuaacaaugaagaagguggucauggagugaaaggcugggccuuugaugauggaaaugacguguggaugggaagaacgaucaacgagacgucacgcuuaggguaugaaaccuucaaagucauugaaggcugguccaacccuaaguccaaauugcagauaaauaggcaagucauaguugacagagguaauagguccgguuauucugguauuuucucuguugaaggcaagagcugcaucaaucggugcuuuuauguggaguugauuaggggaagaaaagaggaaacugaagucuuguggaccucaaacaguauuguuguguuuuguggcaccucagguacauauggaacaggcucauggccugauggggcggaccucaaucucaugccuauauaa

SEQ ID NO: 55999 - RNA, 1410 nt, Artificial Sequence; identical to SEQ ID NO: 55983
  derived and/or modified CDS sequence (wt) from neuraminidase__InfluenzaA__AHC58129

SEQ ID NO: 56000 - RNA, 1410 nt, Artificial Sequence
  derived and/or modified CDS sequence (wt) from neuraminidase__InfluenzaA__AHC58153
augaacccaaaucaaaagauaauaacgauuggcucuguuucucucaccauuuccacaauaugcuucuucaugcaaauugccaucuugauaacuacuguaacauugcauuucaagcaauaugaauucuacucccccccaaacaaccaagugaugcugugugaaccaacaauaauagaaagaaacauaacagagauaguguaucugaccaacaccaccauagagaaggaaauaugccccaaacuagcagaauacagaaauuggucaaagccgcaaugugacauuacaggauuugcaccuuuuucuaaagacaauucgauuaggcuuuccgcugguggggacaucugggugacaagagaaccuuaugugucaugcgauccugacaaguguuaucaauuugcccuuggacagggaacaacacuaaacaacgugcauucaaauaacacaguacgugauaggaccccuuaucggacccuauugaugaaugaguuagguguuccuuuucaucuggggaccaagcaagugugcauagcaugguccagcucaaguugucacgauggaaaagcauggcugcauguuuguauaacgggggaugauaaaaaugcaacugcuagcuucauuuacaaugggaggcuuguagauaguguuguuucaugguccaaagaaauccucaggacccaggagucagaaugcguuuguaucaauggaacuuguacaguaguaaugacugaugggagugcuucaggaaaagcugauacuaaaauacuauucauugaggaggggaaaaucguucauacuagcacauugucaggaagugcucagcaugucgaggagugcucuugcuauccucgauauccuggugucagaugugucugcagagacaacuggaaaggcuccaauaggcccaucguugauauaaacauaaaggaucauagcauuguuuccaguuauguguguucaggacuuguuggagacacacccagaaaaaacgacagcuccagcaguagccauuguuuggauccuaacaaugaagaagguggucauggagugaaaggcugggccuuugaugauggaaaugacguguggaugggaagaacgaucaacgagacgucacgcuuaggguaugaaaccuucaaagucauugaaggcugguccaacccuaaguccaaauugcagauaaauaggcaagucauaguugacagagguaauagguccgguuauucugguauuuucucuguugaaggcaagagcugcaucaaucggugcuuuuauguggaguugauuaggggaagaaaagaggaaacugaagucuuguggaccucaaacaguauuguuguguuuuguggcaccucagguacauauggaacaggcucauggccugauggggcagaccucaaucucaugccuauauaa

SEQ ID NO: 56001 - RNA, 1410 nt, Artificial Sequence
  derived and/or modified CDS sequence (wt) from neuraminidase__InfluenzaA__AHC58165
augaacccaaaucaaaagauaauaacgauuggcucuguuucucucaccauuuccacaauaugcuucuucaugcaaauugccaucuugauaacuacuguaacauugcauuucaagcaauaugaauucuacucccccccaaacaaccaagugaugcugugugaaccaacaauaauagaaagaaacauaacagagauaguguaucugaccaacaccaccauagagaaggaaauaugccccaaacuagcagaauacagaaauuggucaaagccgcaaugugacauuacaggauuugcaccuuuuucuaaggacaauucgauuaggcuuuccgcugguggggacaucugggugacaagagaaccuuaugugucaugcgauccugacaaguguuaucaauuugcccuuggacagggaacaacacuaaacaacgugcauucaaauaacacaguacgugauaggaccccuuaucggacccuauugaugaaugaguuagguguuccuuuucaucuggggaccaagcaagugugcauagcaugguccagcucaaguugucacgauggaaaagcauggcugcauguuuguauaacgggggaugauaaaaaugcaacugcuagcuucauuuacaaugggaggcuuguagauaguguuguuucaugguccaaagaaauccucaggacccaggagucagaaugcguuuguaucaauggaacuuguacaguaguaaugacugaugggagugcuucaggaaaagcugauacuaaaauacuauucauugaggaggggaaaaucguucauacgagcacauugucaggaagugcucagcaugucgaggagugcucuugcuauccucgauauccuggugucagaugugucugcagagacaacuggaaaggcuccaauaggcccaucguugauauaaacauaaaggaucauagcauuguuuccaguuauguguguucaggacuuguuggagacacacccagaaaaaacgacagcuccagcaguagccauuguuuggauccuaacaaugaagaagguggucauggagugaaaggcugggccuuugaugauggaaaugacguguggaugggaagaacgaucaacgagacgucacgcuuaggguaugaaaccuucaaagucauugaaggcugguccaacccuaaguccaaauugcagauaaauaggcaagucauaguugacagagguaauagguccgguuauucugguauuuucucuguugaaggcaagagcugcaucaaucggugcuuuuauguggaguugauuaggggaagaaaagaggaaacugaagucuuguggaccucaaacaguauuguuguguuuuguggcaccucagguacauauggaacaggcucauggccugauggggcggaccucaaucucaugccuauauaa

SEQ ID NO: 56002 - RNA, 1410 nt, Artificial Sequence
  derived and/or modified CDS sequence (wt) from neuraminidase__InfluenzaA__AHC58177
augaauccaaaucaaaagauaauaacgauuggcucuguuucucucaccauuuccacaauaugcuucuucaugcaaauugccaucuugauaacuacuguaacauuacauuucaagcaauaugaauucaacucccccccaaacaaccaagugaugcugugugaaccaacaauaauagaaagaaacauaacagagauaguguaucugaccaacaccaccauagagaaggaaauaugucccaaacuagcagaauacagaaauuggucaaagccgcaaugugacauuacaggauuugcaccuuuuucuaaggacaauucgauuaggcuuuccgcugguggggacaucugggugacaagagaaccuuaugugucaugcgauccuaacaaguguuaucaauuugcccuuggacagggaacaacacuaaacaacgugcauucaaauaacacaguacgugauaggaccccuuaucggacccuauugaugaaugaguuagguguuccuuuucaucuggggaccaagcaagugugcauagcaugguccagcucaaguugucacgauggaaaagcauggcugcauguuuguauaacgggggaugauaaaaaugcaacugcuagcuucauuuacaaugggaagcuuguagauaguguuguuucaugguccaaagaaauccucaggacccaggagucagaaugcguuuguaucaauggaacuuguacaguaguaaugacugaugggagugcuucaggaaaagcugauacuaaaauacuauucauugaggaggggaaaaucguccauacuagcacauugucaggaagugcucagcaugucgaggagugcucuugcuauccucgauauccuggugucagaugugucugcagagacaacuggaaaggcuccaauaggcccaucguagauauaaacauaaaggaucauagcauuguuuccaguuauguguguucaggacuuguuggagacacacccagaaaaaacgacagcuccagcaguagccauuguuuggauccuaacaaugaagaagguggucauggagugaaaggcugggccuuugaugauggaaaugacguguggaugggaagaacgaucaacgagacuucacguuuaggguaugaaaccuucaaagucauugaaggcugguccaacccuaaguccaaauugcagauaaauaggcaagucauaguugacagagguaauagguccgguuauucugguauuuucucuguugaaggcaaaagcugcaucaaucggugcuuuuauguggaguugauuaggggaagaaaagaggaaacugaagucuuguggaccucaaacaguauuguuguguuuuguggcaccucagguacauauggaacaggcucauggccugauggggcggaccucaaucucaugccuauauaa

SEQ ID NO: 56003 - RNA, 1410 nt, Artificial Sequence
  derived and/or modified CDS sequence (wt) from neuraminidase__InfluenzaA__AHC58189
augaauccaaaucaaaagauaauaacgauuggcucuguuucucucaccauuuccacaauaugcuucuucaugcaaauugccaucuugauaacuacuguaacauugcauuucaagcaauaugaauucaacucccccccaaacaaccaagugaugcugugugaaccaacaauaauagaaagaaacaucacagagauaguguaucugaccaacaccaccauagagaaggaaauaugccccaaaccagcagaauacagaaauuggucaaaaccgcaaugugacauuacaggauuugcaccuuuuucuaaggacaauucgauuaggcuuuccgcugguggggacaucugggugacaagagaaccuuaugugucaugcgauccugacaaguguuaucaauuugcccuuggacagggaacaacacuaaacaaugugcauucaaauaacacaguacgugauaggaccccuuaucggacuuuauugaugaaugaguuagguguuccuuuucaucuggggaccaagcaagugugcauagcaugguccagcucaaguugucacgauggaaaagcauggcugcauguuuguauaacgggggaugauaaaaaugcaacugcuagcuucauuuacaaugggaggcuuguagauaguguuguuucaugguccaaagaaauucucaggacccaggagucagaaugcguuuguaucaauggaacuuguacaguaguaaugacugauggaagugcuucaggaaaagcugauacuaaaauacuauucauugaggaggggaaaauuguucauacuagcacauugucaggaagugcucagcaugucgaggagugcucuugcuauccucgauauccuggugucagaugugucugcagagacaacuggaaaggcuccaauaggcccaucguagauauaaacauaaaggaucauagcauugucuccaguuauguguguucaggacuuguuggagacacacccagaaaaaacgacagcuccagcaguagccauuguuuggauccuaacaaugaagaagguggucauggagugaaaggcugggccuuugaugauggaaaugacguguggaugggaagaacaaucaacgagaugucacgcuuaggguaugaaaccuucaaagucauugaaggcugguccaacccuaaguccaaauugcagauaaauaggcaagucauaguugacagaggugauagguccgguuauucugguauuuucucuguugaaggcaaaagcugcaucaaucggugcuuuuauguggaguugauuaggggaagaaaagaggaaacugaagucuuguggaccucaaacaguauuguuguguuuuguggcaccucagguacauauggaacaggcucauggccugauggggcggaccucaaucucaugccuauauaa

SEQ ID NO: 56004 - RNA, 1410 nt, Artificial Sequence; identical to SEQ ID NO: 55983
  derived and/or modified CDS sequence (wt) from neuraminidase__InfluenzaA__AHC58201

SEQ ID NO: 56005 - RNA, 1410 nt, Artificial Sequence
  derived and/or modified CDS sequence (wt) from neuraminidase__InfluenzaA__AHC58225
augaauccaaaucaaaagauaauaacgauuggcucuguuucucucaccauuuccacaauaugcuucuucaugcaaauugccaucuugauaacuacuguaacauugcauuucaagcaauaugaauucaacucccccccaaacaaccaagugaugcugugugaaccaacaauaauagaaagaaacaucacagagauaguguaucugaccaacaccaccauagaaaaggaaauaugccccaaaccagcagaauacagaaauuggucaaaaccgcaaugugacauuacaggauuugcaccuuuuucuaaggacaauucgauuaggcuuuccgcugguggggacaucugggugacaagagaaccuuaugugucaugcgauccugacaaguguuaucaauuugcccuuggacagggaacaacacuaaacaaugugcauucaaauaacacaguacgugauaggaccccuuaucggacuuuauugaugaaugaguuagguguuccuuuucaucuggggaccaagcaagugugcauagcaugguccagcucaaguugucacgauggaaaagcauggcugcauguuuguauaacgggggaugauaaaaaugcaacugcuagcuucauuuacaaugggaggcuuguagauaguguuguuucaugguccaaagaaauucucaggacccaggagucagaaugcguuuguaucaauggaacuuguacaguaguaaugacugauggaagugcuucaggaaaagcugauacuaaaauacuauucauugaggaggggaaaaucguucauacuagcacguugucaggaagugcucagcaugucgaggagugcucuugcuauccucgauauccuggugucagaugugucugcagagacaacuggaaaggcuccaauaggcccaucguagauauaaacauaaaggaucauagcauugucuccaguuauguguguucaggacuuguuggagacacacccagaaaaaacgacagcuccagcaguagccauuguuuggauccaaacaaugaagaagguggucauggagugaaaggcugggccuuugaugauggaaaugacguguggaugggaagaacaaucaacgagacgucacgcuuaggguaugaaaccuucaaagucauugaaggcugguccaacccuaaguccaaauugcagauaaauaggcaagucauaguuaacagaggugauagguccgguuauucugguauuuucucuguugaaggcaaaagcugcaucaaucggugcuuuuauguagaguugauuaggggaagaaaagaggaaacugaagucuuguggaccucaaacaguauuguuguguuuuguggcaccucagguacauauggaacaggcucauggccugauggggcggaccucaaucucaugccuauauaa

SEQ ID NO: 56006 - RNA, 1410 nt, Artificial Sequence; identical to SEQ ID NO: 55987
  derived and/or modified CDS sequence (wt) from neuraminidase__InfluenzaA__AHC58237

SEQ ID NO: 56007 - RNA, 1410 nt, Artificial Sequence; identical to SEQ ID NO: 55983
  derived and/or modified CDS sequence (wt) from neuraminidase__InfluenzaA__AHC58249

SEQ ID NO: 56008 - RNA, 1410 nt, Artificial Sequence
  derived and/or modified CDS sequence (wt) from neuraminidase__InfluenzaA__AHC58273
augaauccaaaucaaaagauaauaacgauuggcucuguuucucucaccauuuccacaauaugcuucuucaugcaaauugccaucuugauaacuacuguaacauugcauuucaagcaauaugaauucaacucccccccaaacaaccaagugaugcugugugaaccaacaauaauagaaagaaacauaacagagauaguguaucugaccaacaccaccauagagaaggaaauaugccccaaacuagcagaauacagaaauuggucaaagccgcaaugugacauuacaggauuugcaccuuuuucuaaggacaauucgauuaggcuuuccgcugguggggacaucugggugacaagagaaccuuaugugucaugcgauccugacaaguguuaucaauuugcccuuggacagggaacaacacuaaacaacgugcauucaaauaacacaguacgugauaggaccccuuaucggacccuauugaugaaugaguuagguguuccuuuucaucuggggaccaagcaagugugcauagcaugguccagcucaaguugucacgauggaaaagcauggcugcauguuuguauaacgggggaugacaaaaaugcaacugcuagcuucauuuacaaugggaggcuuguagauaguguuguuucaugguccaaagaaauccucaggacccaggagucagaaugcguuuguaucaauggaacuuguacaguaguaaugacugaugggagugcuucaggaaaagcugauacuaaaauacuauucauugaggaggggaaaaucguucauacuagcacauugucaggaagugcucagcaugucgaggagugcucuugcuauccucgauauccuggugucagaugugucugcagagacaacuggaaaggcuccaauaggcccaucguagauauaaacauaaaggaucauagcauuguuuccaguuauguguguucaggacuuguuggagacacacccagaaaaaacgacagcuccagcaguagccauuguuuggauccuaacaaugaagaagguggucauggagugaaaggcugggccuuugaugauggaaaugacguguggaugggaagaacgaucaacgagacgucacguuuaggguaugaaaccuucaaagucauugaaggcugguccaacccuaaguccaaauugcagauaaauaggcaagucauaguugacagagguaauagguccgguuauucugguauuuucucuguugaaggcaaaagcugcaucaaucggugcuuuuauguggaguugauuaggggaagaaaagaggaaacugaagucuuguggaccucaaacaguauuguuguguuuuguggcaccucagguacauauggaacaggcucauggccugauggggcggaccucaaucucaugccuauauaa

SEQ ID NO: 56009 - RNA, 1410 nt, Artificial Sequence
  derived and/or modified CDS sequence (wt) from neuraminidase__InfluenzaA__AHC58363
augaauccaaaucaaaagauaauaacgauuggcucuguuucucucaccauuuccacaauaugcuucuucaugcaaauugccaucuugauaacuacuguaacauuacauuucaagcaauaugaauucaacucccccccaaacaaccaagugaugcugugugaaccaacaauaauagaaagaaacauaacagagauaguguaucugaccaacaccaccauagagaaggaaauaugucccaaacuagcagaauacagaaauuggucaaagccgcaaugugacauuacaggauuugcaccuuuuucuaaggacaauucgauuaggcuuuccgcugguggggacaucugggugacaagagaaccuuaugugucaugcgauccuaacaaguguuaucaauuugcccuuggacagggaacaacacuaaacaacgugcauucaaauaacacaguacgugauaggaccccuuaucggacccuauugaugaaugaguuagguguuccuuuucaucuggggaccaagcaagugugcauagcaugguccagcucaaguugucacgauggaaaagcauggcugcauguuuguauaacgggggaugauaaaaaugcaacugcuagcuucauuuacaaugggaagcuuguagauaguguuguuucaugguccaaagaaauccucaggacccaggagucagaaugcguuuguaucaauggaacuuguacaguaguaaugacugaugggagugcuucaggaaaagcugauacuaaaauacuauucauugaggaggggaaaaucguucauacuagcacauugucaggaagugcucagcaugucgaggagugcucuugcuauccucgauauccuggugucagaugugucugcagagacaacuggaaaggcuccaauaggcccaucguagauauaaacauaaaggaucauagcauuguuuccaguuauguguguucaggacuuguuggagacacacccagaaaaaacgacagcuccagcaguagccauuguuuggauccuaacaaugaagaagguggucauggagugaaaggcugggccuuugaugauggaaaugacguguggaugggaagaacgaucaacgagacuucacguuuaggguaugaaaccuucaaagucauugaaggcugguccaacccuaaguccaaauugcagauaaauaggcaagucauaguugacagagguaauagguccgguuauucugguauuuucucuguugaaggcaaaagcugcaucaaucggugcuuuuauguggaguugauuaggggaagaaaagaggaaacugaagucuuguggaccucaaacaguauuguuguguuuuguggcaccucagguacauauggaacaggcucauggccugauggggcggaccucaaucucaugccuauauaa

SEQ ID NO: 56010 - RNA, 1410 nt, Artificial Sequence
  derived and/or modified CDS sequence (wt) from neuraminidase__InfluenzaA__AHC58375
augaauccaaaucaaaagauaauaacgauuggcucuguuucucucaccauuuccacaauaugcuucuucaugcaaauugccaucuugauaacuacuguaacauugcauuucaagcaauaugaauucaacucccccccaaacaaccaagugaugcugugugaaccaacaauaauagaaagaaacaucacagagauaguguaucugaccaacaccaccauagagaaggaaauaugccccaaaccagcagaauacagaaauuggucaaaaccgcaaugugacauuacaggauuugcaccuuuuucuaaggacaauucgauuaggcuuuccgcugguggggacaucugggugacaagagaaccuuaugugucaugcgauccugacaaguguuaucaauuugcccuuggacagggaacaacacuaaacaaugugcauucaaauaacacaguacgugauaggaccccuuaucggacuuuauugaugaaugaguuagguguuccuuuucaucuggggaccaagcaagugugcauagcaugguccagcucaaguugucacgauggaaaagcauggcugcauguuuguauaacgggggaugauaaaaaugcaacugcuagcuucauuuacaaugggaggcuuguagauaguguuguuucaugguccaaagaaauucucaggacccaggagucagaaugcguuuguaucaauggaacuuguacaguaguaaugacugauggaagugcuucaggaaaagcugauacuaaaauacuauucauugaggaggggaaaaucguucauacuagcacauugucaggaagugcucagcaugucgaggagugcucuugcuauccucgauauccuggugucagaugugucugcagagacaacuggaaaggcuccaauaggcccaucguagauauaaacauaaaggaucauagcauugucuccaguuauguguguucaggacuuguuggagacacacccagaaaaaacgacagcuccagcaguagccauuguuuggauccaaacaaugaagaagguggucauggagugaaaggcugggccuuugaugauggaaaugacguguggaugggaagaacaaucaacgagacgucacgcuuaggguaugaaaccuucaaagucauugaaggcugguccaacccuaaguccaaauugcagauaaauaggcaagucauaguugacagaggugauagguccgguuauucugguauuuucucuguugaaggcaaaagcugcaucaaucggugcuuuuauguggaguugauuaggggaagaaaagaggaaacugaagucuuguggaccucaaacaguauuguuguguuuuguggcaccucagguacauauggaacaggcucauggccugauggggcggaccucaaucucaugccuauauaa

SEQ ID NO: 56011 - RNA, 1410 nt, Artificial Sequence
  derived and/or modified CDS sequence (wt) from neuraminidase__InfluenzaA__AHC58387
augaauccaaaucaaaagauaauaacgauuggcucuguuucucucaccauuuccacaauaugcuucuucaugcaaauugccaucuugauaacuacuguaacauugcauuucaagcaauaugaauucaacucccccccaaacaaccaagugaugcugugugaaccaacaauaauagaaagaaacauaacagagauaguguaucugaccaacaccaccauagagaaggaaauaugccccaaacuagcagaauacagaaauuggucaaagccgcaaugugacauuacaggauuugcaccuuuuucuaaggacaauucgauuaggcuuuccgcugguggggacaucugggugacaagagaaccuuaugugucaugcgauccuaacaaguguuaucaauuugcccuuggacagggaacaacacuaaacaacgugcauucaaauaacacaguacgugauaggaccccuuaucggacccuauugaugaaugaguuagguguuccuuuucaucuggggaccaagcaagugugcauagcaugguccagcucaaguugucacgauggaaaagcauggcugcauguuuguauaacgggggaugauaaaaaugcaacugcuagcuucauuuacaaugggaagcuuguagauaguguuguuucaugguccaaagaaauccucaggacccaggagucagaaugcguuuguaucaauggaacuuguacaguaguaaugacugaugggagugcuucaggaaaagcugauacuaaaauacuauucauugaggaggggaaaaucguucauacuagcacauugucaggaagugcucagcaugucgaggagugcucuugcuauccucgauauccuggugucagaugugucugcagagacaacuggaaaggcuccaauaggcccaucguagauauaaacauaaaggaucauagcauuguuuccaguuauguguguucaggacuuguuggagacacacccagaaaaaacgacagcuccagcaguagccauuguuuggauccuaacaaugaagaagguggucauggagugaaaggcugggccuuugaugauggaaaugacguguggaugggaagaacgaucaacgagacgucacguuuaggguaugaaaccuucaaagucauugaaggcugguccaacccuaaguccaaauugcagauaaauaggcaagucauaguugacagagguaauagguccgguuauucugguauuuucucuguugaaggcaaaagcugcaucaaucggugcuuuuauguggaguugauuaggggaagaaaagaggaaacugaagucuuguggaccucaaacaguauuguuguguuuuguggcaccucagguacauauggaacaggcucauggccugauggggcggaccucaaucucaugccuauauaa

SEQ ID NO: 56012 - RNA, 1410 nt, Artificial Sequence; identical to SEQ ID NO: 56009
  derived and/or modified CDS sequence (wt) from neuraminidase__InfluenzaA__AHC58399

SEQ ID NO: 56013 - RNA, 1410 nt, Artificial Sequence; identical to SEQ ID NO: 55983
  derived and/or modified CDS sequence (wt) from neuraminidase__InfluenzaA__AHC58411

SEQ ID NO: 56014 - RNA, 1410 nt, Artificial Sequence
  derived and/or modified CDS sequence (wt) from neuraminidase__InfluenzaA__AHC58423
augaacccaaaucaaaagauaauaacgauuggcucuguuucucucaccauuuccacaauaugcuucuucaugcaaauugccaucuugauaacuacuguaacauugcauuucaagcaauaugaauucaacucccccccaaacaaccaagugaugcugugugaaccaacaauaauagaaagaaacaucacagagauaguguaucugaccaacaccaccauagagaaggaaauaugccccaaaccagcagaauacagaaauuggucaaaaccgcaaugugacauuacaggauuugcaccuuuuucuaaggacaauucgauuaggcuuuccgcugguggggacaucugggugacaagagaaccuuaugugucaugcgauccugacaaguguuaucaauuugcccuuggacagggaacaacacuaaacaaugugcauucaaauaacacaguacgugauaggaccccuuaucggacuuuauugaugaaugaguuagguguuccuuuucaucuggggaccaagcaagugugcauagcaugguccagcucaaguugucacgauggaaaagcauggcugcauguuuguauaacgggggaugauaaaaaugcaacugcuagcuucauuuacaaugggaggcuuguagauaguguuguuucaugguccaaagaaauucucaggacccaggagucagaaugcguuuguaucaauggaacuuguacaguaguaaugacugauggaagugcuucaggaaaagcugauacuaaaauacuauucauugaggaggggaaaaucguucauacuagcacauugucagggagugcucagcaugucgaggagugcucuugcuauccucgauauccuggugucagaugugucugcagagacaacuggaaaggcuccaauaggcccaucguagauauaaacauaaaggaucauagcauugucuccaguuauguguguucaggacuuguuggagacacacccagaaaaaacgacagcuccagcaguagccauuguuuggauccuaacaaugaagaagguggucauggagugaaaggcugggccuuugaugauggaaaugacguguggaugggaagaacaaucaacgagacgucacgcuuaggguaugaaaccuucaaagucauugaaggcugguccaacccuaaguccaaauugcagauaaauaggcaagucauaguugacagaggugauagguccgguuauucugguauuuucucuguugaaggcaaaagcugcaucaaucggugcuuuuauguggaguugauuaggggaagaaaagaggaaacugaagucuuguggaccucaaacaguauuguuguguuuuguggcaccucagguacauauggaacaggcucauggccugauggggcggaccucaaucucaugccuauauaa

SEQ ID NO: 56015 - RNA, 1410 nt, Artificial Sequence; identical to SEQ ID NO: 56009
  derived and/or modified CDS sequence (wt) from neuraminidase__InfluenzaA__AHC58459

SEQ ID NO: 56016 - RNA, 1410 nt, Artificial Sequence
  derived and/or modified CDS sequence (wt) from neuraminidase__InfluenzaA__AHC58471
augaauccaaaccaaaagauaauaaccauugguucggucuguaugacaauuggaauggcuaacuuaauauuacaaauuggaaacauaaucucaauauggauuagccacucaauucaacuugggaaucaaaaucagauugaaacaugcaaucaaagcgucauuacuuaugaaaacaacacuuggguaaaucagacauauguuaacaucagcaacaccaacuuugcugcuggacagccagugguuuccgugaaauuagcgggcaauucuucucucugcccuguuaguggaugggcuauauacaguaaagacaacaguauaagaaucgguuccaagggggauguguuugucauaagggaaccauucauaucaugcuccccuuuggaaugcagaaccuucuucuugacucaaggggccuugcuaaaugacaaacauuccaauggaaccauuaaagacaggagcccauaucgaacccuaaugagcuguccuauuggugaaguucccucuccauacaacucaagauuugagucagucgcuuggucagcaagugcuugucaugauggcaucaauuggcuaacaauuggaauuucuggcccagacaauggggcaguggcuguguuaaaguacaacggcauaauaacagacacuaucaagaguuggagaaacaauauauugagaacacaagaguccgaaugugcauguguaaauggcucuugcuuuacugugaugaccgauggaccaagugauggacaggccucauacaagaucuucagaauagaaaagggaaagauagucaaaucagucgaaaugaaugccccuaauuaucacuaugaggaaugcuccuguuauccugauucuagugaaaucacaugugugugcagggauaacuggcauggcgcgaaucgaccgugggugucuuucaaccagaaucuggaauaucagauaggguacauaugcagugggguuuucggagacaauccacgcccuaaugauaagacaggcaguugugguccaguaucgucuaauggagcaaauggaguaaaaggauuuucauucaaauacggcaaugguguuuggauagggagaacuaaaagcauuaguucaagaaacgguuuugagaugauuugggauccgaacggauggacugggacagacaauaacuucucaauaaagcaagauaucguaggaauaaaugaguggucaggauauagcgggaguuuuguucagcauccagaacuaacagggcuggauuguauaagaccuugcuucuggguugaacuaaucagagggcgacccaaagagaacacaaucuggacuagcgggagcagcauauccuuuugugguguaaacagugacacuguggguuggucuuggccagacggugcugaguugccauuuaccauugacaaguaa

SEQ ID NO: 56017 - RNA, 1410 nt, Artificial Sequence; identical to SEQ ID NO: 55985
  derived and/or modified CDS sequence (wt) from neuraminidase__InfluenzaA__AHC58482

SEQ ID NO: 56018 - RNA, 1410 nt, Artificial Sequence
  derived and/or modified CDS sequence (wt) from neuraminidase__InfluenzaA__AHC58494
augaauccaaaucaaaagauaauaacaauuggcucuguuucucucaccauuuccacaauaugcuucuucaugcaaauugccaucuugauaacuacuguaacauuacauuucaagcaauaugaauucaacucccccccaaacaaccaagugaugcugugugaaccaacaauaauagaaagaaacauaacagagauaguguaucugaccaacaccaccauagagaaggaaauaugccccaaacuagcagaauacagaaauuggucaaagccgcaaugugacauuacaggauuugcaccuuuuucuaaggacaauucgauuaggcuuuccgcugguggggacaucugggugacaagagaaccuuaugugucaugcgauccuaacaaguguuaucaauuugcccuuggacagggaacaacacuaaacaacgugcauucaaauaacacaguacgugauaggaccccuuaucggacccuauugaugaaugaguuagguguuccuuuucaucuggggaccaagcaagugugcauagcaugguccagcucaaguugucacgauggaaaagcauggcugcauguuuguauaacgggggaugauaaaaaugcaacugcuagcuucauuuacaaugggaagcuuguagauaguguuguuucaugguccaaagaaauccucaggacccaggagucagaaugcguuuguaucaauggaacuuguacaguaguaaugacugaugggagugcuucaggaaaagcugauacuaaaauacuauucauugaggaggggaaaaucguucauacuagcacauugucaggaagugcucagcaugucgaggagugcucuugcuauccucgauauccuggugucagaugugucugcagagacaacuggaaaggcuccaauaggcccaucguagauauaaacauaaaggaucauagcauuguuuccaguuauguguguucaggacuuguuggagacacacccagaaaaaacgacagcuccagcaguagccauuguuuggauccuaacaaugaagaagguggucauggagugaaaggcugggccuuugaugauggaaaugacguguggaugggaagaacgaucaacgagacuucacguuuaggguaugaaaccuucaaagucauugaaggcugguccaacccuaaguccaaauugcagauaaauaggcaagucauaguugacagagguaauagguccgguuauucugguauuuucucuguugaaggcaaaagcugcaucaaucggugcuuuuauguggaguugauuaggggaagaaaagaggaaacugaagucuuguggaccucaaacaguauuguuguguuuuguggcaccucagguacauauggaacaggcucauggccugauggggcggaccucaaucucaugccuauauaa

SEQ ID NO: 56019 - RNA, 1410 nt, Artificial Sequence
  derived and/or modified CDS sequence (wt) from neuraminidase__InfluenzaA__AHC58518
augaacccaaaucaaaagauaauaacgauuggcucuguuucucucaccauuuccacaauaugcuucuucaugcaaguugccaucuugauaacuacuguaacauugcauuucaagcaauaugaauucaacucccccccaaacaaccaagugaugcugugugaaccaacaauaauagaaagaaacauaacagagauaguguaucugaccaacaccaccauagagaaggaaauaugccccaaacuagcagaauacagaaauuggucaaagccgcaaugugacauuacaggauuugcaccuuuuucuaaggacaauucgauuaggcuuuccgcugguggggacaucugggugacaagagaaccuuaugugucaugcgauccugacaaguguuaucaauuugcccuuggacagggaacaacacuaaacaacgugcauucaaauaacacaguacgugauaggaccccuuaucggacccuauugaugaaugaguuagguguuccuuuucaucuggggaccaagcaagugugcauagcaugguccagcucaaguugucacgauggaaaagcauggcugcauguuuguauaacgggggaugauaaaaaugcaacugcuagcuucauuuacaaugggaagcuuguagauaguguuguuucaugguccaaagaaauccucaggacccaggagucagaaugcguuuguaucaauggaacuuguacaguaguaaugacugaugggagugcuucaggaaaagcugauacuaaaauacuauucauugaggaggggaaaaucguucauacuagcacauugucaggaagugcucagcauguagaggagugcucuugcuauccucgauauccuggugucagaugugucugcagagacaacuggaaaggcuccaauaggcccaucguagauauaaacauaaaggaucauagcauuguuuccaguuauguguguucaggacuuguuggagacacacccagaaaaaacgacagcuccagcaguagccauuguuuggauccuaacaaugaagaagguggucauggagugaaaggcugggccuuugaugauggaaaugacguguggaugggaagaacgaucaacgagacgucacguuuaggguaugaaaccuucaaagucauugaaggcugguccaacccuaaguccaaauugcagauaaauaggcaagucauaguugacagagguaauagguccgguuauucugguauuuucucuguugaaggcaaaagcugcaucaaucggugcuuuuauguggaguugauuaggggaagaaaagaggaaacugaagucuuguggaccucaaacaguauuguuguguuuuguggcaccucagguacauauggaacaggcucauggccugauggggcggaccucaaucucaugccuauauaa

SEQ ID NO: 56020 - RNA, 1410 nt, Artificial Sequence; identical to SEQ ID NO: 55983
  derived and/or modified CDS sequence (wt) from neuraminidase__InfluenzaA__AHC58530

SEQ ID NO: 56021 - RNA, 1410 nt, Artificial Sequence; identical to SEQ ID NO: 56000
  derived and/or modified CDS sequence (wt) from neuraminidase__InfluenzaA__AHC58554

SEQ ID NO: 56022 - RNA, 1410 nt, Artificial Sequence
  derived and/or modified CDS sequence (wt) from neuraminidase__InfluenzaA__AHC58566
augaacccaaaucaaaagauaauaacgauuggcucuguuucucucaccauuuccacaauaugcuucuucaugcaaauugccaucuugauaacuacuguaacauugcauuucaagcaauaugaauucuacucccccccaaacaaccaagugaugcugugugaaccaacaauaauagaaagaaacauaacagagauaguguaucugaccaacaccaccauagagaaggaaauaugccccaaacuagcagaauacagaaauuggucaaagccgcaaugugacauuacaggauuugcaccuuuuucuaaagacaauucgauuaggcuuuccgcugguggggacaucugggugacaagagaaccuuaugugucaugcgauccugacaaguguuaucaauuugcccuuggacagggaacaacacuaaacaacgugcauucaaauaacacaguacgugauaggaccccuuaucggacccuauugaugaaugaguuagguguuccuuuucaucuggggaccaagcaagugugcauagcaugguccagcucaaguugucacgauggaaaagcauggcugcauguuuguauaacgggggaugauaaaaaugcaacugcuagcuucauuuacaaugggaggcuuguagauaguguuguuucaugguccaaagaaauccucaggacccaggagucagaaugcguuuguaucaauggaacuuguacaguaguaaugacugaugggagugcuucaggaaaagcugauacuaaaauacuauucauugaggaggggaaaaucguucauacuagcacauugucaggaagugcucagcaugucgaggagugcucuugcuauccucgauauccuggugucagaugugucugcagagacaacuggaaaggcuccaauaggcccaucguugauauaaacauaaaggaucauagcauuguuuccaguuauguguguucaggacuuguuggagacacacccagaaaaaacgacagcuccagcaguagccauuguuuggauccuaacaaugaagaagguggucauggagugaaaggcugggccuuugaugauggaaaugacguguggaugggaagaacgaucaacgagacgucacgcuuaggguaugaaaccuucaaagucauugaaggcugguccaacccuaaguccaaauugcagauaaauaggcaagucauaguugacagagguaauagguccgguuauucugguauuuucucuguugaaggcaagagcugcaucaaucggugcuuuuauguggaguugauuaggggaagaaaagaggaaacugaagucuuguggaccucaaacaguauuguuguguuuuguggcaccucagguacauauggaacaggcucauggccugauggggcggaccucaaucucaugccuauauaa

SEQ ID NO: 56023 - RNA, 1410 nt, Artificial Sequence
  derived and/or modified CDS sequence (wt) from neuraminidase__InfluenzaA__AHC58578
augaacccaaaucaaaagauaauaacgauuggcucuguuucucucaccguuuccacaauaugcuucuucaugcaaauugccaucuugauaacuacuguaacauugcauuucaagcaauaugaauucuacucccccccaaacaaccaagugaugcugugugaaccaacaauaauagaaagaaacauaacagagauaguguaucugaccaacaccaccauagagaaggaaauaugccccaaacuagcagaauacagaaauuggucaaagccgcaaugugacauuacaggauuugcaccuuuuucuaaggacaauucgauuaggcuuuccgcugguggggacaucugggugacaagagaaccuuaugugucaugcgauccugacaaguguuaucaauuugcccuuggacagggaacaacacuaaacaacgugcauucaaauaacacaguacgugauaggaccccuuaucggacccuauugaugaaugaguuagguguuccuuuucaucuggggaccaagcaagugugcauagcaugguccagcucaaguugucacgauggaaaagcauggcugcauguuuguauaacgggggaugauaaaaaugcaacugcuagcuucauuuacaaugggaggcuuguagauaguguuguuucaugguccaaagaaauccucaggacccaggagucagaaugcguuuguaucaauggaacuuguacaguaguaaugacugaugggagugcuucaggaaaagcugauacuaaaauacuauucauugaggaggggaaaaucguucauacuagcacauugucaggaagugcucagcaugucgaggagugcucuugcuauccucgauauccuggugucagaugugucugcagagacaacuggaaaggcuccaauaggcccaucguugauauaaacauaaaggaucauagcauuguuuccaguuauguguguucaggacuuguuggagacacacccagaaaaaacgacagcuccagcaguagccauuguuuggauccuaacaaugaagaagguggucauggagugaaaggcugggccuuugaugauggaaaugacguguggaugggaagaacgaucaacgagacgucacgcuuaggguaugaaaccuucaaagucauugaaggcugguccaacccuaaguccaaauugcagauaaauaggcaagucauaguugacagagguaauagguccgguuauucugguauuuucucuguugaaggcaagagcugcaucaaucggugcuuuuacguggaguugauuaggggaagaaaagaggaaacugaagucuuguggaccucaaacaguauuguuguguuuuguggcaccucagguacauauggaacaggcucauggccugauggggcggaccucaaucucaugccuauauaa

SEQ ID NO: 56024 - RNA, 1410 nt, Artificial Sequence; identical to SEQ ID NO: 55982
  derived and/or modified CDS sequence (wt) from neuraminidase__InfluenzaA__AHC58590

SEQ ID NO: 56025 - RNA, 1410 nt, Artificial Sequence; identical to SEQ ID NO: 56019
  derived and/or modified CDS sequence (wt) from neuraminidase__InfluenzaA__AHC58602

SEQ ID NO: 56026 - RNA, 1410 nt, Artificial Sequence; identical to SEQ ID NO: 55983
  derived and/or modified CDS sequence (wt) from neuraminidase__InfluenzaA__AHC58614

SEQ ID NO: 56027 - RNA, 1410 nt, Artificial Sequence; identical to SEQ ID NO: 55983
  derived and/or modified CDS sequence (wt) from neuraminidase__InfluenzaA__AHC58626

SEQ ID NO: 56028 - RNA, 1410 nt, Artificial Sequence
  derived and/or modified CDS sequence (wt) from neuraminidase__InfluenzaA__AHC58638
augaacccaaaucaaaagauaauaacgauuggcucuguuucucucaccauuuccacaauaugcuucuucaugcaaauugccaucuugauaacuacuguaacauugcauuucaagcaauaugaauucuacucccccccaaacaaccaagugaugcugugugaaccaacaauaauagaaagaaacauaacagagauaguguaucugaccaacaccaccauagagaaggaaauaugccccaaacuagcagaauacagaaauuggucaaagccgcaaugugacauuacaggauuugcaccuuuuucuaaggacaauucgauuaggcuuuccgcugguggggacaucugggugacaagagaaccuuaugugucaugcgauccugacaaguguuaucaauuugcccuuggacagggaacaacacuaaacaacgugcauucaaauaacacaguacgugauaggaccccuuaucggacccuauugaugaaugaguuagguguuccuuuucaucuggggaccaagcaagugugcauagcaugguccagcucaaguugucacgauggaaaagcauggcugcauguuuguauaacgggggaugauaaaaaugcaacugcuagcuucauuuacaaugggaggcuuguagauaguguuguuucaugguccaaagaaauccucaggacccaggagucagaaugcguuuguaucaauggaacuuguacaguaguaaugacugaugggagugcuucagggaaagcugauacuaaaauacuauucauugaggaggggaaaaucguucauacuagcacauugucaggaagugcucagcaugucgaggagugcucuugcuauccucgauauccuggugucagaugugucugcagagacaacuggaaaggcuccaauaggcccaucguugauauaaacauaaaggaucauagcauuguuuccaguuauguguguucaggacuuguuggagacacacccagaaaaaacgacagcuccagcaguagccauuguuuggauccuaacaaugaagaagguggucauggagugaaaggcugggccuuugaugauggaaaugacguguggaugggaagaacgaucaacgagacgucacgcuuaggguaugaaaccuucaaagucauugaaggcugguccaacccuaaguccaaauugcagauaaauaggcaagucauaguugacagagguaauagguccgguuauucugguauuuucucuguugaaggcaagagcugcaucaaucggugcuuuuauguggaguugauuaggggaagaaaagaggaaacugaagucuuguggaccucaaacaguauuguuguguuuuguggcaccucagguacauauggaacaggcucauggccugauggggcggaccucaaucucaugccuauauaa

SEQ ID NO: 56029 - RNA, 1410 nt, Artificial Sequence; identical to SEQ ID NO: 55984
  derived and/or modified CDS sequence (wt) from neuraminidase__InfluenzaA__AHC58650

SEQ ID NO: 56030 - RNA, 1410 nt, Artificial Sequence
  derived and/or modified CDS sequence (wt) from neuraminidase__InfluenzaA__AHC58662
augaauccaaaucaaaagauaauaacgauuggcucuguuucucucaccauuuccacaauaugcuucuucaugcaaacugccaucuugauaacuacuguaacauugcauuucaagcaauaugaauucaacucccccccaaacaaccaagugaugcugugugaaccaacaauaauagaaagaaacauaacagagauaguguaucugaccaacaccaccauagagaaggaaauaugccccaaacuagcagaauacagaaauuggucaaagccgcaaugugacauuacaggauuugcaccuuuuucuaaggacaauucgauuaggcuuuccgcugguggggacaucugggugacaagagaaccuuaugugucaugcgauccugacaaguguuaucaauuugcccuuggacagggaacaacacuaaacaacgugcauucaaauaacacaguacgugauaggaccccuuaucggacccuauugaugaaugaguuagguguuccuuuucaucuggggaccaagcaagugugcauagcaugguccagcucaaguugucacgauggaaaagcauggcugcauguuuguauaacgggggaugauaaaaaugcaacugcuagcuucaucuacaaugggaagcuuguagauaguguuguuucaugguccaaagaaauccucaggacccaggagucagaaugcguuuguaucaauggaacuuguacaguaguaaugacugaugggagugcuucaggaaaagcugauacuaaaauacuauucauugaggaggggaaaaucguucauacuagcacauugucaggaagugcucagcauguagaggagugcucuugcuauccucgauauccuggugucagaugugucugcagagacaacuggaaaggcuccaauaggcccaucguagauauaaacauaaaggaucauagcauuguuuccaguuauguguguucaggacuuguuggagacacacccagaaaaaacgacagcuccagcaguagccauuguuuggauccuaacaaugaagaagguggucauggagugaaaggcugggccuuugaugauggaaaugacguguggaugggaagaacgaucaacgagacgucacguuuaggguaugaaaccuucaaagucauugaaggcugguccaacccuaaguccaaauugcagauaaauaggcaagucauaguugacagagguaauagguccgguuauucugguauuuucucuguugaaggcaaaagcugcaucaaucggugcuuuuauguggaguugauuaggggaagaaaagaggaaacugaagucuuguggaccucaaacaguauuguuguguuuuguggcaccucagguacauauggaacaggcucauggccugauggggcggaccucaaucucaugccuauauaa

SEQ ID NO: 56031 - RNA, 1410 nt, Artificial Sequence
  derived and/or modified CDS sequence (wt) from neuraminidase__InfluenzaA__AHC58686
augaauccaaaucaaaagauaauaacgauuggcucuguuucucucaccauuuccacaauaugcuucuucaugcaaauugccaucuugauaacuacuguaacauugcauuucaagcaauaugaauucaacucccccccaaacaaccaaguggugcugugugaaccaacaauaauagaaagaaacaucacagagauaguguaucugaccaacaccaccauagagaaggaaauaugccccaaaccagcagaauacagaaauuggucaaaaccgcaaugugacauuacaggauuugcaccuuuuucuaaggacaauucgauuaggcuuuccgcugguggggacaucugggugacaagagaaccuuaugugucaugcgauccugacaaguguuaucaauuugcccuuggacagggaacaacacuaaacaaugugcauucaaauaacacaguacgugauaggaccccuuaucggacuuuauugaugaaugaguuagguguuccuuuucaucuggggaccaagcaagugugcauagcaugguccagcucaaguugucacgauggaaaagcauggcugcauguuuguauaacgggggaugauaaaaaugcaacugcuagcuucauuuacaaugggaggcuuguagauaguguuguuucaugguccaaagaaauucucaggacccaggagucagaaugcguuuguaucaauggaacuuguacaguaguaaugacugauggaagugcuucaggaaaagcugauacuaaaauacuauucauugaggaggggaaaaucguucauacuagcacauugucagggagugcucagcaugucgaggagugcucuugcuauccucgauauccuggugucagaugugucugcagagacaacuggaaaggcuccaauaggcccaucguagauauaaacauaaaggaucauagcauugucuccaguuauguguguucaggacuuguuggagacacacccagaaaaaacgacagcuccagcaguagccauuguuuggauccuaacaaugaagaagguggucauggagugaaaggcugggccuuugaugauggaaaugacguguggaugggaagaacaaucaacgagacgucacgcuuaggguaugaaaccuucaaagucauugaaggcugguccaacccuaaguccaaauugcagauaaauaggcaagucauaguugacagaggugauagguccgguuauucugguauuuucucuguugaaggcaaaagcugcaucaaucggugcuuuuauguggaguugauuaggggaagaaaagaggaaacugaagucuuguggaccucaaacaguauuguuguguuuuguggcaccucagguacauauggaacaggcucauggccugauggggcggaccucaaucucaugccuauauaa

SEQ ID NO: 56032 - RNA, 1410 nt, Artificial Sequence
  derived and/or modified CDS sequence (wt) from neuraminidase__InfluenzaA__AHC58698
augaauccaaaucaaaagauaauaacgauuggcucuguuucucucaccauuuccacaauaugcuucuucaugcaaauugccaucuugauaacuacuguaacauugcauuucaagcaauaugaauucaacucccccccaaacaaccaagugaugcugugugaaccaacaauaauagaaagaaacauaacagagauaguguaucugaccaacaccaccauagagaaggaaauaugccccaaacuagcagaauacagaaauuggucaaagccgcaaugugacauuacaggauuugcaccuuuuucuaaggacaauucgauuaggcuuuccgcugguggggacaucugggugacaagagaaccuuaugugucaugcgauccugacaaguguuaucaauuugcccuuggacagggaacaacacuaaacaacgugcauucaaauaacacaguacgugauaggaccccuuaucggacccuauugaugaaugaguuagguguuccuuuucaucuggggaccaagcaagugugcauagcaugguccagcucaaguugucacgauggaaaagcauggcugcauguuuguauaacgggggaugauaaaaaugcaacugcuagcuucauuuacaaugggaggcuuguagauaguguuguuucaugguccaaagaaauccucaggacccaggagucagaaugcguuuguaucaauggaacuugugcaguaguaaugacugaugggagugcuucaggaaaagcugauacuaaaauacuauucauugaggaggggaaaaucguucauacuagcacauugucaggaagugcucagcaugucgaggagugcucuugcuauccucgauauccuggugucagaugugucugcagagacaacuggaaaggcuccaauaggcccaucguagauauaaacauaaaggaucauagcauuguuuccaguuauguguguucaggacuuguuggagacacacccagaaaaaacgacagcuccagcaguagccauuguuuggauccuaacaaugaagaagguggucauggagugaaaggcugggccuuugaugauggaaaugacguguggaugggaagaacgaucaacgagacgucacguuuaggguaugaaaccuucaaagucauugaaggcugguccaacccuaaguccaaauugcagauaaauaggcaagucauaguugacagagguaauagguccgguuauucugguauuuucucuguugaaggcaaaagcugcaucaaucggugcuuuuauguggaguugauuaggggaagaaaagaggaaacugaagucuuguggaccucaaacaguauuguuguguuuuguggcaccucagguacauauggaacaggcucauggccugauggggcggaccucaaucucaugccuauauaa

SEQ ID NO: 56033 - RNA, 1410 nt, Artificial Sequence
  derived and/or modified CDS sequence (wt) from neuraminidase__InfluenzaA__AHC58710
augaauccaaaucaaaagauaauaacgauuggcucuguuucucucaccauuuccacaauaugcuucuucaugcaaauugccaucuugauaacuacuguaacauugcauuucaagcaauaugaauucaacucccccccaaacaaccaagugaugcugugugaaccaacaauaauagaaagaaacaucacagagauaguguaucugaccaacaccaccauagagaaggaaauaugccccaaaccagcagaauacagaaauuggucaaaaccgcaaugugacauuacaggauuugcaccuuuuucuaaggacaauucgauuaggcuuuccgcugguggggacaucugggugacaagagaaccuuaugugucaugcgauccugacaaguguuaucaauuugcccuuggacagggaacaacacuaaacaaugugcauucaaauaacacaguacgugauaggaccccuuaucggacuuuauugaugaaugaauuagguguuccuuuucaucuggggaccaagcaagugugcauagcaugguccagcucaaguugucacgauggaaaagcauggcugcauguuuguauaacgggggaugauaaaaaugcaacugcuagcuucauuuacaaugggaggcuuguagauaguguuguuucaugguccaaagaaauucucaggacccaggagucagaaugcguuuguaucaauggaacuuguacaguaguaaugacugauggaagugcuucaggaaaagcugauacuaaaauacuauucauugaggaggggaaaaucguucauacuagcacauugucaggaagugcucagcaugucgaggagugcucuugcuauccucgauauccuggugucagaugugucugcagagacaacuggaaaggcuccaauaggcccaucguagauauaaacauaaaggaucauagcauugucuccaguuauguguguucaggacuuguuggagacacacccagaaaaaacgacagcuccagcaguagccauuguuuggauccuaacaaugaagaagguggucauggagugaaaggcugggccuuugaugauggaaaugacguguggaugggaagaacaaucaacgagacgucacgcuuaggguaugaaaccuucaaagucauugaaggcugguccaacccuaaguccaaauugcagauaaauaggcaagucauaguugacagaggugauagguccgguuauucugguauuuucucuguugaaggcaaaagcugcaucaaucggugcuuuuauguggaguugauuaggggaagaaaagaggaaacugaagucuuguggaccucaaacaguauuguuguguuuuguggcaccucagguacauauggaacaggcucauggccugauggggcggaccucaaucucaugccuauauaa

SEQ ID NO: 56034 - RNA, 1410 nt, Artificial Sequence; identical to SEQ ID NO: 56033
  derived and/or modified CDS sequence (wt) from neuraminidase__InfluenzaA__AHC58722

SEQ ID NO: 56035 - RNA, 1410 nt, Artificial Sequence
  derived and/or modified CDS sequence (wt) from neuraminidase__InfluenzaA__AHC58734
augaauccaaaucaaaagauaauaacgauuggcucuguuucucucaccauuuccacaauaugcuucuucaugcaaauugccaucuugauaacuacuguaacauuacauuucaagcaauaugaauucaacucccccccaaacaaccaagugaugcugugugaaccaacaauaauagaaagaaacauaacagagauaguguaucugaccaacaccaccauagagaaggaaauaugucccaaacuagcagaauacagaaauuggucaaagccgcaaugugacauuacaggauuugcaccuuuuucuaaggacaauucgauuaggcuuuccgcugguggggacaucugggugacaagagaaccuuaugugucaugcgauccuaacaaguguuaucaauuugcccuuggacagggaacaacacuaaacaacgugcauucaaauaacacaguacgugauaggaccccuuaucggacccuauugaugaaugaguuagguguuccuuuucaucuggggaccaagcaagugugcauagcaugguccagcucaaguugucacgauggaaaagcauggcugcauguuuguauaacgggggaugauaaaaaugcaacugcuagcuucauuuacaaugggaagcuuguagauaguguuguuucaugguccaaagaaauccucaggacccaggagucagaaugcguuuguaucaauggaacuuguacaguaguaaugacugaugggagugcuucaggaaaagcugauacuaaaauacuauucauugaggaggggaaaaucguucauacuagcacauugucaggaagugcucagcaugucgaggagugcucuugcuauccucgauauccugguaucagaugugucugcagagacaacuggaaaggcuccaauaggcccaucguagauauaaacauaaaggaucauagcauuguuuccaguuauguguguucaggacuuguuggagacacacccagaaaaaacgacagcuccagcaguagccauuguuuggauccuaacaaugaagaagguggucauggagugaaaggcugggccuuugaugauggaaaugacguguggaugggaagaacgaucaacgagacuucacguuuaggguaugaaaccuucaaagucauugaaggcugguccaacccuaaguccaaauugcagauaaauaggcaagucauaguugacagagguaauagguccgguuauucugguauuuucucuguugaaggcaaaagcugcaucaaucggugcuuuuauguggaguugauuaggggaagaaaagaggaaacugaagucuuguggaccucaaacaguauuguuguguuuuguggcaccucagguacauauggaacaggcucauggccugauggggcggaccucaaucucaugccuauauaa

SEQ ID NO: 56036 - RNA, 1410 nt, Artificial Sequence; identical to SEQ ID NO: 55983
  derived and/or modified CDS sequence (wt) from neuraminidase__InfluenzaA__AHC58746

SEQ ID NO: 56037 - RNA, 1410 nt, Artificial Sequence; identical to SEQ ID NO: 56018
  derived and/or modified CDS sequence (wt) from neuraminidase__InfluenzaA__AHC58758

SEQ ID NO: 56038 - RNA, 1410 nt, Artificial Sequence; identical to SEQ ID NO: 55983
  derived and/or modified CDS sequence (wt) from neuraminidase__InfluenzaA__AHC58770

SEQ ID NO: 56039 - RNA, 1410 nt, Artificial Sequence; identical to SEQ ID NO: 52717
  derived and/or modified CDS sequence (wt) from neuraminidase__InfluenzaA__AHC58782

SEQ ID NO: 56040 - RNA, 1410 nt, Artificial Sequence; identical to SEQ ID NO: 56000
  derived and/or modified CDS sequence (wt) from neuraminidase__InfluenzaA__AHC58806

SEQ ID NO: 56041 - RNA, 1410 nt, Artificial Sequence
  derived and/or modified CDS sequence (wt) from neuraminidase__InfluenzaA__AHC58818
augaacccaaaucaaaagauaauaacgauuggcucuguuucucucaccauuuccacaauaugcuucuucauacaaauugccaucuugauaacuacuguaacauugcauuucaagcaauaugaauucaacucccccccaaacaaccaagugaugcugugugaaccaacaauaauagagagaaacauaacagagauaguguaucugaccaacaccaccauagagaaggaaauaugccccaaacuagcagaauacagaaauuggucaaagccgcaaugugacauuacaggguuugcaccuuuuucuaaggacaauucgauuaggcuuuccgcugguggggacaucugggugacaagagaaccuuaugugucaugcgauccugacaaguguuaucaauuugcccuuggacagggaacaacacuaaacaacgugcauucaaauaacacaguacgugauaggaccccuuaucggacccuauugaugaaugaguuagguguuccuuuucaucuggggaccaagcaagugugcauagcaugguccagcucaaguugucacgauggaaaagcauggcugcauguuuguauaacgggggaugauaaaaaugcaacugcuagcuucauuuacaaugggaggcuuguggauaguguuguuucaugguccaaagaaauccucaggacccaggagucagaaugcguuuguaucaauggaacuuguacaguaguaaugacugaugggagugcuucaggaaaagcugauacuaaaauacuauucauugaggaggggaaaauaguucauacuagcacauugucaggaagugcucagcaugucgaggagugcucuugcuauccucgauaucccggugucagaugugucugcagagacaacuggaaaggcuccaauaggcccaucguagauauaaacauaaaggaucauagcauuguuuccaguuauguguguucaggacuuguuggagacacacccagaaaaaacgacagcuccagcagcagccauuguuuggauccuaacaaugaagaagguggucauggagugaaaggcugggccuuugaugauggaaaugacguguggaugggaagaacgaucaacgaaacgucacgcuuaggguaugaaaccuucaaagucauugaaggcugguccaacccuaaguccaaauugcagauaaauaggcaagucauaguugacagagguaauagguccgguuauucugguauuuucucuguugaaggcaagagcugcaucaaucggugcuuuuauguggaguugauuaggggaagaaaagaggaaacugaagucuuguggaccucaaacaguauuguuguguuuuguggcaccucagguacauauggaacaggcucauggccugauggggcggaccucaaucucaugccuauauaa

SEQ ID NO: 56042 - RNA, 1410 nt, Artificial Sequence
  derived and/or modified CDS sequence (wt) from neuraminidase__InfluenzaA__AHC58830
augaauccaaaucaaaagauaauaacgauuggcucuguuucucucaccauuuccacaauaugcuucuucaugcaaauugccaucuugauaacuacuguaacauugcauuucaagcaauaugaauucaacucccccccaaacaaccaagugaugcugugugaaccaacaauaauagaaagaaacauaacagagauaguguaucugaccaacaccaccauagagaaggaaauaugccccaaacuagcagaauacagaaauuggucaaagccgcaaugugacauuacaggauuugcaccuuuuucuaaggacaauucgauuaggcuuuccgcugguggggacaucugggugacaagagaaccuuaugugucaugcgauccugacaaguguuaucaauuugcccuuggacagggaacaacacuaaacaacgugcauucaaauaacacaguacgugauaggaccccuuaucggacccuauugaugaaugaguuagguguuccuuuucaucuggggaccaagcaagugugcauagcaugguccagcucaaguugucacgauggaaaagcauggcugcauguuuguauaacgggggaugauaaaaaugcaacugcuagcuucauuuacaaugggaggcuuguagauaguguuguuucaugguccaaagaaauccucaggacccaggagucagaaugcguuuguaucaauggaacuugugcaguaguaaugacugaugggagugcuucaggaaaagcugauacuaaaauacuauucauugaggaggggaaaaucguucauacuagcacauugucaggaagugcucagcaugucgaggagugcucuugcuauccucgauauccuggugucagaugugucugcagagacaacuggaaaggcuccaauaggcccaucguagauauaaacauaaaggaucauagcauuguuuccaguuauguguguucaggacuuguuggagacacacccagaaaaaacgacagcuccagcaguagccauuguuuggauccuaacaaugaagaagguggucauggagugaaaggcugggccuuugaugauggaaaugacguguggaugggaagaacgaucaacgagacgucacguuuaggguaugaaaccuucaaagucauugaaggcugguccaacccuaaguccaaauugcagauaaauaggcaagucauaguugacagagguaauagguccgguuauucugguauuuucucuguugaagguaaaagcugcaucaaucggugcuuuuauguggaguugauuaggggaagaaaagaggaaacugaagucuuguggaccucaaacaguauuguuguguuuuguggcaccucagguacauauggaacaggcucauggccugauggggcggaccucaaucucaugccuauauaa

SEQ ID NO: 56043 - RNA, 1410 nt, Artificial Sequence; identical to SEQ ID NO: 55983
  derived and/or modified CDS sequence (wt) from neuraminidase__InfluenzaA__AHC58842

SEQ ID NO: 56044 - RNA, 1410 nt, Artificial Sequence
  derived and/or modified CDS sequence (wt) from neuraminidase__InfluenzaA__AHC58866
augaauccaaaucaaaagauaauaacaauuggcucuguuucucucaccauuuccacaauaugcuucuucaugcaaauugccaucuugauaacuacuguaacauuacauuucaagcaaugugaauucaacucccccccaaacaaccgagugaugcugugugaaccaacaauaauagaaagaaacauaacagagauaguguaucugaccaacaccaccauagagaaggaaauaugccccaaacuagcagaauacagaaauuggucaaagccgcaaugugacauuacaggauuugcaccuuuuucuaaggacaauucgauuaggcuuuccgcugguggggacaucugggugacaagagaaccuuaugugucaugcgauccuaacaaguguuaucaauuugcccuuggacagggaacaacacuaaacaacgugcauucaaauaacacaguacgugauaggaccccuuaucggacccuauugaugaaugaguuagguguuccuuuucaucuggggaccaagcaagugugcauagcaugguccagcucaaguugucacgauggaaaagcauggcugcauguuuguauaacgggggaugauaaaaaugcaacugcuagcuucauuuacaaugggaagcuuguagauaguguuguuucaugguccaaagaaauccucaggacccaggagucagaaugcguuuguaucaauggaacuuguacaguaguaaugacugaugggagugcuucaggaaaagcugauacuaaaauacuauucauugaggaggggaaaaucguucauacuagcacauugucaggaagugcucagcaugucgaggagugcucuugcuauccucgauauccuggugucagaugugucugcagagacaacuggaaaggcuccaauaggcccaucguagauauaaacauaaaggaucauagcauuguuuccaguuauguguguucaggacuuguuggagacacacccagaaaaaacgacagcuccagcaguagccauuguuuggauccuaacaaugaagaagguggucauggagugaaaggcugggccuuugaugauggaaaugacguguggaugggaagaacgaucaacgagacuucacguuuaggguaugaaaccuucaaagucauugaaggcugguccaacccuaaguccaaauugcagauaaauaggcaagucauaguugacagagguaauagguccgguuauucugguauuuucucuguugaaggcaaaagcugcaucaaucggugcuuuuauguagaguugauuaggggaagaaaagaggaaacuggagucuuguggaccucaaacaguauuguuguguuuuguggcaccucagguacauauggaacaggcucauggccugauggggcggaccucaaucucaugccuauauaa

SEQ ID NO: 56045 - RNA, 1410 nt, Artificial Sequence; identical to SEQ ID NO: 56042
  derived and/or modified CDS sequence (wt) from neuraminidase__InfluenzaA__AHC58878

SEQ ID NO: 56046 - RNA, 1410 nt, Artificial Sequence; identical to SEQ ID NO: 55983
  derived and/or modified CDS sequence (wt) from neuraminidase__InfluenzaA__AHC58890

SEQ ID NO: 56047 - RNA, 1410 nt, Artificial Sequence
  derived and/or modified CDS sequence (wt) from neuraminidase__InfluenzaA__AHC58902
augaauccaaaucaaaagauaauaacgauuggcucuguuucucucaccauuuccacaauaugcuucuucaugcaaauugccaucuugauaacuacuguaacauuacauuucaagcaauaugaauucaacucccccccaaacaaccaagugaugcugugugaaccaacaauaauagaaagaaacauaacagagauaguguaucugaccaacaccaccauagagaaggaaauaugucccaaacuagcagaauacagaaauuggucaaagccgcaaugugacauuacaggauuugcaccuuuuucuaaggacaauucgauuaggcuuuccgcugguggggacaucugggugacaagagaaccuuaugugucaugcgauccuaacaaguguuaucaauuugcccuuggacagggaacaacacuaaacaacgugcauucaaauaacacaguacgugauaggaccccuuaucggacccuauugaugaaugaguuagguguuccuuuucaucuggggaccaagcaagugugcauagcaugguccagcucaaguugucacgauggaaaagcauggcugcauguuuguauaacgggagaugauaaaaaugcaacugcuagcuucauuuacaaugggaagcuuguagauaguguuguuucaugguccaaagaaauccucaggacccaggagucagaaugcguuuguaucaauggaacuuguacaguaguaaugacugaugggagugcuucaggaaaagcugauacuaaaauacuauucauugaggaggggaaaaucguucauacuagcacauugucaggaagugcucagcaugucgaggagugcucuugcuauccucgauauccuggugucagaugugucugcagagacaacuggaaaggcuccaauaggcccaucguagauauaaacauaaaggaucauagcauuguuuccaguuauguguguucaggacuuguuggagacacacccagaaaaaacgacagcuccagcaguagccauuguuuggauccuaacaaugaagaagguggucauggagugaaaggcugggccuuugaugauggaaaugacguguggaugggaagaacgaucaacgagacuucacguuuaggguaugaaaccuucaaagucauugaaggcugguccaacccuaaguccaaauugcagauaaauaggcaagucauaguugacagagguaauagguccgguuauucugguauuuucucuguugaaggcaaaagcugcaucaaucggugcuuuuauguggaguugauuaggggaagaaaagaggaaacugaagucuuguggaccucaaacaguauuguuguguuuuguggcaccucagguacauauggaacaggcucauggccugauggggcggaccucaaucucaugccuauauaa

SEQ ID NO: 56048 - RNA, 1410 nt, Artificial Sequence
  derived and/or modified CDS sequence (wt) from neuraminidase__InfluenzaA__AHC58996
augaacccaaaucaaaagauaauaacgauuggcucuguuucucucaccauuuccacaauaugcuucuucaugcaaauugccaucuugauaacuacuguaacauugcauuucaagcaauacgaauucuacucccccccaaacaaccaagugaugcugugugaaccaacaauaauagaaagaaacauaacagagauaguguaucugaccaacaccaccauagagaaggaaauaugccccaaacuagcagaauacagaaauuggucaaagccgcaaugugacauuacaggauuugcaccuuuuucuaaggacaauucgauuaggcuuuccgcugguggggacaucugggugacaagagaaccuuaugugucaugcgauccugacaaguguuaucaauuugcccuuggacagggaacaacacuaaacaacgugcauucaaauaacacaguacgugauaggaccccuuaucggacccuauugaugaaugaguuagguguuccuuuucaucuggggaccaagcaagugugcauagcaugguccagcucaaguugucacgauggaaaagcauggcugcauguuuguauaacgggggaugauaaaaaugcaacugcuagcuucauuuacaaugggaggcuuguagauaguguuguuucaugguccaaagaaauccucaggacccaggagucagaaugcguuuguaucaauggaacuuguacaguaguaaugacugaugggagugcuucaggaaaagcugauacuaaaauacuauucauugaggaggggaaaaucguucauacuagcacauugucaggaagugcucagcaugucgaggagugcucuugcuauccucgauauccuggugucagaugugucugcagagacaacuggaaaggcuccaauaggcccaucguugauauaaacauaaaggaucauagcauuguuuccaguuauguguguucaggacuuguuggagacacacccagaaaaaacgacagcuccagcaguagccauuguuuggauccuaacaaugaagaagguggucauggagugaaaggcugggccuuugaugauggaaaugacguguggaugggaagaacgaucaacgagacgucacgcuuaggguaugaaaccuucaaagucauugaaggcugguccaacccuaaguccaaauugcagauaaauaggcaagucauaguugacagagguaauagguccgguuauucugguauuuucucuguugaaggcaagagcugcaucaaucggugcuuuuauguggaguugauuaggggaagaaaagaggaaacugaagucuuguggaccucaaacaguauuguuguguuuuguggcaccucagguacauauggaacaggcucauggccugauggggcggaccucaaucucaugccuauauaa

SEQ ID NO: 56049 - RNA, 1410 nt, Artificial Sequence; identical to SEQ ID NO: 55983
  derived and/or modified CDS sequence (wt) from neuraminidase__InfluenzaA__AHC59008

SEQ ID NO: 56050 - RNA, 1410 nt, Artificial Sequence
  derived and/or modified CDS sequence (wt) from neuraminidase__InfluenzaA__AHC59020
augaauccaaaucaaaagauaauaacgauuggcucuguuucucucaccauuuccacaauaugcuucuucaugcaaauugccaucuugauaacuacuguaacauuacauuucaagcaauaugaauucaacucccccccaaacaaccaagugaugcugugugaaccaacaauaauagaaagaaacauaacagagauaguguaucugaccaacaccaccauagagaaggaaauaugccccaaacuagcagaauacagaaauuggucaaagccgcaaugugacauuacaggauuugcaccuuuuucuaaggacaauucgauuaggcuuuccgcugguggggacaucugggugacaagagaaccuuaugugucaugcgauccuaacaaguguuaucaauuugcccuuggacagggaacaacacuaaacaacgugcauucaaauaacacaguacgugauaggaccccuuaucggacccuauugaugaaugaguuagguguuccuuuucaucuggggaccaagcaagugugcauagcaugguccagcucaaguugucacgauggaaaagcauggcugcauguuuguauaacgggggaugauaaaaaugcaacugcuagcuucauuuacaaugggaagcuuguagauaguguuguuucaugguccaaagaaauccucaggacccaggagucagaaugcguuuguaucaauggaacuuguacaguaguaaugacugaugggagugcuucaggaaaagcugauacuaaaauacuauucauugaggaggggaaaaucguucauacuagcacauugucaggaagugcccagcaugucgaggagugcucuugcuauccucgauauccuggugucagaugugucugcagagacaacuggaaaggcuccaauaggcccaucguagauauaaacauaaaggaucauagcauuguuuccaguuauguguguucaggacuuguuggagacacacccagaaaaaacgacagcuccagcaguagccauuguuuggauccuaacaaugaagaagguggucauggagugaaaggcugggccuuugaugauggaaaugacguguggaugggaagaacgaucaacgagacuucacguuuaggguaugaaaccuucaaagucauugaaggcugguccaacccuaaguccaaauuacagauaaauaggcaagucauaguugacagagguaauagguccgguuauucugguauuuucucuguugaaggcaaaagcugcaucaaucggugcuuuuauguggaguugauuaggggaagaaaagaggaaacugaagucuuguggaccucaaacaguauuguuguguuuuguggcaccucagguacauauggaacaggcucauggccugauggggcggaccucaaucucaugccuauauaa

SEQ ID NO: 56051 - RNA, 1410 nt, Artificial Sequence
  derived and/or modified CDS sequence (wt) from neuraminidase__InfluenzaA__AHC59032
augaauccaaaucaaaagauaauaacgauuggcucuguuucucucaccauuuccacaauaugcuucuucaugcaaauugccaucuugauaacuacuguaacauuacauuucaagcaauaugaauucaacucccccccaaacaaccaagugaugcugugugaaccaacaauaauagaaagaaacauaacagagauaguguaucugaccaacaccaccauagagaaggaaauaugucccaaacuagcagaauacagaaauuggucaaagccgcaaugugacauuacaggauuugcaccuuuuucuaaggacaauucgauuaggcuuuccgcugguggggacaucugggugacaagagaaccuuaugugucaugcgauccuaacaaguguuaucaauuugcccuuggacagggaacaacacuaaacaacgugcauucaaauaacacaguacgugauaggaccccuuaucggacccuauugaugaaugaguuagguguuccuuuucaucuggggaccaagcaagugugcauagcaugguccagcucaaguugucacgauggaaaagcauggcugcauguuuguauaacgggggaugauaaaaaugcaacugcuagcuucauuuacaaugggaagcuuguagauaguguuguuucaugguccaaagaaauccucaggacccaggagucagaaugcguuuguaucaauggaacuuguacaguaguaaugacugaugggagugcuucaggaaaagcugauacuaaaauacuauucauugaggaggggaaaaucguucauacuagcacauugucaggaagugcucagcaugucgaggagugcucuugcuauccucgauauccuagugucagaugugucugcagagacaacuggaaaggcuccaauaggcccaucguagauauaaacauaaaggaucauagcauuguuuccaguuauguguguucaggacuuguuggagacacacccagaaaaaacgacagcuccagcaguagccauuguuuggauccuaacaaugaagaagguggucauggagugaaaggcugggccuuugaugauggaaaugacguguggaugggaagaacgaucaacgagacuucacguuuaggguaugaaaccuucaaagucauugaaggcugguccaacccuaaguccaaauugcagauaaauaggcaagucauaguugacagagguaauagguccgguuauucugguauuuucucuguugaaggcaaaagcugcaucaaucggugcuuuuauguggaguugauuaggggaagaaaagaggaaacugaagucuuguggaccucaaacaguauuguuguguuuuguggcaccucagguacauauggaacaggcucauggccugauggggcggaccucaaucucaugccuauauaa

SEQ ID NO: 56052 - RNA, 1410 nt, Artificial Sequence; identical to SEQ ID NO: 56019
  derived and/or modified CDS sequence (wt) from neuraminidase__InfluenzaA__AHC59044

SEQ ID NO: 56053 - RNA, 1410 nt, Artificial Sequence; identical to SEQ ID NO: 52717
  derived and/or modified CDS sequence (wt) from neuraminidase__InfluenzaA__AHC59056

SEQ ID NO: 56054 - RNA, 1410 nt, Artificial Sequence; identical to SEQ ID NO: 55983
  derived and/or modified CDS sequence (wt) from neuraminidase__InfluenzaA__AHC59068

SEQ ID NO: 56055 - RNA, 1410 nt, Artificial Sequence; identical to SEQ ID NO: 55983
  derived and/or modified CDS sequence (wt) from neuraminidase__InfluenzaA__AHC59080

SEQ ID NO: 56056 - RNA, 1410 nt, Artificial Sequence
  derived and/or modified CDS sequence (wt) from neuraminidase__InfluenzaA__AHC59092
augaauccaaaucaaaagauaauaacgauuggcucuguuucucucaccauuuccacaauaugcuucuucaugcaaauugccaucuugguaacuacuguaacauugcauuucaagcaauaugaauucaacucccccccaaacaaccaagugaugcugugugaaccaacaauaauagaaagaaacaucacagagauaguguaucugaccaacaccaccauagagaaggaaauaugccccaaaccagcagaauacagaaauuggucaaaaccgcaaugugacauuacaggauuugcaccuuuuucuaaggacaauucgauuaggcuuuccgcugguggggacaucugggugacaagagaaccuuaugugucaugcgauccugacaaguguuaucaauuugcccuuggacagggaacaacacuaaacaaugugcauucaaauaacacaguacgugauaggaccccuuaucggacuuuauugaugaaugaguuagguguuccuuuucaucuggggaccaagcaagugugcauagcaugguccagcucaaguugucacgauggaaaagcauggcugcauguuuguauaacgggggaugauaaaaaugcaacugcuagcuucauuuacaaugggaggcuuguagauaguguuguuucaugguccaaagaaauucucaggacccaggagucagaaugcguuuguaucaauggaacuuguacaguaguaaugacugauggaagugcuucaggaaaagcugauacuaaaauacuauucauugaggaggggaaaaucguucauacuagcacauugucaggaagugcucagcaugucgaggagugcucuugcuauccucgauauccuggugucagaugugucuguagagacaacuggaaaggcuccaauaggcccaucguagauauaaacauaaaggaucauagcauugucuccaguuauguguguucaggacuuguuggagacacacccagaaaaaacgacagcuccagcaguggccauuguuuggauccuaacaaugaagaagguggucauggagugaaaggcugggccuuugaugauggaaaugacguguggaugggaagaacaaucaacgagacgucacgcuuaggguaugaaaccuucaaagucauugaaggcugguccaacccuaaguccaaauugcagauaaauaggcaagucauaguugacagaggugauagguccgguuauucugguauuuucucuguugaaggcaaaagcugcaucaaucggugcuuuuauguggaguugauuaggggaagaaaagaggaaacugaagucuuguggaccucaaacaguauuguuguguuuuguggcaccucagguacauauggaacaggcucauggccugauggggcggaccucaaucucaugccuauauaa

SEQ ID NO: 56057 - RNA, 1410 nt, Artificial Sequence
  derived and/or modified CDS sequence (wt) from neuraminidase__InfluenzaA__AHC59104
augaacccaaaucaaaagauaauaacgauuggcucuguuucucucaccauuuccacaauaugcuucuucaugcaaauugccaucuugauaacuacuguaacauugcauuucaagcaauaugaauucuacucccccccaaacaaccaagugaugcugugugaaccaacaauaauaaaaagaaacauaacagagauaguguaucugaccaacaccaccauagagaaggaaauaugccccaaacuagcagaauacagaaauuggucaaagccgcaaugugacauuacaggauuugcaccuuuuucuaaggacaauucgauuaggcuuuccgcugguggggacaucugggugacaagagaaccuuaugugucaugcgauccugacaaguguuaucaauuugcccuuggacagggaacaacacuaaacaacgugcauucaaauaacacaguacgugauaggaccccuuaucggacccuauugaugaaugaguuagguguuccuuuucaucuggggaccaagcaagugugcauagcaugguccagcucaaguugucacgauggaaaagcauggcugcauguuuguauaacgggggaugauaaaaaugcaacugcuagcuucauuuacaaugggaggcuuguagauaguguuguuucaugguccaaagaaauccucaggacccaggagucagaaugcguuuguaucaauggaacuuguacaguaguaaugacugaugggagugcuucaggaaaagcugauacuaaaauacuauucauugaggaggggaaaaucguucauacuagcacauugucaggaagugcucagcaugucgaggagugcucuugcuauccucgauauccuggugucagaugugucugcagagacaacuggaaaggcuccaauaggcccaucguugauauaaacauaaaggaucauagcauuguuuccaguuauguguguucaggacuuguuggagacacacccagaaaaaacgacagcuccagcaguagccauuguuuggauccuaacaaugaagaagguggucauggagugaaaggcugggccuuugaugauggaaaugacguguggaugggaagaacgaucaacgagacgucacgcuuaggguaugaaaccuucaaagucauugaaggcugguccaacccuaaguccaaauugcagauaaauaggcaagucauaguugacagagguaauagguccgguuauucugguauuuucucuguugaaggcaagagcugcaucaaucggugcuuuuauguggaguugauuaggggaagaaaagaggaaacugaagucuuguggaccucaaacaguauuguuguguuuuguggcaccucagguacauauggaacaggcucauggccugauggggcggaccucaaucucaugccuauauaa

SEQ ID NO: 56058 - RNA, 1410 nt, Artificial Sequence
  derived and/or modified CDS sequence (wt) from neuraminidase__InfluenzaA__AHC59116
augaauccaaaucaaaagauaauaacgauuggcucuguuucucucaccauuuccacaauaugcuucuucaugcaaauugccaucuugauaacuacuguaacauugcauuucaagcaauaugaauucaacucccccccaaacaaccaagugaugcugugugaaccaacaauaauagaaagaaacauaacagagauaguguaucugaccaacaccaccauagagaaggaaauaugccccaaacuagcagaauacagaaauuggucaaagccgcaaugugacauuacaggauuugcaccuuuuucuaaggacaauucgauuaggcuuuccgcugguggggacaucugggugacaagagaaccuuaugugucaugcgauccuaacaaguguuaucaauuugcccuuggacagggaacaacacuaaacaacgugcauucaaauaacacaguacgugauaggaccccuuaucggacccuauugaugaaugaguuagguguuccuuuucaucuggggaccaagcaagugugcauagcaugguccagcucaaguugucacgauggaaaagcauggcugcauguuuguauaacgggggaugauaaaaaugcaacugcuagcuucauuuacaaugggaagcuuguagauaguguuguuucaugguccaaagaaauccucaggacccaggagucagaaugcguuuguaucaauggaacuuguacaguaguaaugacugaugggagugcuucaggaaaagcugauacuaaaauacuauucauugaggaggggaaaaucguucauacuagcacauugucaggaagugcucagcaugucgaggagugcucuugcuauccucgauauccuggugucagaugugucugcagagacaacuggaaaggcuccaauaggcccaucguagauauaaacauaaaggaucauagcauuguuuccaguuauguguguucaggacuuguuggagacacacccagaaaaaacgacagcuccagcaguagccauuguuuggauccuaacaaugaagaagguggucauggagugaaaggcugggccuuugaugauggaaaugacguguggaugggaagaacgaucaacgagacuucacguuuaggguaugaaaccuucaaagucauugaaggcugguccaacccuaaguccaaauugcagauaaauaggcaagucauaguugacagagguaauagguccgguuauucugguauuuucucuguugaaggcaaaagcugcaucaaucggugcuuuuauguggaguugauuaggggaagagaagaggaaacugaagucuuguggaccucaaacaguauuguuguguuuuguggcaccucagguacauauggaacaggcucauggccugauggggcggaccucaaucucaugccuauauaa

SEQ ID NO: 56059 - RNA, 1410 nt, Artificial Sequence
  derived and/or modified CDS sequence (wt) from neuraminidase__InfluenzaA__AHC59128
augaacccaaaucaaaagauaauaacgauuggcucuguuucucucaccauuuccacaauaugcuucuucaugcaaauugccaucuugauaacuacuguaacauugcauuucaagcaauaugaauucuacucccccccaaacaaccaagugaugcugugugaaccaacaauaauggaaagaaacauaacagagauaguguaucugaccaacaccaccauagagaaggaaauaugccccaaacuagcagaauacagaaauuggucaaagccgcaaugugacauuacaggauuugcaccuuuuucuaaggacaauucgauuaggcuuuccgcugguggggacaucugggugacaagagaaccuuaugugucaugcgacccugacaaguguuaucaauuugcccuuggacagggaacaacacuaaacaacgugcauucaaauaacacaguacgugauaggaccccuuaucggacccuauugaugaaugaguuagguguuccuuuucaucuggggaccaagcaagugugcauagcaugguccagcucaaguugucacgauggaaaagcauggcugcauguuuguguaacgggggaugauaaaaaugcaacugcuagcuucauuuacaaugggaggcuuguagauaguguuguuucaugguccaaagaaauccucaggacccaggagucagaaugcguuuguaucaauggaacuuguacaguaguaaugacugaugggagugcuucaggaaaagcugauacuaaaauacuauucauugaggaggggaaaaucguucauacuagcacauugucaggaagugcucagcaugucgaggagugcucuugcuauccucgauauccuggugucagaugugucugcagagacaacuggaaaggcuccaauaggcccaucguugauauaaacauaaaggaucauagcauuguuuccaguuauguguguucaggacuuguuggagacacacccagaaaaaacgacagcuccagcaguagccauuguuuggauccuaacaaugaagaagguggucauggagugaaaggcugggccuuugaugauggaaaugacguguggaugggaagaacgaucaacgagacgucacgcuuaggguaugaaaccuucaaagucauugaaggcugguccaacccuaaguccaaauugcagauaaauaggcaagucauaguugacagagguaauagguccgguuauucugguauuuucucuguugaaggcaagagcugcaucaaucgaugcuuuuauguggaguugauuaggggaagaaaagaggaaacugaagucuuguggaccucaaacaguauuguuguguuuuguggcaccucagguacauauggaacaggcucauggccugauggggcggaccucaaucucaugccuauauaa

SEQ ID NO: 56060 - RNA, 1410 nt, Artificial Sequence
  derived and/or modified CDS sequence (wt) from neuraminidase__InfluenzaA__AHC59152
augaacccaaaucaaaagauaauaacgauuggcucuguuucucucaccauuuccacaauaugcuucuucaugcaaguugccaucuugauaacuacuguaacauugcauuucaagcaauaugaauucaacucccccccaaacaaccaagugaugcugugugaaccaacaauaauagaaagaaacauaacagagauauuguaucugaccaacaccaccauagagaaggaaauaugccccaaacuagcagaauacagaaauuggucaaagccgcaaugugacauuacaggauuugcaccuuuuucuaaggacaauucgauuaggcuuuccgcugguggggacaucugggugacaagagaaccuuaugugucaugcgauccugacaaguguuaucaauuugcccuuggacagggaacaacacuaaacaacgugcauucaaauaacacaguacgugauaggaccccuuaucggacccuauugaugaaugaguuagguguuccuuuucaucuggggaccaagcaagugugcauagcaugguccagcucaaguugucacgauggaaaagcauggcugcauguuuguauaacgggggaugauaaaaaugcaacugcuagcuucauuuacaaugggaagcuuguagauaguguuguuucaugguccaaagaaauccucaggacccaggagucagaaugcguuuguaucaauggaacuuguacaguaguaaugacugaugggagugcuucaggaaaagcugauacuaaaauacuauucauugaggaggggaaaaucguucauacuagcacauugucaggaagugcucagcauguagaggagugcucuugcuauccucgauauccuggugucagaugugucugcagagacaacuggaaaggcuccaauaggcccaucguagauauaaacauaaaggaucauagcauuguuuccaguuauguguguucaggacuuguuggagacacacccagaaaaaacgacagcuccagcaguagccauuguuuggauccuaacaaugaagaagguggucauggagugaaaggcugggccuuugaugauggaaaugacguguggaugggaagaacgaucaacgagacgucacguuuaggguaugaaaccuucaaagucauugaaggcugguccaacccuaaguccaaauugcagauaaauaggcaagucauaguugacagagguaauagguccgguuauucugguauuuucucuguugaaggcaaaagcugcaucaaucggugcuuuuauguggaguugauuaggggaagaaaagaggaaacugaagucuuguggaccucaaacaguauuguuguguuuuguggcaccucagguacauauggaacaggcucauggccugauggggcggaccucaaucucaugccuauauaa

SEQ ID NO: 56061 - RNA, 1410 nt, Artificial Sequence
  derived and/or modified CDS sequence (wt) from neuraminidase__InfluenzaA__AHC59188
augaauccaaaucaaaagauaauaacgauuggcucuguuucucucaccauuuccacaauaugcuucuucaugcaaauugccaucuugauaacuacuguaacauugcauuucaagcaauaugaauucaacccccccccaaacaaccaaguggugcugugugaaccaacaauaauagaaagaaacaucacagagauaguguaucugaccaacaccaccauagagaaggaaauaugccccaaacuagcagaauacagaaauuggucaaagccgcaaugugacauuacaggauuugcaccuuuuucuaaggacaauucgauuaggcuuuccgcugguggggacaucugggugacaagagaaccuuaugugucaugcgauccugacaaguguuaucaauuugcccuuggacagggaacaacacuaaacaacgugcauucaaauaacacaguacgugauaggaccccuuaucggacccuauugaugaaugaguuagguguuccuuuucaucuggggaccaagcaagugugcauagcaugguccagcucaaguugucacgauggaaaagcauggcugcauguuuguauaacgggggaugauaaaaaugcaacugcuagcuucauuuacaaugggaggcuuguagauaguguuguuucaugguccaaagaaauucucaggacccaggagucagaaugcguuuguaucaauggaacuuguacaguaguaaugacugauggaagugcuucaggaaaagcugauacuaaaauacuauucauugaggaggggaaaaucguucauacuagcacacugucgggaagugcucagcaugucgaggagugcucuugcuauccucgauauccuggugucagaugugucugcagagacaacuggaaaggcuccaauaggcccaucguagauauaaacauaaaggaucauagcauugucuccaguuauguguguucaggacuuguuggagacacacccagaaaaaacgacagcuccagcaguagccauuguuuggauccuaacaaugaagaagguggucauggagugaaaggcugggccuuugaugauggaaaugacguguggaugggaagaacaaucaacgagacgucacgcuuaggguaugaaaccuucaaagucauugaaggcugguccaacccuaaguccaaauugcagauaaauaggcaagucauaguugacagaggugauagguccgguuauucugguauuuucucuguugaaggcaaaagcugcaucaaucggugcuuuuauguggaguugauuaggggaagaaaagaggaaacugaagucuuguggaccucaaacaguauuguuguguuuuguggcaccucagguacauauggaacaggcucauggccugauggggcggaccucaaucucaugccuauauaa

SEQ ID NO: 56062 - RNA, 1410 nt, Artificial Sequence
  derived and/or modified CDS sequence (wt) from neuraminidase__InfluenzaA__AHC59200
augaauccaaaucaaaagauaauaacgauuggcucuguuucucucaccauuuccacaauaugcuucuucaugcaaauugccaucuugauaacuacuguaacauugcauuucaagcaauaugaauucaacucccccccaaacaaccaagugaugcugugugaaccaacaauaauagaaagaaacauaacagagauaguguaucugaccaacaccaccauagagaaggaaauaugccccaaacuagcagaauacagaaauuggucaaagccgcaaugugacauuacaggauuugcaccuuuuucuaaggacaauucgauuaggcuuuccgcugguggggacaucugggugacaagagaaccuuaugugucaugcgauccugacaaguguuaucaauuugcccuuggacagggaacaacacuaaacaacgugcauucaaauaacacaguacgugauaggaccccuuaucggacccuauugaugaaugaguuagguguuccuuuucaucuggggaccaagcaagugugcauagcaugguccagcucaaguugucacgauggaaaagcauggcugcauguuuguauaacgggggaugauaaaaaugcaacugcuagcuucauuuacaaugggaggcuuguagauaguguuguuucaugguccaaagaaauucucaggacccaggagucagaaugcguuuguaucaauggaacuuguacaguaguaaugacugauggaagugcuucaggaaaagcugauacuaaaauacuauucauugaggaggggaaaaucguucauacuagcacauugucaggaagugcucagcaugucgaggagugcucuugcuauccucgauauccuggugucagaugugucugcagagacaacuggaaaggcuccaauaggcccaucguagauauaaacauaaaggaucauagcauugucuccaguuauguguguucaggacuuguuggagacacacccagaaaaaacgacagcuccagcaguagccauuguuuggauccuaacaaugaagaagguggucauggagugaaaggcugggccuuugaugauggaaaugacguguggaugggaagaacaaucaacgagacgucacgcuuaggguaugaaaccuucaaagucauugaaggcugguccaacccuaaguccaaauugcagauaaauaggcaagucauaguugacagagguaauagguccgguuauucugguauuuucucuguugaaggcaaaagcugcaucaaucggugcuuuuauguggaguugauuaggggaagaaaagaggaaacugaagucuuguggaccucaaacaguauuguuguguuuuguggcaccucagguacauauggaacaggcucauggccugauggggcggaccucaaucucaugccuauauaa

SEQ ID NO: 56063 - RNA, 1410 nt, Artificial Sequence
  derived and/or modified CDS sequence (wt) from neuraminidase__InfluenzaA__AHC59212
augaauccaaaucaaaagauaauaacgauuggcucuguuucucucaccauuuccacaauaugcuucuucaugcaaauugccaccuugauaacuacuguaacauugcauuucaagcaauaugaauucaacucccccccaaacaaccaagugaugcugugugaaccaacaauaauagaaagaaacauaacagagauaguguaucugaccaacaccaccauagagaaggaaauaugccccaaacuagcagaauacagaaauuggucaaagccgcaaugugacauuacaggauuugcaccuuuuucuaaggacaauucgauuaggcuuuccgcugguggggacaucugggugacaagagaaccuuaugugucaugugauccugacaaguguuaucaauuugcccuuggacagggaacaacacuaaacaacgugcauucaaauaacacaguacgugauaggaccccuuaucggacccuauugaugaaugaguuagguguuccuuuucaucuggggaccaagcaagugugcauagcaugguccagcucaagcugucacgauggaaaagcauggcugcauguuuguauaacgggggaugauaaaaaugcaacugcuagcuucauuuacaaugggaggcuuguagauaguguuguuucaugguccaaagaaauccucaggacccaggagucagaaugcguuugcaucaauggaacuuguacaguaguaaugacugaugggagugcuucaggaaaagcugauacuaaaauacuauucauugaggaggggaaaaucguucauacuagcacauugucaggaagugcucagcaugucgaggagugcucuugcuauccucgauauccuggugucagaugugucugcagagacaacuggaaaggcuccaauaggcccaucguagauauaaacauaaaggaucauagcauuguuuccaguuauguguguucaggacuuguuggagacacacccagaaaaaacgacagcuccagcaguagccauuguuuggauccuaacaaugaagaagguggucauggagugaaaggcugggccuuugaugauggaaaugacguguggaugggaagaacgaucaacgagacgucacguuuaggguaugaaaccuucaaagucauugaaggcugguccaacccuaaguccaaauugcagauaaauaggcaagucauaguugacagaggugauagguccgguuauucugguauuuucucuguugaaggcaaaagcugcaucaaucggugcuuuuauguggaguugauuaggggaagaaaagaggaaacugaagucuuguggaccucaaacaguauuguuguguuuuguggcaccucagguacauauggaacaggcucauggccugauggggcggaccucaaucucaugccuauauaa

SEQ ID NO: 56064 - RNA, 1410 nt, Artificial Sequence; identical to SEQ ID NO: 55987
  derived and/or modified CDS sequence (wt) from neuraminidase__InfluenzaA__AHC59224

SEQ ID NO: 56065 - RNA, 1410 nt, Artificial Sequence
  derived and/or modified CDS sequence (wt) from neuraminidase__InfluenzaA__AHC59236
augaacccaaaucaaaagauaauaacgauuggcucuguuucucucaccauuuccacaauaugcuucuucaugcaaauugccaucuugauaacuacuguaacauugcauuucaagcaauaugaauucuacucccccccaaacaaccaagugaugcugugugaaccaacaauaauagaaagaaacauaacagagauaguguaucugaccaacaccaccauagagaaggaaauaugccccaaacuagcagaauacagaaauuggucaaagccgcaaugugacauuacaggauuugcaccuuuuucuaaggacaauucgauuaggcuuuccgcugguggggacaucugggugacaagagaaccuuaugugucaugcgauccugacaaguguuaucaauuugcccuuggacagggaacaacacuaaacaacgugcauucaaauaacacaguacaugauaggaccccuuaucggacccuauugaugaaugaguuagguguuccuuuucaucuggggaccaagcaagugugcauagcaugguccagcucaaguugucacgauggaaaagcauggcugcauguuuguauaacgggggaugauaaaaaugcaacugcuagcuucauuuacaaugggaggcuuguagauaguguuguuucaugguccaaagaaauccucaggacccaggagucagaaugcguuuguaucaauggaacuuguacaguaguaaugacugaugggagugcuucaggaaaagcugauacuaaaauacuauucauugaggaggggaaaaucguucauacuagcacauugucaggaagugcucagcaugucgaggagugcucuugcuauccucgauauccuggugucagaugugucugcagagacaacuggaaaggcuccaauaggcccaucguugauauaaacauaaaggaucauagcauuguuuccaguuauguguguucaggacuuguuggagacacacccagaaaaaacgacagcuccagcaguagccauuguuuggauccuaacaaugaagaagguggucauggagugaaaggcugggccuuugaugauggaaaugacguguggaugggaagaacgaucaacgagacgucacgcuuaggguaugaaaccuucaaagucauugaaggcugguccaacccuaaguccaaauugcagauaaauaggcaagucauaguugacagagguaauagguccgguuauucugguauuuucucuguugaaggcaagagcugcaucaaucggugcuuuuauguggaguugauuaggggaagaaaagaggaaacugaagucuuguggaccucaaacaguauuguuguguuuuguggcaccucagguacauauggaacaggcucauggccugauggggcggaccucaaucucaugccuauauaa

SEQ ID NO: 56066 - RNA, 1410 nt, Artificial Sequence; identical to SEQ ID NO: 56009
  derived and/or modified CDS sequence (wt) from neuraminidase__InfluenzaA__AHC59260

SEQ ID NO: 56067 - RNA, 1410 nt, Artificial Sequence; identical to SEQ ID NO: 56048
  derived and/or modified CDS sequence (wt) from neuraminidase__InfluenzaA__AHC59272

SEQ ID NO: 56068 - RNA, 1410 nt, Artificial Sequence
  derived and/or modified CDS sequence (wt) from neuraminidase__InfluenzaA__AHC59284
augaauccaaaucaaaagauaauaacgauuggcucuguuucucucaccauuuccacaauaugcuucuucaugcaaauugccaucuugauaacuacuguaacauuacauuucaagcaauaugaauucaacucccccccaaacaaccaagugaugcugugugaaccaacaauaauagaaagaaacauaacagagauaguguaucugaccaacaccaccauagagaaggaaauaugucccaaacuagcagaauacagaaauuggucaaagccgcaaugugacauuacaggauuugcaccuuuuucuaaggacaauucgauuaggcuuuccgcugguggggacaucugggugacaagagaaccuuaugugucaugcgauccuaacaaguguuaucaauuugcccuuggacagggaacaacacuaaacaacgugcauucaaauaacacaguacgugauaggaccccuuaucggacccuauugaugaaugaguuagguguuccuuuucaucuggggaccaagcaagugugcauagcaugguccagcucaaguugucacgauggaaaagcauggcugcauguuugcauaacgggggaugauaaaaaugcaacugcuagcuucauuuacaaugggaagcuuguagauaguguuguuucaugguccaaagaaauccucaggacccaggagucagaaugcguuuguaucaauggaacuuguacaguaguaaugacugaugggagugcuucaggaaaagcugauacuaaaauacuauucauugaggaggggaaaaucguucauacuagcacauugucaggaagugcucagcaugucgaggagugcucuugcuauccucgauauccuggugucagaugugucugcagagacaacuggaaaggcuccaauaggcccaucguagauauaaacauaaaggaucauagcauuguuuccaguuauguguguucaggacuuguuggagacacacccagaaaaaacgacagcuccagcaguagccauuguuuggauccuaacaaugaagaagguggucauggagugaaaggcugggccuuugaugauggaaaugacguguggaugggaagaacgaucaacgagacuucacguuuaggguaugaaaccuucaaagucauugaaggcugguccaacccuaaguccaaauugcagauaaauaggcaagucauaguugacagagguaauagguccgguuauucugguauuuucucuguugaaggcaaaagcugcaucaaucggugcuuuuauguggaguugaucaggggaagaaaagaggaaacugaagucuuguggaccucaaacaguauuguuguguuuugugguaccucagguacauauggaacaggcucauggccugauggggcggaccucaaucucaugccuauauaa

SEQ ID NO: 56069 - RNA, 1410 nt, Artificial Sequence
  derived and/or modified CDS sequence (wt) from neuraminidase__InfluenzaA__AHC59296
augaauccaaaucaaaagauaauaacgauuggcucuguuucucucaccauuuccacaauaugcuucuucaugcaaauugccaucuugauaacuacuguaacauugcauuucaagcaauaugaauucaacucccccccaaacaaccaagugaugcugugugaaccaacaauaauagaaagaaacauaacagagauaguguaucugaccaacaccaccauagagaaggaaauaugccccaaacuagcagaauacagaaauuggucaaagccgcaaugugacauuacaggauuugcaccuuuuucuaaggacaauucgauuaggcuuuccgcugguggggacaucugggugacaagagaaccuuaugugucaugcgauccuaacaaguguuaucaauuugcccuuggacagggaacaacacuaaacaacgugcauucaaauaacacaguacgugauaggaccccuuaucggacccuauugaugaaugaguuagguguuccuuuucaucuggggaccaagcaagugugcauagcaugguccagcucaaguugucacgauggaaaagcauggcugcauguuuguauaacgggggaugauaaaaaugcaacugcuagcuucauuuacaaugggaagcuuguagauaguguuguuucaugguccaaagaaauccucaggacccaggagucagaaugcguuuguaucaauggaacuuguacaguaguaaugacugaugggagugcuucaggaaaagcugauacuaaaauacuauucauugaggaggggaaaaucguucauacuagcacauugucaggaagugcucagcaugucgaggagugcucuugcuauccucgauauccuggugucagaugugucugcagagacaacuggaaaggcuccaauaggcccaucguagauauaaaaauaaaggaucauagcauuguuuccaguuauguguguucaggacuuguuggagacacacccagaaaaaacgacagcuccagcaguagccauuguuuggauccuaacaaugaagaagguggucauggagugaaaggcugggccuuugaugauggaaaugacguguggaugggaagaacgaucaacgagacuucacguuuaggguaugaaaccuucaaagucauugaaggcugguccaacccuaaguccaaauugcagauaaauaggcaagucauaguugacagagguaauagguccgguuauucugguauuuucucuguugaaggcaaaagcugcaucaaucggugcuuuuauguggaguugauuaggggaagaaaagaggaaacugaagucuuguggaccucaaacaguauuguuguguuuuguggcaccucagguacauauggaacaggcucauggccugauggggcggaccucaaucucaugccuauauaa

SEQ ID NO: 56070 - RNA, 1410 nt, Artificial Sequence
  derived and/or modified CDS sequence (wt) from neuraminidase__InfluenzaA__AHC59308
augaauccaaaucaaaagauaauaacgauuggcucuguuucucucaccauuuccacaauaugcuucuucaugcaaauugccaucuugauaaccacuguaacauugcauuucaagcaauaugaauucaacccccccccaaacaaccaagugaugcugugugaaccaacaauaauagaaagaaacauaacagagauaguguaucugaccaacaccaccauagagaaggaaauaugccccaaacuagcagaauacagaaauuggucaaagccgcaaugugacauuacaggauuugcaccuuuuucuaaggacaauucgauuaggcuuuccgcugguggggacaucugggugacaagagaaccuuaugugucaugcgauccuaacaaguguuaucaauuugcccuuggacagggaacaacacuaaacaacgugcauucaaauaacacaguacgugauaggaccccuuaucggacccuauugaugaaugaguuagguguuccuuuucaucuggggaccaagcaagugugcauagcaugguccagcucaaguugucacgauggaaaagcauggcugcauguuuguauaacgggggaugauaaaaaugcaacugcuagcuucauuuacaaugggaagcuuguagauaguguuguuucaugguccaaagaaauccucaggacccaggagucagaaugcguuuguaucaauggaacuuguacaguaguaaugacugaugggagugcuucaggaaaagcugauacuaaaauacuauucauugaggaggggaaaaucguucauacuagcacauugucaggaagugcucagcaugucgaggagugcucuugcuauccucgauauccuggugucagaugugucugcagagacaacuggaaaggcuccaauaggcccaucguagauauaaacauaaaggaucauagcauuguuuccaguuauguguguucaggacuuguuggagacacacccagaaaaaacgacagcuccagcaguagccauuguuuggauccuaacaaugaagaagguggucauggagugaaaggcugggccuuugaugauggaaaugacguguggaugggaagaacgaucaacgagacuucacguuuaggguaugaaaccuucaaagucauugaaggcugguccaacccuaaguccaaauugcagauaaauaggcaagucaugguugacagagguaauagguccgguuauucugguauuuucucuguugaaggcaaaagcugcaucaaucggugcuuuuauguggaguugauuaggggaagaaaagaggaaacugaagucuuguggaccucaaacaguauuguuguguuuuguggcaccucagguacauauggaacaggcucauggccugauggggcggaccucaaucucaugccuauauaa

SEQ ID NO: 56071 - RNA, 1410 nt, Artificial Sequence
  derived and/or modified CDS sequence (wt) from neuraminidase__InfluenzaA__AHC59320
augaauccaaaucaaaagauaauaacgauuggcucuguuucucucaccauuuccacaauaugcuucuucaugcaaauugccaucuugauaacuacuguaacauugcauuucaagcaauaugaauucaacuccccuccaaacaaccaagugaugcugugugaaccaacaauaauagaaagaaacauaacagagauaguguaucugaccaacacaaccauagagaaggaaauaugccccaaaccagcagaauacagaaauuggucaaaaccgcaauguggcauuacaggauuugcaccuuucucuaaggacaauucgauuaggcuuuccgcugguggggacaucugggugacaagagaaccuuaugugucaugcgauccugacaaguguuaucaauuugcccuuggacagggaacaacccuaaacaacaugcauucaaauaacacaguacgugauaggaccccuuaucggacucuauugaugaaugaguuggguguuccuuuucaucuggggaccaagcaagugugcauagcaugguccagcucaaguugucacgauggaaaagcauggcugcauguuuguauaacgggggaugauaaaaaugcaacugcuagcuucauuuacaaugggaggcuuguagauaguguuguuucaugguccaaagaaauucucaggacccaggagucagaaugcguuuguaucaauggaacuuguacaguaguaaugacugauggaagugcuucaggaaaagcugauacuaaaauacuauucauugaggaggggaaaaucguucauacuagcacauugucaggaagugcucagcaugucgaagagugcucuugcuauccucgauauccuggugucagaugugucugcagagacaacuggaaaggcuccaauaggcccaucguagauauaaacauaaaggaucauagcauuguuuccaguuauguguguucaggacuuguuggagacacacccagaaaaaacgacagcuccagcaguagccauuguuuggauccuaacaaugaagaagguggucauggagugaaaggcugggccuuugaugauggaaaugacguguggaugggaagaacaaucaaugagacgucacgcuuaggguaugaaaccuucaaagucauugaaggcugguccaacccuaaguccaaauugcagauaaauaggcaagucauaguugacagaggugauagguccgguuauucugguauuuucucuguugaaggcaaaagcugcaucaaucggugcuuuuauguggaguugauuaggggaagaaaagaggaaacugaagucuuguggaccucaaacaguauuguuguguuuuguggcaccucagguacauauggaacaggcucauggccugauggggcggaccucaaucucaugccuauauaa

SEQ ID NO: 56072 - RNA, 1410 nt, Artificial Sequence
  derived and/or modified CDS sequence (wt) from neuraminidase__InfluenzaA__AHC59332
augaauccaaaucaaaagauaauaacgauuggcucuguuucucucaccauuuccacaauaugcuucuucaugcaaauugccaucuugauaacuacuguaacauugcauuucaagcaauaugaauucaacuccccuccaaacaaccaagugaugcugugugaaccaacaauaauagaaagaaacauaacagagauaguguaucugaccaacacaaccauagagaaggaaauaugccccaaaccagcagaauacagaaauuggucaaaaccgcaauguggcauuacaggauuugcaccuuucucuaaggacaauucgauuaggcuuuccgcugguggggacaucugggugacaagagaaccuuaugugucaugcgauccugacaaguguuaucaauuugcccuuggacagggaacaacacuaaacaacgugcauucaaauaacacaguacgugauaggaccccuuaucggacucuauugaugaaugaguuggguguuccuuuucaucuggggaccaagcaagugugcauagcaugguccagcucaaguugucacgauggaaaagcauggcugcauguuuguauaacgggggaugauaaaaaugcaacugcuagcuucauuuacaaugggaggcuuguagauaguguuguuucaugguccaaagaaauucucaggacccaggagucagaaugcguuuguaucaauggaacuuguacaguaguaaugacugauggaagugcuucaggaaaagcugauacuaaaauacuauucauugaggaggggaaaaucguucauacuagcacauugucaggaagugcucagcaugucgaagagugcucuugcuauccucgauauccuggugucagaugugucugcagagacaacuggaaaggcuccaauaggcccaucguagauauaaacauaaaggaucauagcauuguuuccaguuauguguguucaggacuuguuggagacacacccagaaaaaacgacagcuccagcaguagccauuguuuggauccuaacaaugaagaagguggucauggagugaaaggcugggccuuugaugauggaaaugacguguggaugggaagaacaaucaaugagacgucacgcuuaggguaugaaaccuucaaagucauugaaggcugguccaacccuaaguccaaauugcagauaaauaggcaagucauaguugacagaggugauagguccgguuauucugguauuuucucuguugaaggcaaaagcugcaucaaucggugcuuuuauguggaguugauuaggggaagaaaagaggaaacugaagucuuguggaccucaaacaguauuguuguguuuuguggcaccucagguacauauggaacaggcucauggccugauggggcggaccucaaucucaugccuauauaa

SEQ ID NO: 56073 - RNA, 1410 nt, Artificial Sequence
  derived and/or modified CDS sequence (wt) from neuraminidase__InfluenzaA__AHC59344
augaauccaaaucaaaagauaauaacgauuggcucuguuucucucaccauuuccacaauaugcuucuucaugcaaauugccaucuugauaacuacuguaacauugcauuucaagcaauaugaauucaacucccccccaaacaaccaaguggugcugugugaaccaacaauaauagaaagaaacaucacagagauaguguaucugaccaacaccaccauagagaaggaaauaugccccaaaccagcagaauacagaaauuggucaaaaccgcaaugugacauuacaggauuugcaccuuuuucuaaggacaauucgauuaggcuuuccgcugguggggacaucugggugacaagagaaccuuaugugucaugcgauccugacaaguguuaucaauuugcccuuggacagggaacaacacuaaacaaugugcauucaaauaacacaguacgugauaggaccccuuaucggacuuuauugaugaaugaguuagguguuccuuuucaucuggggaccaagcaagugugcauagcaugguccagcucaaguugucacgauggaaaagcauggcugcauguuuguauaacgggggaugauaaaaaugcaacugcuagcuucauuuacaaugggaggcuuguagauaguguuguuucaugguccaaagaaauucucaggacccaggagucagaaugcguuuguaucaauggaacuuguacaguaguaaugacugauggaagugcuucaggaaaagcugauacuaaaauacuauucauugaggaggggaaaaucguucauacuagcacauugucaggaagugcucagcaugucgaggagugcucuugcuauccucgauauccuggugucagaugugucugcagagacaacuggaaaggcuccaauaggcccaucguagauauaaacauaaaggaucauagcauugucuccaguuauguguguucaggacuuguuggagacacacccagaaaaaacgacagcuccagcaguagccauuguuuggauccuaacaaugaagaagguggucauggagugaaaggcugggccuuugaugauggaaaugacguguggaugggaagaacaaucaacgagacgucacgcuuaggguaugaaaccuucaaagucauugaaggcugguccaacccuaaguccaaauugcagauaaauaggcaagucauaguugacagaggugauagguccgguuauucugguauuuucucuguugaaggcaaaagcugcaucaaucggugcuuuuauguggaguugauuaggggaagaaaagaggaaacugaagucuuguggaccucaaacaguauuguuguguuuuguggcaccucagguacauauggaacaggcucauggccugauggggcggaccucaaucucaugccuauauaa

SEQ ID NO: 56074 - RNA, 1410 nt, Artificial Sequence
  derived and/or modified CDS sequence (wt) from neuraminidase__InfluenzaA__AHC59368
augaauccaaaucaaaagauaauaacaauuggcucuguuucucucaccauuuccacaauaugcuucuucaugcaaauugccaucuugauaacuacuguaacauuacauuucaagcaauaugaauucaacucccccccaaacaaccaagugaugcugugugaaccaacaauaauagaaagaaacauaacagagauaguguaucugaccaacaccaccauagagaaggaaauaugccccaaacuagcagaauacagaaauuggucaaagccgcaaugugacauuacaggauuugcaccuuuuucuaaggacaauucgauuaggcuuuccgcugguggggacaucugggugacaagagaaccuuaugugucaugcgauccuaacaaguguuaucaauuugcccuuggacagggaacaacacuaaacaacgugcauucaaauaacacaguacgugauaggaccccuuaucggacccuauugaugaaugaguuagguguuccuuuucaucuggggaccaagcaagugugcauagcaugguccagcucaaguugucacgauggaaaagcauggcugcauguuuguauaacgggggaugauaaaaaugcaacugcuagcuucauuuacaaugggaagcuuguagauaguguuguuucaugguccaaagaaauccucaggacccaggagucagaaugcguuuguaucaauggaacuuguacaguaguaaugacugaugggagugcuucaggaaaagcugauacuaaaauacuauucauugaggaggggaaaaucguucauacuagcacauugucaggaagugcucagcaugucgaggagugcucuugcuauccucgauauccuggugucagaugugucugcagagacaacuggaaaggcuccaauaggcccaucguagauauaaacauaaaggaucauagcauuguuuccaguuauguguguucaggacuuguuggagacacacccagaaaaaacgacagcuccagcaguagccauuguuuggauccuaacaaugaagaagguggucauggagugaaaggcugggccuuugaugauggaaaugacguguggaugggaagaacgaucgacgagacuucacguuuaggguaugaaaccuucaaagucauugaaggcugguccaacccuaaguccaaauugcagauaaauaggcaagucauaguugacagagguaauagguccgguuauucugguauuuucucuguugaaggcaaaagcugcaucaaucggugcuuuuauguggaguugauuaggggaagaaaagaggaaacugaagucuuguggaccucaaacaguauuguuguguuuuguggcaccucagguacauauggaacaggcucauggccugauggggcggaccucaaucucaugccuauauaa

SEQ ID NO: 56075 - RNA, 1410 nt, Artificial Sequence; identical to SEQ ID NO: 55983
  derived and/or modified CDS sequence (wt) from neuraminidase__InfluenzaA__AHC59380

SEQ ID NO: 56076 - RNA, 1410 nt, Artificial Sequence; identical to SEQ ID NO: 56033
  derived and/or modified CDS sequence (wt) from neuraminidase__InfluenzaA__AHC59392

SEQ ID NO: 56077 - RNA, 1410 nt, Artificial Sequence
  derived and/or modified CDS sequence (wt) from neuraminidase__InfluenzaA__AHC59404
augaacccaaaucaaaagauaauaacgauuggcucuguuucucucaccauuuccacaauaugcuuuuucaugcaaguugccaucuugauaacuacuguaacauugcauuucaagcaauaugaauucaacucccccccaaacaaccaagugaugcugugugaaccaacaauaauagaaagaaacauaacagagauaguguaucugaccaacaccaccauagagaaggaaauaugccccaaacuagcagaauacagaaauuggucaaagccgcaaugugacauuacaggauuugcaccuuuuucuaaggacaauucgauuaggcuuuccgcugguggggacaucugggugacaagagaaccuuaugugucaugcgauccugacaaguguuaucaauuugcccuuggacagggaacaacacuaaacaacgugcauucaaauaacacaguacgugauaggaccccuuaucggacccuauugaugaaugaguuagguguuccuuuucaucuggggaccaagcaagugugcauagcaugguccagcucaaguugucacgauggaaaagcauggcugcauguuuguauaacgggggaugauaaaaaugcaacugcuagcuucauuuacaaugggaagcuuguagauaguguuguuucaugguccaaagaaauccucaggacccaggagucagaaugcguuuguaucaauggaacuuguacaguaguaaugacugaugggagugcuucaggaaaagcugauacuaaaauacuauucauugaggaggggaaaaucguucauacuagcacauugucaggaagugcucagcauguagaggagugcucuugcuauccucgauauccuggugucagaugugucugcagagacaacuggaaaggcuccaauaggcccaucguagauauaaacauaaaggaucauagcauuguuuccaguuauguguguucaggacuuguuggagacacacccagaaaaaacgacagcuccagcaguagccauuguuuggauccuaacaaugaagaagguggucauggagugaaaggcugggccuuugaugauggaaaugacguguggaugggaagaacgaucaacgagacgucacguuuaggguaugaaaccuucaaagucauugaaggcugguccaacccuaaguccaaauugcagauaaauaggcaagucauaguugacagagguaauagguccgguuauucugguauuuucucuguugaaggcaaaagcugcaucaaucggugcuuuuauguggaguugauuaggggaagaaaagaggaaacugaagucuuguggaccucaaacaguauuguuguguuuuguggcaccucagguacauauggaacaggcucauggccugauggggcggaccucaaucucaugccuauauaa

SEQ ID NO: 56078 - RNA, 1410 nt, Artificial Sequence; identical to SEQ ID NO: 55987
  derived and/or modified CDS sequence (wt) from neuraminidase__InfluenzaA__AHC59416

SEQ ID NO: 56079 - RNA, 1410 nt, Artificial Sequence
  derived and/or modified CDS sequence (wt) from neuraminidase__InfluenzaA__AHC59428
augaacccaaaucaaaagauaauaacgauuggcucuguuucucucaccauuuccacaauaugcuucuucaugcaaauugccaucuugauaacuacuguaacauugcauuucaagcaauaugaauucuacucccccccaaacaaccaagugaugcugugugaaccaacaauaauagaaagaaacauaacagagauaguguaucugaccaacaccaccauagagaaggaaauaugccccaaacuagcagaauacagaaauuggucaaagccgcaaugugacauuacaggauuugcaccuuuuucuaaggacaauucgauuaggcuuuccgcugguggggacaucugggugacaagagaaccuuaugugucaugcgauccugacagguguuaucaauuugcccuuggacagggaacaacacuaaacaacgugcauucaaauaacacaguacgugauaggaccccuuaucggacccuauugaugaaugaguuagguguuccuuuucaucuggggacaaagcaagugugcauagcaugguccagcucaaguugucacgauggaaaagcauggcugcauguuuguauaacgggggaugauaaaaaugcaacugcuagcuucauuuacaaugggaggcuuguagauaguguuguuucaugguccaaagaaauccucaggacccaggagucagaaugcguuuguaucaauggaacuuguacaguaguaaugacugaugggagugcuucaggaaaagcugauacuaaaauacuauucauugaggaggggaaaaucguucauacuagcacauugucaggaagugcucagcaugucgaggagugcucuugcuauccucgauauccuggugucagaugugucugcagagacaacuggaaaggcuccaauaggcccaucguugauauaaacauaaaggaucauagcauuguuuccaguuauguguguucaggacuuguuggagacacacccagaaaaaacgacagcuccagcaguagccauuguuuggauccuaacaaugaagaagguggucauggagugaaaggcugggccuuugaugauggaaaugacguguggaugggaagaacgaucaacgagacgucacgcuuaggguaugaaaccuucaaaguaauugaaggcugguccaacccuaaguccaaauugcagauaaauaggcaagucauaguugacagagguaauagguccgguuauucugguauuuucucuguugaaggcaagagcugcaucaaucggugcuuuuauguggaguugauuaggggaagaaaagaggaaacugaagucuuguggaccucaaacaguauuguuguguuuuguggcaccucagguacauauggaacaggcucauggccugauggggcggaccucaaucucaugccuauauaa

SEQ ID NO: 56080 - RNA, 1410 nt, Artificial Sequence
  derived and/or modified CDS sequence (wt) from neuraminidase__InfluenzaA__AHC59440
augaauccaaaucaaaagauaauaacgauuggcucuguuucucucaccauuuccacaauaugcuucuucaugcaaauugccaucuugauaacuacuguaacauugcauuucaagcaauaugaauucaacucccccccaaacaaccaagugaugcugugugaaccaacaauaauagaaagaaacaucacagagauaguguaucugaccaacaccaccauagagaaggaaauaugccccaaaccagcagaauacagaaauuggucaaaaccgcaaugugacauuacaggauuugcaccuuuuucuaaggacaauucgauuaggcuuuccgcugguggggacaucugggugacaagagaaccuuaugugucaugcgauccugacaaguguuaucaauuugcccuuggacagggaacaacacuaaacaaugugcauucaaauaacacaguacgugauaggaccccuuaucggacuuuauugaugaaugaauuagguguuccuuuucaucuggggaccaagcaagugugcauagcaugguccagcucaaguugucacgauggaaaagcauggcugcauguuuguauaacgggggaugauaaaaaugcaacugcuagcuucauuuacaaugggaggcuuguagauaguguuguuucaugguccaaagaaauucucaggacccaggagucagaaugcguuuguaucaauggaacuuguacaguaguaaugacugauggaagugcuucaggaaaagcugauacuaaaauacuauucauugaggaggggaaaaucguucagacuagcacauugucaggaagugcucagcaugucgaggagugcucuugcuauccucgauauccuggugucagaugugucugcagagacaacuggaaaggcuccaauaggcccaucguagauauaaacauaaaggaucauagcauugucuccaguuauguguguucaggacuuguuggagacacacccagaaaaaacgacagcuccagcaguagccauuguuuggauccuaacaaugaagaagguggucauggagugaaaggcugggccuuugaugauggaaaugacguguggaugggaagaacaaucaacgagacgucacgcuuaggguaugaaaccuucaaagucauugaaggcugguccaacccuaaguccaaauugcagauaaauaggcaagucauaguugacagaggugauagguccgguuauucugguauuuucucuguugaaggcaaaagcugcaucaaucggugcuuuuauguggaguugauuaggggaagaaaagaggaaacugaagucuuguggaccucaaacaguauuguuguguuuuguggcaccucagguacauauggaacaggcucauggccugauggggcggaccucaaucucaugccuauauaa

SEQ ID NO: 56081 - RNA, 1410 nt, Artificial Sequence
  derived and/or modified CDS sequence (wt) from neuraminidase__InfluenzaA__AHC59452
augaauccaaaucaaaagauaauaacgauuggcucuguuucucucaccauuucaacaauaugcuucuucaugcaaauugccaucuugauaacuacuguaacauuacauuucaagcaauaugaauucaacucccccccaaacaaccaagugaugcugugugaaccaacaauaauagaaagaaacauaacagagauaguguaucugaccaacaccaccauagagaaggaaauaugucccaaacuagcagaauacagaaauuggucaaagccgcaaugugacauuacaggauuugcaccuuuuucuaaggacaauucgauuaggcuuuccgcugguggggacaucugggugacaagagaaccuuaugugucaugcgauccuaacaaguguuaucaauuugcccuuggacagggaacaacacuaaacaacgugcauucaaauaacacaguacgugauaggaccccuuaucggacccuauugaugaaugaguuagguguuccuuuucaucuggggaccaagcaagugugcauagcaugguccagcucaaguugucacgauggaaaagcauggcugcauguuuguauaacgggggaugauaaaaaugcaacugcuagcuucauuuacaaugggaagcuuguagauaguguuguuucaugguccaaagaaauccucaggacccaggagucagaaugcguuuguaucaauggaacuuguacaguaguaaugacugaugggagugcuucaggaaaagcugauacuaaaauacuauucauugaggaggggaaaaucguucauacuagcacauugucaggaagugcucagcaugucgaggagugcucuugcuauccucgauauccuggugucagaugugucugcagagacaacuggaaaggcuccaauaggcccaucguagauauaaacauaaaggaucauagcauuguuuccaguuauguguguucaggacuuguuggagacacacccagaaaaaacgacagcuccagcaguagccauuguuuggauccuaacaaugaagaagguggucauggagugaaaggcugggccuuugaugauggaaaugacguguggaugggaagaacgaucaacgagacuucacguuuaggguaugaaaccuucaaagucauugaaggcugguccaacccuaaguccaaauugcagauaaauaggcaagucauaguugacagagguaauagguccgguuauucugguauuuucucuguugaaggcaaaagcugcaucaaucggugcuuuuauguggaguugauuaggggaagaaaagaggaaacugaagucuuguggaccucaaacaguauuguuguguuuuguggcaccucagguacauauggaacaggcucauggccugauggggcggaccucaaucucaugccuauauaa

SEQ ID NO: 56082 - RNA, 1410 nt, Artificial Sequence
  derived and/or modified CDS sequence (wt) from neuraminidase__InfluenzaA__AHC59464
augaauccaaaucaaaagauaauaacgauuggcucuguuucucucaccauuuccacaauaugcuucuucaugcaaauugccaucuugauaacuacuguaacauugcauuucaagcaauaugaauucaacucccccccaaacaaccaagugaugcugugugaaccaacaauaauagaaagaaacauaacagagauaguguaucugaccaacaccaccauagagaaggaaauaugccccaaacuagcagaauacagaaauuggucaaagccgcaaugugacauuacaggauuugcaccuuuuucuaaggacaauucgauuaggcuuuccgcugguggggacaucugggugacaagagaaccuuaugugucaugcgauccugacaaguguuaucaauuugcccuuggacagggaacaacacuaaacaacgugcauucaaauaacacaguacgugauaggaccccuuaucggacccuauugaugaaugaguuagguguuccuuuucaucuggggaccaagcaagugugcauagcaugguccagcucaaguugucacgauggaaaagcauggcugcauguuuguauaacgggggaugauaaaaaugcaacugcuagcuucauuuacaaugggaggcuuguagauaguguuguuucaugguccaaagaaauccucaggacccaggagucagaauguguuuguaucaauggaacuuguacaguaguaaugacugaugggagugcuucaggaaaagcugauacuaaaauacuauucauugaggaggggaaaaucguucauacuagcacauugucaggaagugcucagcaugucgaggagugcucuugcuauccucgauauccuggugucagaugugucugcagagacaacuggaaaggcuccaauaggcccaucguagauauaaacauaaaggaucauagcauuguuuccaguuauguguguucaggacuuguuggagacacacccagaaaaaacgacagcuccagcaguagccauuguuuggauccuaacaaugaagaagguggucauggagugaaaggcugggccuuugaugauggaaaugacguguggaugggaagaacgaucaacgagacgucacguuuaggguaugaaaccuucaaagucauugaaggcugguccaacccuaaguccaaauugcagauaaauaggcaagucauaguugacagagguaauagguccgguuauucugguauuuucucuguugaaggcaaaagcugcaucaaucggugcuuuuauguggaguugauuaggggaagaaaagaggaaacugaagucuuguggaccucaaacaguauuguuguguuuuguggcaccucagguacauauggaacaggcucauggccugauggggcggaccucaaucucaugccuauauaa

SEQ ID NO: 56083 - RNA, 1410 nt, Artificial Sequence; identical to SEQ ID NO: 56071
  derived and/or modified CDS sequence (wt) from neuraminidase__InfluenzaA__AHC59476

SEQ ID NO: 56084 - RNA, 1410 nt, Artificial Sequence
  derived and/or modified CDS sequence (wt) from neuraminidase__InfluenzaA__AHC59488
augaauccaaaucaaaagauaauaacgauuggcucuguuucucucaccauuuccacaauaugcuucuucaugcaaauugccaucuugauaacuacuguaacauugcauuucaagcaauaugaauucaacuccccuccaaacaaccaagugaugcugugugaaccaacaauaauagaaagaaacauaacagagauaguguaucugaccaacaccaccauagagaaggaaauaugccccaaacuagcagaauacagaaauuggucaaagccgcaaugugacauuacaggauuugcaccuuuuucuaaggacaauucgauuaggcuuuccgcugguggggacaucugggugacaagagaaccuuaugugucaugcgauccuaacaaguguuaucaauuugcccuuggacagggaacaacacuaaacaacgugcauucaaauaacacaguacgugauaggaccccuuaucggacccuauugaugaaugaguuagguguuccuuuucaucuggggaccaagcaagugugcauagcaugguccagcucaaguugucacgauggaaaagcauggcugcauguuuguauaacgggggaugauaaaaaugcaacugcuagcuucauuuacaaugggaagcuuguagauaguguuguuucaugguccaaagaaauccucaggacccaggagucagaaugcguuuguaucaauggaacuuguacaguaguaaugacugaugggagugcuucaggaaaagcugauacuaaaauacuauucauugaggaggggaaaaucguucauacuagcacauugucaggaagugcucagcaugucgaggagugcucuugcuauccucgauauccuggugucagaugugucugcagagacaacuggaaaggcuccaauaggcccaucguagauauaaacauaaaggaucauagcauuguuuccaguuauguguguucaggacuuguuggagacacacccagaaaaaacgacagcuccagcaguagccauuguuuggauccuaacaaugaagaagguggucauggagugaaaggcugggccuuugaugauggaaaugacguguggaugggaagaacgaucaacgagacuucacguuuaggguaugaaaccuucaaagucauugaaggcugguccaacccuaaguccaaauugcagauaaauaggcaagucauaguugacagagguaauagguccgguuauucugguauuuucucuguugaaggcaaaagcugcaucaaucggugcuuuuauguggaguugauuaggggaagaaaagaggaaacugaagucuuguggaccucaaacaguauuguuguguuuuguggcaccucagguacauauggaacaggcucauggccugauggggcggaccucaaucucaugccuauauaa

SEQ ID NO: 56085 - RNA, 1410 nt, Artificial Sequence; identical to SEQ ID NO: 55987
  derived and/or modified CDS sequence (wt) from neuraminidase__InfluenzaA__AHC59500

SEQ ID NO: 56086 - RNA, 1410 nt, Artificial Sequence
  derived and/or modified CDS sequence (wt) from neuraminidase__InfluenzaA__AHC59512
augaauccaaaucaaaagauaauaacgauuggcucuguuucucucaccauuuccacaauaugcuucuucaugcaaauugccaucuugauaacuacuguaacauugcauuucaagcaauaugaauucaacucccccccaaacaaccaagugaugcugugugaaccaacaauaauagaaagaaacauaacagagauaguguaucugaccaacaccaccauagagaaggaaauaugccccaaacuagcagaauacagaaauuggucaaagccgcaaugugacauuacaggauuugcaccuuuuucuaaggacaauucgauuaggcuuuccgcugguggggacaucugggugacaagagaaccuuaugugucaugcgauccugacaaguguuaucaauuugcccuuggacagggaacaacacuaaacaacgugcauucaaauaacacaguacgugauaggaccccuuaucggacccuauugaugaaugaguuagguguuccuuuucaucuggggaccaagcaagugugcauagcaugguccagcucaaguugucacgauggaaaagcauggcugcauguuuguauaacgggggaugauaaaaaugcaacugcuagcuucauuuacaaugggaggcuuguagauaguguuguuucaugguccaaagaaauccucaggacccaggagucagaaugcguuuguaucaauggaacuugugcaguaguaaugacugaugggagugcuucaggaaaagcugauacuaaaauacuauucauugaggaggggaaaaucguucauacuagcacauugucaggaagugcucagcaugucgaggagugcucuugcuauccucgauauccuggugucagaugugucugcagagacaacuggaaaggcuccaauaggcccauuguagauauaaacauaaaggaucauagcauuguuuccaguuauguguguucaggacuuguuggagacacacccagaaaaaacgacagcuccagcaguagccauuguuuggauccuaacaaugaagaagguggucauggagugaaaggcugggccuuugaugauggaaaugacguguggaugggaagaacgaucaacgagacgucacguuuaggguaugaaaccuucaaagucauugaaggcugguccaacccuaaguccaaauugcagauaaauaggcaagucauaguugacagagguaauagguccgguuauucugguauuuucucuguugaagguaaaagcugcaucaaucggugcuuuuauguggaguugauuaggggaagaaaagaggaaacugaagucuuguggaccucaaacaguauuguuguguuuuguggcaccucagguacauauggaacaggcucauggccugauggggcggaccucaaucucaugccuauauaa

SEQ ID NO: 56087 - RNA, 1410 nt, Artificial Sequence; identical to SEQ ID NO: 56032
  derived and/or modified CDS sequence (wt) from neuraminidase__InfluenzaA__AHC59524

SEQ ID NO: 56088 - RNA, 1410 nt, Artificial Sequence
  derived and/or modified CDS sequence (wt) from neuraminidase__InfluenzaA__AHC59536
augaacccaaaccaaaagauaauaacgauuggcucuguuucucucaccauuuccacaauaugcuucuucaugcaaguugccaucuugauaacuacuguaacauugcauuucaagcaauaugaauucaacucccccccaaacaaccaagugaugcugugugaaccaacaauaauagaaagaaacauaacagagauaguguaucugaccaacaccaccauagagaaggaaauaugccccaaacuagcagaauacagaaauuggucaaagccgcaaugugacauuacaggauuugcaccuuuuucuaaggacaauucgauuaggcuuuccgcugguggggacaucugggugacaagagaaccuuaugugucaugcgauccugacaaguguuaucaauuugcccuuggacagggaacaacacuaaacaacgugcauucaaauaacacaguacgugauaggaccccuuaucggacccuauugaugaaugaguuagguguuccuuuucaucuggggaccaagcaagugugcauagcaugguccagcucaaguugucacgauggaaaagcauggcugcauguuuguauaacgggggaugauaaaaaugcaacugcuagcuucauuuacaaugggaagcuuguagauaguguuguuucaugguccaaagaaauccucaggacccaggagucagaaugcguuuguaucaauggaacuuguacaguaguaaugacugaugggagugcuucaggaaaagcugauacuaaaauacuauucauugaggaggggaaaaucguucauacuagcacauugucaggaagugcucagcauguagaggagugcucuugcuauccucgauauccuggugucagaugugucugcagagacaacuggaaaggcuccaauaggcccaucguagauauaaacauaaaggaucauagcauuguuuccaguuauguguguucaggacuuguuggagacacacccagaaaaaacgacagcuccagcaguagccauuguuuggauccuaacaaugaagaagguggucauggagugaaaggcugggccuuugaugauggaaaugacguguggaugggaagaacgaucaacgagacuucacguuuaggguaugaaaccuucaaagucauugaaggcugguccaacccuaaguccaaauugcagauaaauaggcaagucauaguugacagagguaauagguccgguuauucugguauuuucucuguugaaggcaaaagcugcaucaaucggugcuuuuauguggaguugauuaggggaagaaaagaggaaacugaagucuuguggaccucaaacaguauuguuguguuuuguggcaccucagguacauauggaacaggcucauggccugauggggcggaccucaaucucaugccuauauaa

SEQ ID NO: 56089 - RNA, 1410 nt, Artificial Sequence; identical to SEQ ID NO: 55987
  derived and/or modified CDS sequence (wt) from neuraminidase__InfluenzaA__AHC59548

SEQ ID NO: 56090 - RNA, 1410 nt, Artificial Sequence; identical to SEQ ID NO: 56009
  derived and/or modified CDS sequence (wt) from neuraminidase__InfluenzaA__AHC59560

SEQ ID NO: 56091 - RNA, 1410 nt, Artificial Sequence; identical to SEQ ID NO: 56065
  derived and/or modified CDS sequence (wt) from neuraminidase__InfluenzaA__AHC59572

SEQ ID NO: 56092 - RNA, 1410 nt, Artificial Sequence
  derived and/or modified CDS sequence (wt) from neuraminidase__InfluenzaA__AHC59584
augaacccaaaucaaaagauaauaacgauuggcucuguuucucucaccauuuccacaauaugcuucuucaugcaaguugccaucuugauaacuacuguaacauugcauuucaagcaauaugaauucaacucccccccaaacaaccaagugaugcugugugaaccaacaauaauagaaagaaacauaacagagauauuguaucugaccaacaccaccauagagaaggaaauaugccccaaacuagcagaauacagaaauuggucaaagccgcaaugugacauuacaggauuugcaccuuuuucuaaggacaauucgauuaggcuuuccgcugguggggacaucugggugacaagagaaccuuaugugucaugcgauccugacaaguguuaucaauuugcccuuggacagggaacaacacuaaacaacgugcauucaaauaacacaguacgugauaggaccccuuaucggacccuauugaugaaugaguuagguguuccuuuucaucuggggaccaagcaagugugcauagcaugguccagcucaaguugucacgauggaaaagcauggcugcauguuuguauaacgggggaugauaaaaaugcaacugcuagcuucauuuacaaugggaagcuuguagauaguguuguuucaugguccaaagaaauccucaggacccaggagucagaaugcguuuguaucaauggaacuuguacaguaguaaugacugaugggagugcuucaggaaaagcugauacuaaaauacuauucauugaggaggggaaaaucguucauacuagcacauugucaggaagugcucagcauguagaggagugcucuugcuauccucgauauccuggugucagaugugucugcagagacaacuggaaaggcuccaauaggcccaucguagauauaaacauaaaggaucauagcauuguuuccaguuauguguguucaggacuuguuggagacacacccagaaaaaacgacagcuccagcaguagccauuguuuggaucccaacaaugaagaagguggucauggagugaaaggcugggccuuugaugauggaaaugacguguggaugggaagaacgaucaacgagacgucacguuuaggguaugaaaccuucaaagucauugaaggcugguccaacccuaaguccaaauugcagauaaauaggcaagucauaguugacagagguaauagguccgguuauucugguauuuucucuguugaaggcaaaagcugcaucaaucggugcuuuuauguggaguugauuaggggaagaaaagaggaaacugaagucuuguggaccucaaacaguauuguuguguuuuguggcaccucagguacauauggaacaggcucauggccugauggggcggaccucaaucucaugccuauauaa

SEQ ID NO: 56093 - RNA, 1410 nt, Artificial Sequence
  derived and/or modified CDS sequence (wt) from neuraminidase__InfluenzaA__AHC59596
augaauccaaaucaaaagauaauaacgauuggcucuguuucucucaccauuuccacaauaugcuucuucaugcaaauugccaucuugauaacuacuguaacauugcauuucaagcaauaugaauucaacucccccccgaacaaccaagugaugcugugugaaccaacaauaauagaaagaaacauaacagagauaguguaucugaccaacaccaccauagagaaggaaauaugccccaaacuagcagaauacagaaauuggucaaagccgcaaugugacauuacaggauuugcaccuuuuucuaaggacaauucgauuaggcuuuccgcugguggggacaucugggugacaagagaaccuuaugugucaugcgauccugacaaguguuaucaauuugcccuuggacagggaacaacacuaaacaacgugcauucaaauaacacaguacgugauaggaccccuuaucggacccuauugaugaaugaguuagguguuccuuuucaucuggggaccaagcaagugugcauagcaugguccagcucaaguugucacgauggaaaagcauggcugcauguuuguauaacgggggaugauaaaaaugcaacugcuagcuucauuuacaaugggaggcuuguagauaguguuguuucaugguccaaagaaauccucaggacccaggagucagaaugcguuuguaucaauggaacuugugcaguaguaaugacugaugggagugcuucaggaaaagcugauacuaaaauacuauucauugaggaggggaaaaucguucauacuagcacauugucaggaagugcucagcaugucgaggagugcucuugcuauccucgauauccuggugucagaugugucugcagagacaacuggaaaggcuccaauaggcccaucguagauauaaacauaaaggaucauagcauuguuuccaguuauguguguucaggacuuguuggagacacacccagaaaaaacgacagcuccagcaguagccauuguuuggauccuaacaaugaagaagguggucauggagugaaaggcugggccuuugaugauggaaaugacguguggaugggaagaacgaucaacgagacgucacguuuaggguaugaaaccuucaaagucauugaaggcugguccaacccuaaguccaaauugcagauaaauaggcaagucauaguugacagagguaauagguccgguuauucugguauuuucucuguugaagguaaaagcugcaucaaucggugcuuuuauguggaguugauuaggggaagaaaagaggaaacugaagucuuguggaccucaaacaguauuguuguguuuuguggcaccucagguacauauggaacaggcucauggccugauggggcggaccucaaucucaugccuauauaa

SEQ ID NO: 56094 - RNA, 1410 nt, Artificial Sequence
  derived and/or modified CDS sequence (wt) from neuraminidase__InfluenzaA__AHC59608
augaauccaaaucaaaagauaauaacgauuggcucuguuucucucaccauuuccacaauaugcuucuucaugcaaauugccaucuugauaacuacuguaacauugcauuucaagcaauaugaauucaacucccccccaaacaaccaagugaugcugugugaaccaacaauaauagaaagaaacaucacagagauaguguaucugaccaacaccaccauagagaaggaaauaugccccaaaccagcagaauacagaaauuggucaaaaccgcaaugugacauuacaggauuugcaccuuuuucuaaggacaauucgauuaggcuuuccgcugguggggacaucugggugacaagagaaccuuaugugucaugcgauccugacaaguguuaucaauuugcccuuggacagggaacaacacuaaacaaugugcauucaaauaacacaguacgugauaggaccccuuaucggacuuuauugaugaaugaguuagguguuccuuuucaucuggggaccaagcaagugugcauagcaugguccagcucaaguugucacgauggaaaagcauggcugcauguuuguauaacgggggaugauaaaaaugcaacugcuagcuucauuuacaaugggaggcuuguagauaguguuguuucaugguccaaagaaauucucaggacccaggagucagaaugcguuuguaucaauggaacuuguacaguaguaaugacugauggaagugcuucaggaaaagcugauacuaaaauacuauucauugaggaggggaaaaucguucauacuagcacauugucaggaagugcucagcaugucgaggagugcucuugcuauccucgauauccuggugucagaugugucuguagagacaacuggaaaggcuccaauaggcccaucguagauauaaacauaaaggaucauagcauugucuccaguuauguguguucaggacuuguuggagacacacccagaaaaaacgacagcuccagcaguagccauuguuuggauccuaacaaugaagaagguggucauggagugaaaggcugggccuuugaugauggaaaugacguguggaugggaagaacaaucaacgagacgucacgcuuaggguaugaaaccuucaaagucauugaaggcugguccaacccuaaguccaaauugcagauaaauaggcaagucauaguugacagaggugauagguccgguuauucugguauuuucucuguugaaggcaaaagcugcaucaaucggugcuuuuauguggaguugauuaggggaagaaaagaggaaacugaagucuuguggaccucaaacaguauuguuguguuuuguggcaccucagguacauauggaacaggcucauggccugauggggcggaccucaaucucaugccuauauaa

SEQ ID NO: 56095 - RNA, 1410 nt, Artificial Sequence; identical to SEQ ID NO: 56019
  derived and/or modified CDS sequence (wt) from neuraminidase__InfluenzaA__AHC59620

SEQ ID NO: 56096 - RNA, 1410 nt, Artificial Sequence; identical to SEQ ID NO: 55987
  derived and/or modified CDS sequence (wt) from neuraminidase__InfluenzaA__AHC59632

SEQ ID NO: 56097 - RNA, 1410 nt, Artificial Sequence
  derived and/or modified CDS sequence (wt) from neuraminidase__InfluenzaA__AHC59644
augaauccaaaucaaaagauaauaacgauuggcucuguuucucucaccauuuccacaauaugcuucuucaugcaaauugccaucuugauaacuacuguaacauuacauuucaagcaauaugaauucaacucccccccaaacaaccaagugaugcugugugaaccaacaauaauagaaagaaacauaacagagauaguguaucugaccaacaccaccauagagaaggaaauaugccccaaacuagcagaauacagaaauuggucaaagccgcaaugugacauuacaggauuugcaccuuuuucuaaggacaauucgauuaggcuuuccgcugguggggacaucugggugacaagagaaccuuaugugucaugcgauccuaacaaguguuaucaauuugcccuuggacagggaacaacacuaaacaacgugcauucaaauaacacaguacgugauaggaccccuuaucggacccuauugaugaaugaguuagguguuccuuuucaucuggggaccaagcaagugugcauagcaugguccagcucaaguugucacgauggaaaagcauggcugcauguuuguauaacgggggaugauaaaaaugcaacugcuagcuucauuuacaaugggaagcuuguagauaguguuguuucaugguccaaagaaauucucaggacccaggagucagaaugcguuuguaucaauggaacuuguacaguaguaaugacugaugggagugcuucaggaaaagcugauacuaaaauacuauucauugaggaggggaaaaucguucauacuagcacauugucaggaagugcucagcaugucgaggagugcucuugcuauccucgauauccuggugucagaugugucugcagagacaacuggaaaggcuccaauaggcccaucguagauauaaacauaaaggaucauagcauuguuuccaguuauguguguucaggacuuguuggagacacacccagaaaaaacgacagcuccagcaguagccauuguuuggauccuaacaaugaagaagguggucauggagugaaaggcugggccuuugaugauggaaaugacguguggaugggaagaacgaucaacgagacuucacguuuaggguaugaaaccuucaaagucauugaaggcugguccaacccuaaguccaaauugcagauaaauaggcaagucauaguugacagagguaauagguccgguuauucugguauuuucucuguugaaggcaaaagcugcaucaaucggugcuuuuauguggaguugauuaggggaagaaaagaggaaacugaagucuuguggaccucaaacaguauuguuguguuuuguggcaccucagguacauauggaacaggcucauggccugauggggcggaccucaaucucaugccuauauaa

SEQ ID NO: 56098 - RNA, 1410 nt, Artificial Sequence
  derived and/or modified CDS sequence (wt) from neuraminidase__InfluenzaA__AHC59656
augaauccaaaucaaaagauaauaacgauuggcucuguuucucucaccauuuccacaauaugcuucuucaugcaaauugccaucuugauaacuacuguaacaaugcauuucaagcaauaugaauucaacucccccccaaacaaccaagugaugcugugugaaccaacaauaauagaaagaaacauaacagagauaguguaucugaccaacaccaccauagagaaggaaauaugccccaaacuagcagaauacagaaauuggucaaagccgcaaugugacauuacaggauuugcaccuuuuucuaaggacaauucgauuaggcuuuccgcugguggggacaucugggugacaagagaaccuuaugugucaugcgauccugucaaguguuaucaauuugcccuuggacagggaacaacacuaaacaacgugcauucaaauaacacaguacgugauaggaccccuuaucggacccuauugaugaaugaguuagguguuccuuuucaucuggggaccaagcaagugugcauagcaugguccagcucaaguugucacgauggaaaagcauggcugcauguuuguauaacgggggaugauaaaaaugcaacugcuagcuucauuuacaaugggaagcuuguagauaguguuguuucaugguccaaagaaauccucaggacccaggagucagaaugcguuuguaucaauggaacuuguacaguaguaaugacugaugggagugcuucaggaaaagcugauacuaaaauacuauucauugaggaggggaaaaucguucauacuagcacauugucaggaagugcucagcaugucgaggagugcucuugcuauccucgauauccuggugucagaugugucugcagagacaacuggaaaggcuccaauaggcccaucguagauauaaacauaaaggaucauagcauuguuuccaguuauguguguucaggacuuguuggagacacacccagaaaaaacgacagcuccagcaguagccauuguuuggauccuaacaaugaagaagguggucauggagugaaaggcugggccuuugaugauggaaaugacguguggaugggaagaacgaucaacgagacgucacguuuaggguaugaaaccuucaaagucauugaaggcugguccaacccuaaguccaaauugcagauaaauaggcaagucauaguugacagagguaauagguccgguuauucugguauuuucucuguugaaggcaaaagcugcaucaaucggugcuuuuauguggaguugauuaggggaagaaaagaggaaacugaagucuuguggaccucaaacaguauuguuguguuuuguggcaccucagguacauauggaacaggcucauggccugauggggcggaccucaaucucaugccuauauaa

SEQ ID NO: 56099 - RNA, 1410 nt, Artificial Sequence; identical to SEQ ID NO: 56032
  derived and/or modified CDS sequence (wt) from neuraminidase__InfluenzaA__AHC59668

SEQ ID NO: 56100 - RNA, 1410 nt, Artificial Sequence
  derived and/or modified CDS sequence (wt) from neuraminidase__InfluenzaA__AHC59680
augaacccaaaucaaaagauaauaacgauuggcucuguuucucucaccauuuccacaauaugcuucuucaugcaaguugccaucuugauaacuacuguaacauugcauuucaagcaauaugaauucaacucccccccaaacaaccaagugaugcugugugaaccaacaauaauagaaagaaacauaacagagauauuguaucugaccaacaccaccauagagaaggaaauaugccccaaacuagcagaauacagaaauuggucaaagccgcaaugugacauuacaggauuugcaccuuuuucuaaggacaauucgauuaggcuuuccgcugguggggacaucugggugacaagagaaccuuaugugucaugcgauccugacaaguguuaucaauuugcccuuggacagggaacaacacuaaacaacgugcauucaaauaacacaguacgugauaggaccccuuaucggacccuauugaugaaugaguuagguguuccuuuucauuuggggaccaagcaagugugcauagcaugguccagcucaaguugucacgauggaaaagcauggcugcauguuuguauaacgggggaugauaaaaaugcaacugcuagcuucauuuacaaugggaagcuuguagauaguguuguuucaugguccaaagaaauccucaggacccaggagucagaaugcguuuguaucaauggaacuuguacaguaguaaugacugaugggagugcuucaggaaaagcugauacuaaaauacuauucauugaggaggggaaaaucguucauacuagcacauugucaggaagugcucagcauguagaggagugcucuugcuauccucgauauccuggugucagaugugucugcagagacaacuggaaaggcuccaauaggcccaucguagauauaaacauaaaggaucauagcauuguuuccaguuauguguguucaggacuuguuggagacacacccagaaaaaacgacagcuccagcaguagccauuguuuggauccuaacaaugaagaagguggucauggagugaaaggcugggccuuugaugauggaaaugacguguggaugggaagaacgaucaacgagacgucacguuuaggguaugaaaccuucaaagucauugaaggcugguccaacccuaaguccaaauugcagauaaauaggcaagucauaguugacagagguaauagguccgguuauucugguauuuucucuguugaaggcaaaagcugcaucaaucggugcuuuuauguggaguugauuaggggaagaaaagaggaaacugaagucuuguggaccucaaacaguauuguuguguuuuguggcaccucagguacauauggaacaggcucauggccugauggggcggaccucaaucucaugccuauauaa

SEQ ID NO: 56101 - RNA, 1410 nt, Artificial Sequence; identical to SEQ ID NO: 56047
  derived and/or modified CDS sequence (wt) from neuraminidase__InfluenzaA__AHC59704

SEQ ID NO: 56102 - RNA, 1410 nt, Artificial Sequence; identical to SEQ ID NO: 52717
  derived and/or modified CDS sequence (wt) from neuraminidase__InfluenzaA__AHC59716

SEQ ID NO: 56103 - RNA, 1410 nt, Artificial Sequence; identical to SEQ ID NO: 52717
  derived and/or modified CDS sequence (wt) from neuraminidase__InfluenzaA__AHC59728

SEQ ID NO: 56104 - RNA, 1410 nt, Artificial Sequence; identical to SEQ ID NO: 56042
  derived and/or modified CDS sequence (wt) from neuraminidase__InfluenzaA__AHC59752

SEQ ID NO: 56105 - RNA, 1410 nt, Artificial Sequence
  derived and/or modified CDS sequence (wt) from neuraminidase__InfluenzaA__AHC59764
augaacccaaaucaaaagauaauaacgauuggcucuguuucucucaccauuuccacaauaugcuucuucaugcaaguugccaucuugauaacuacuguaacauugcauuucaagcaauaugaauucaacucccccccaaacaaccaagugaugcugugugaaccaacaauaauagaaagaaacauaacagagauaguguaucugaccaacaccaccauagagaaggaaauaugccccaaacuagcagaauacagaaauuggucaaagccgcaaugugacauuacaggauuugcaccuuuuucuaaggacaauucgauuaggcuuuccgcugguggggacaucugggugacaagagaaccuuaugugucaugcgauccugacaaguguuaucaauuugcccuuggacagggaacaacacuaaacaacgugcauucaaauaacacaguacgugauaggaccccuuaucggacccuauugaugaaugaguuagguguuccuuuucaucuggggaccaagcaagugugcauagcaugguccagcucaaguugucacgauggaaaagcauggcugcauguuuguauaacgggggaugauaaaaaugcaacugcuagcuucauuuacaaugggaagcuuguagauaguguuguuucaugguccaaagaaauccucaggacccaggagucagaaugcguuuguaucaauggaacuuguacaguaguaaugacugaugggagugcuucaggaaaagcugauacuaaaauacuauucauugaggaggggaaaaucguucauacuagcacauugucaggaagugcucagcauguagaggagugcucuugcuauccucgauauccuggugucagaugugucugcagagacaacuggaaagguuccaauaggcccaucguagauauaaacauaaaggaucauagcauuguuuccaguuauguguguucaggacuuguuggagacacacccagaaaaaacgacagcuccagcaguagccauuguuuggauccuaacaaugaagaagguggucauggagugaaaggcugggccuuugaugauggaaaugacguguggaugggaagaacgaucaacgagacgucacguuuaggguaugaaaccuucaaagucauugaaggcugguccaacccuaaguccaaauugcagauaaauaggcaagucauaguugacagagguaauagguccgguuauucugguauuuucucuguugaaggcaaaagcugcaucaaucggugcuuuuauguggaguugauuaggggaagaaaagaggaaacugaagucuuguggaccucaaacaguauuguuguguuuuguggcaccucagguacauauggaacaggcucauggccugauggggcggaccucaaucucaugccuauauaa

SEQ ID NO: 56106 - RNA, 1410 nt, Artificial Sequence
  derived and/or modified CDS sequence (wt) from neuraminidase__InfluenzaA__AHC59776
augaacccaaaucaaaagauaauaacgauuggcucuguuucucucaccauuuccacaauaugcuucuucaugcaaauugccaucuugauaacuacuguaacauugcauuucaagcaauaugaauucuacucccccccaaacaaccaagugaugcugugugaaccaacaauaauagaaagaaacauaacagagauaguguaucugaccaacaccaccauagagaaggaaauaugccccaaacuagcagaauacagaaauuggucaaagccgcaaugugacauuacaggauuugcaccuuuuucuaaggacaauucgauuaggcuuuccgcugguggggacaucugggugacaagagaaccuuaugugucaugcgauccugacaaguguuaucaauuugcccuuggacagggaacaacacuaaacaacgugcauucaaauaacacaguacgugauaggaccccuuaucggacccuauugaugaaugaguuagguguuccuuuucaucuggggaccaagcaagugugcauagcaugguccagcucaaguugucacgauggaaaagcauggcugcauguuuguauaacgggggaugauaaaaaugcaacugcuagcuucauuuacaaugggaagcuuguagauaguguuguuucaugguccaaagaaauccucaggacccaggagucagaaugcguuuguaucaauggaacuuguacaguaguaaugacugaugggagugcuucaggaaaagcugauacuaaaauacuauucauugaggaggggaaaaucguucauacuagcacauugucaggaagugcucagcaugucgaggagugcucuugcuauccucgauauccuggugucagaugugucugcagagacaacuggaaaggcuccaauaggcccaucguugauauaaacauaaaggaucauagcauuguuuccaguuauguguguucaggacuuguuggagacacacccagaaaaaacgacagcuccagcaguagccauuguuuggauccuaacaaugaagaagguggucauggagugaaaggcugggccuuugaugauggaaaugacguguggaugggaagaacgaucaacgagacgucacgcuuaggguaugaaaccuucaaagucauugaaggcugguccaacccuaaguccaaauugcagauaaauaggcaagucauaguugacagagguaauagguccgguuauucugguauuuucucuguugaaggcaagagcugcaucaaucggugcuuuuauguggaguugauuaggggaagaaaagaggaaacugaaguuuuguggaccucaaacaguauuguuguguuuuguggcaccucagguacauauggaacaggcucauggccugauggggcggaccucaaucucaugccuauauaa

SEQ ID NO: 56107 - RNA, 1410 nt, Artificial Sequence; identical to SEQ ID NO: 55983
  derived and/or modified CDS sequence (wt) from neuraminidase__InfluenzaA__AHC59788

SEQ ID NO: 56108 - RNA, 1410 nt, Artificial Sequence; identical to SEQ ID NO: 56060
  derived and/or modified CDS sequence (wt) from neuraminidase__InfluenzaA__AHC59800

SEQ ID NO: 56109 - RNA, 1410 nt, Artificial Sequence
  derived and/or modified CDS sequence (wt) from neuraminidase__InfluenzaA__AHC59812
augaauccaaaucaaaagauaauaacgauuggcucuguuucucucaccauuuccacaauaugcuucuucaugcaaauugccaucuugauaacuacuguaacauugcauuucaagcaauaugaauucaacucccccccaaacaaccaaguggugcugugugaaccaacaauaauagaaagaaacaucacagagauaguguaucugaccaacaccaccauagagaaggaaauaugccccaaaccagcagaauacagaaauuggucaaaaccgcaaugugacauuacaggauuugcaccuuuuucuaaggacaauucgauuaggcuuuccgcugguggggacaucugggugacaagagaaccuuaugugucaugcgauccugacaaguguuaucaauuugcccuuggacagggaacaacacuaaacaaugugcauucaaauaacacaguacgugauaggaccccuuaucggacuuuauugaugaaugaguuagguguuccuuuucaucuggggaccaagcaagugugcauagcaugguccagcucaaguugucacgauggaaaagcauggcugcauguuuguauaacgggggaugauaaaaaugcaacugcuagcuucauuuacaaugggaggcuuguagauaguguuguuucaugguccaaagaaauucucaggacccaggagucagaaugcguuuguaucaauggaacuuguacaguaguaaugacugauggaagugcuucaggaaaagcugauacuaaaauacuauucauugaggaggggaaaaucguuuauacuagcacauugucaggaagugcucagcaugucgaggagugcucuugcuauccucgauauccuggugucagaugugucugcagagacaacuggaaaggcuccaauaggcccaucguagauauaaacauaaaggaucauagcauugucuccaguuauguguguucaggacuuguuggagacacacccagaaaaaacgacagcuccagcaguagccauuguuuggauccuaacaaugaagaagguggucauggagugaaaggcugggccuuugaugauggaaaugacguguggaugggaagaacaaucaacgagacgucacgcuuaggguaugaaaccuucaaagucauugaaggcugguccaacccuaaguccaaauugcagauaaauaggcaagucauaguugacagaggugauagguccgguuauucugguauuuucucuguugaaggcaaaagcugcaucaaucggugcuuuuauguggaguugauuaggggaagaaaagaggaaacugaagucuuguggaccucaaacaguauuguuguguuuuguggcaccucagguacauauggaacaggcucauggccugauggggcggaccucaaucucaugccuauauaa

SEQ ID NO: 56110 - RNA, 1410 nt, Artificial Sequence
  derived and/or modified CDS sequence (wt) from neuraminidase__InfluenzaA__AHC59824
augaacccaaaucaaaagauaauaacgauuggcucuguuucucucaccauuuccacaauaugcuucuucaugcaaauugccaucuugauaacuacuguaacauugcauuucaagcaauaugaauucuacucccccccaaacaaccaagugaugcugugugaaccaacaauaauagaaagaaacauaacagagauaguguaucugaccaacaccaccauagagaaggaaauaugccccaaacuagcagaauacagaaaauggucaaagccgcaaugugacauuacaggauuugcaccuuuuucuaaggacaauucgauuaggcuuuccgcugguggggacaucugggugacaagagaaccuuaugugucaugcgauccugacaaguguuaucaauuugcccuuggacagggaacaacacuaaacaacgugcauucaaauaacacaguacgugauaggaccccuuaucggacccuauugaugaaugaguuagguguuccuuuucaucuggggaccaagcaagugugcauagcaugguccagcucaaguugucacgaugggaaagcauggcugcauguuuguauaacgggggaugauaaaaaugcaacugcuagcuucauuuacaaugggaggcuuguagauaguguuguuucaugguccaaagaaauccucaggacccaggagucagaaugcguuuguaucaauggaacuuguacaguaguaaugacugaugggagugcuucaggaaaagcugauacuaaaauacuauucauugaggaggggaaaaucguucauacuagcacauugucaggaagugcucagcaugucgaggagugcucuugcuauccucgauauccuggugucagaugugucugcagagacaacuggaaaggcuccaauaggcccaucguugauauaaacauaaaggaucauagcauuguuuccaguuauguguguucaggacuuguuggagacacacccagaaaaaacgacagcuccagcaguagccauuguuuggauccuaacaaugaagaagguggucauggagugaaaggcugggccuuugaugauggaaaugacguguggaugggaagaacgaucaacgagacgucacgcuuaggguaugaaaccuucaaagucauugaaggcugguccaacccuaaguccaaauugcagauaaauaggcaagucauaguugacagagguaauagguccgguuauucugguauuuucucuguugaaggcaagagcugcaucaaucggugcuuuuauguggaguugauuaggggaagaaaagaggaaacugaagucuuguggaccucaaacaguauuguuguguuuuguggcaccucagguacauauggaacaggcucauggccugauggggcggaccucaaucucaugccuauauaa

SEQ ID NO: 56111 - RNA, 1410 nt, Artificial Sequence; identical to SEQ ID NO: 56097
  derived and/or modified CDS sequence (wt) from neuraminidase__InfluenzaA__AHC59836

SEQ ID NO: 56112 - RNA, 1410 nt, Artificial Sequence
  derived and/or modified CDS sequence (wt) from neuraminidase__InfluenzaA__AHC59848
augaauccaaaucaaaagauaauaacgauuggcucuguuucucucaccauuuccacaauaugcuucuucaugcaaauugccaucuugauaacuacuguaacauugcauuucaagcaauaugaauucaacucccccccaaacaaccaagugaugcugugugaaccaacaauaauagaaagaaacaucacagagauaguguaucugaccaacaccaccauagaaaaggaaauaugccccaaaccagcagaauacagaaauuggucaaaaccgcaaugugacauuacaggauuugcaccuuuuucuaaggacaauucgauuaggcuuuccgcugguggggacaucugggugacaagagaaccuuaugugucaugcgauccugacaaguguuaucaauuugcccuuggacagggaacaacacuaaacaaugugcauucaaauaacacaguacgugauaggaccccuuaucggacuuuauugaugaaugaguuagguguuccuuuucaucuggggaccaagcaagugugcauagcaugguccagcucaaguugucacgauggaaaagcauggcugcauguuuguauaacgggggaugauaaaaaugcaacugcuagcuucauuuacaaugggaggcuuguagauaguguuguuucaugguccaaagaaauucucaggacccaggagucagaaugcguuuguaucaauggaacuuguacaguaguaaugacugauggaagugcuucaggaaaagcugauacuaaaauacuauucauugaggaggggaaaaucguucauacuagcacauugucaggaagugcucagcaugucgaggagugcucuugcuauccucgauauccuggugucagaugugucugcagagacaacuggaaaggcuccaauaggcccaucguagauauaaacauaaaggaucauagcauugucucaaguuauguguguucaggacuuguuggagacacacccagaaaaaacgacagcuccagcaguagccauuguuuggauccaaacaaugaagaagguggucauggagugaaaggcugggccuuugaugauggaaaugacguguggaugggaagaacaaucaacgagacgucacgcuuaggguaugaaaccuucaaagucauugaaggcugguccaacccuaaguccaaauugcagauaaauaggcaagucauaguugacagaggugauagguccgguuauucugguauuuuuucuguugaaggcaaaagcugcaucaaucggugcuuuuauguagaguugauuaggggaagaaaagaggaaacugaagucuuguggaccucaaacaguauuguuguguuuuguggcaccucggguacauauggaacaggcucauggccugauggggcggaccucaaucucaugccuauauaa

SEQ ID NO: 56113 - RNA, 1410 nt, Artificial Sequence; identical to SEQ ID NO: 55983
  derived and/or modified CDS sequence (wt) from neuraminidase__InfluenzaA__AHC59860

SEQ ID NO: 56114 - RNA, 1410 nt, Artificial Sequence
  derived and/or modified CDS sequence (wt) from neuraminidase__InfluenzaA__AHC59872
augaauccaaaucaaaagauaauaacgauuggcucuguuucucucaccauuuccacaauaugcuucuucaugcaaacugccaucuugauaacuacuguaacauugcauuucaagcaauaugaauucaacucccccccaaacaaccaagugaugcugugugaaccaacaauaauagaaagaaacauaacagagauaguguaucugaccaacaccaccauagagaaggaaauaugccccaaacuagcagaauacagaaauuggucaaagccgcaaugugacauuacaggauuugcaccuuuuucuaaggacaauucgauuaggcuuuccgcugguggggacaucugggugacaagagaaccuuaugugucaugcgauccugacaaguguuaucaauuugcccuuggacagggaacaacacuaaacaacgugcauucaaauaacacaguacgugauaggaccccuuaucggacccuguugaugaaugaguuagguguuccuuuucaucuggggaccaagcaagugugcauagcaugguccagcucaaguugucacgauggaaaagcauggcugcauguuuguauaacgggggaugauaaaaaugcaacugcuagcuucaucuacaaugggaagcuuguagauaguguuguuucaugguccaaagaaauccucaggacccaggagucagaaugcguuuguaucaauggaacuuguacaguaguaaugacugaugggagugcuucaggaaaagcugauacuaaaauacuauucauugaggaggggaaaaucguucauacuagcacauugucaggaagugcucagcauguagaggagugcucuugcuauccucgauauccuggugucagaugugucugcagagacaacuggaaaggcuccaauaggcccaucguagauauaaacauaaaggaucauagcauuguuuccaguuauguguguucaggacuuguuggagacacacccagaaaaaacgacagcuccagcaguagccauuguuuggauccuaacaaugaagaagguggucauggagugaaaggcugggccuuugaugauggaaaugacguguggaugggaagaacgaucaacgagacgucacguuuaggguaugaaaccuucaaagucauugaaggcugguccaacccuaaguccaaauugcagauaaauaggcaagucauaguugacagagguaauagguccgguuauucugguauuuucucuguugaaggcaaaagcugcaucaaucggugcuuuuauguggaguugauuaggggaagaaaagaggaaacugaagucuuguggaccucaaacaguauuguuguguuuuguggcaccucagguacauauggaacaggcucauggccugauggggcggaccucaaucucaugccuauauaa

SEQ ID NO: 56115 - RNA, 1410 nt, Artificial Sequence; identical to SEQ ID NO: 56019
  derived and/or modified CDS sequence (wt) from neuraminidase__InfluenzaA__AHC59884

SEQ ID NO: 56116 - RNA, 1410 nt, Artificial Sequence
  derived and/or modified CDS sequence (wt) from neuraminidase__InfluenzaA__AHC59895
augaauccaaaucaaaagauaauaacgauuggcucuguuucucucaccauuuccacaauaugcuucuucaugcaaauugccaucuugauaacuacuguaacauugcauuucaagcaauaugaauucaacucccccccaaacaaccaagugaugcugugugaaccaacaauaauagaaagaaacauaacagagauaguguaucugaccaacaccaccauagagaaggaaauaugccccaaacuagcagaauacagaaauuggucaaagccgcaaugugacauuacaggauuugcaccuuuuucuaaggacaauucgauuaggcuuuccgcugguggggacaucugggugacaagagaaccuuaugugucaugcgauccugacaaguguuaucaauuugcccuuggacagggaacaacacuaaacaacgugcauucaaauaacacaguacgugauaggaccccuuaucggacccuauugaugaaugaguuagguguuccuuuucaucuggggaccaagcaagugugcauagcaugguccagcucaaguugucacgauggaaaagcauggcugcauguuuguauaacgggggaugauaaaaaugcaacugcuagcuucauuuacaaugggaggcuuguagauaguguuguuucaugguccaaagaaauccucagaacccaggagucagaaugcguuuguaucaauggaacuuguacaguaguaaugacugaugggagugcuucaggaaaagcugauacuaaaauacuauucauuaaggaggggaaaauuguucauacuagcacauugucaggaagugcucagcaugucgaggagugcucuugcuauccucgauauccuggugucagaugugucugcagagacaacuggaaaggcuccaauaggcccaucguagauauaaacauaaaggaucauagcauuguuuccaguuauguguguucaggacuuguuggagacacacccagaaaaaacgacagcuccagcaguagccauuguuuggauccuaacaaugaagaagguggucauggagugaaaggcugggccuuugaugauggaaaugacguguggaugggaagaacgaucaacgagacgucacguuuaggguaugaaaccuucaaagucauugaaggcugguccaacccuaaguccaaauugcagauaaauaggcaagucauaguugacagagguaauagguccgguuauucugguauuuucucuguugaaggcaaaagcugcaucaaucggugcuuuuauguggaguugauuaggggaagaaaagaggaaacugaagucuuguggaccucaaacaguauuguuguguuuuguggcaccucagguacauauggaacaggcucauggccugauggggcggaccucaaucucaugccuauauaa

SEQ ID NO: 56117 - RNA, 1410 nt, Artificial Sequence
  derived and/or modified CDS sequence (wt) from neuraminidase__InfluenzaA__AHC59907
augaauccaaaucaaaagauaauaacgauuggcucuguuucucucaccauuuccacaauaugcuucuucaugcaaauugccaucuugauaacuacuguaacauuacauuucaagcaauaugaauucaacucccccccaaacaaccaagugaugcugugugaaccaacaauaauagaaagaaacauaacagagauaguguaucugaccaacaccaccauagagaaggaaauaugccccaaacuagcagaauacagaaauuggucaaagccgcaaugugacauuacaggauuugcaccuuuuucuaaggacaauucgauuaggcuuuccgcugguggggacaucugggugacaagagaaccuuaugugucaugcgauccuaacaaguguuaucaauuugcccuuggacagggaacaacacuaaacaacgugcauucaaauaacacaguacgugauaggaccccuuaucggacccuauugaugaaugaguuaggugucccuuuucaucuggggaccaagcaagugugcauagcaugguccagcucaaguugucacgauggaaaagcauggcugcauguuuguauaacgggggaugauaaaaaugcaacugcuagcuucauuuacaaugggaagcuuguagauaguguuguuucaugguccaaagaaauccucaggacccaggagucagaaugcguuuguaucaauggaacuuguacaguaguaaugacugaugggagugcuucaggaaaagcugauacuaaaauacuauucauugaggaggggaaaaucguucauacuagcacauugucaggaagugcucagcaugucgaggagugcucuugcuauccucgauauccuggugucagaugugucugcagagacaacuggaaaggcuccaauaggcccaucguagauauaaacauaaaggaucauagcauuguuuccaguuauguguguucaggacuuguuggagacacacccagaaaaaacgacagcuccagcaguagccauuguuuggauccuaacaaugaagaagguggucauggagugaaaggcugggccuuugaugauggaaaugacguguggaugggaagaacgaucaacgagacuucacguuuaggguaugaaaccuucaaagucauugaaggcugguccaacccuaaguccaaauugcagauaaauaggcaagucauaguugacagagguaauagguccgguuauucugguauuuucucuguugaaggcaaaagcugcaucaaucggugcuuuuauguggaguugauuaggggaagaaaagaggaaacugaagucuuguggaccucaaacaguauuguuguguuuuguggcaccucagguacauauggaacaggcucauggccugauggggcggaccucaaucucaugccuauauaa

SEQ ID NO: 56118 - RNA, 1410 nt, Artificial Sequence
  derived and/or modified CDS sequence (wt) from neuraminidase__InfluenzaA__AHC59918
augaacccaaaucaaaagauaauaacgauuggcucuguuucucucaccauuuccacaauaugcuucuucauacaaauugccaucuugauaacuacuguaacauugcauuucaagcaauaugaauucaacucccccccaaacaaccaagugaugcugugugaaccaacaauaauagaaagaaacauaacagagauaguguaucugaccaacaccaccauagagaaggaaauaugccccaaacuagcagaauacagaaauuggucaaagccgcaaugugacauuacaggguuugcaccuuuuucuaaggacaauucgauuagacuuuccgcugguggggacaucugggugacaagagaaccuuaugugucaugcgauccugacaaguguuaucaauuugcccuuggacagggaacaacacuaaacaacgugcauucaaauaacacaguacgugauaggaccccuuaucggacccuauugaugaaugaguuagguguuccuuuucaucuggggaccaagcaagugugcauagcaugguccagcucaaguugucacgauggaaaagcauggcugcauguuuguauaacgggggaugauaaaaaugcaacugcuagcuucauuuacaaugggaggcuuguggauaguguuguuucaugguccaaagaaauccucaggacccaggagucagaaugcguuuguaucaauggaacuuguacaguaguaaugacugaugggagugcuucaggaaaagcugauacuaaaauacuauucauugaggaggggaaaaucguucauacuagcacauugucaggaagugcucagcaugucgaggagugcucuugcuauccucgauaucccggugucagaugugucugcagagacaacuggaaaggcuccaauaggcccaucguagauauaaacauaaaggaucauagcauuguuuccaguuauguguguucaggacuuguuggagacacacccagaaaaaacgacagcuccagcagcagccauuguuuggauccuaacaaugaagaagguggucauggagugaaaggcugggccuucgaugauggaaaugacguguggaugggaagaacgaucaacgagacgucacgcuuaggguacgaaaccuucaaagucauugaaggcugguccaacccuaaguccaaauugcagaugaauaggcaagucauaguugacagagguaauagguccgguuauucugguauuuucucuguugaaggcaagagcugcaucaaucggugcuuuuauguggaguugauuaggggaagaaaagaggaaacugaagucuuguggaccucaaacaguauuguuguguuuuguggcaccucagguacauauggaacaggcucauggccugauggggcggaccucaaucucaugccuauauaa

SEQ ID NO: 56119 - RNA, 1410 nt, Artificial Sequence; identical to SEQ ID NO: 56118
  derived and/or modified CDS sequence (wt) from neuraminidase__InfluenzaA__AHC59930

SEQ ID NO: 56120 - RNA, 1410 nt, Artificial Sequence; identical to SEQ ID NO: 55987
  derived and/or modified CDS sequence (wt) from neuraminidase__InfluenzaA__AHC59942

SEQ ID NO: 56121 - RNA, 1410 nt, Artificial Sequence; identical to SEQ ID NO: 56093
  derived and/or modified CDS sequence (wt) from neuraminidase__InfluenzaA__AHC59954

SEQ ID NO: 56122 - RNA, 1410 nt, Artificial Sequence
  derived and/or modified CDS sequence (wt) from neuraminidase__InfluenzaA__AHC59966
augaauccaaaucaaaagauaauaacgauuggcucuguuucucucaccauuuccacaauaugcuucuucaugcaaauugccaucuugauaacuacuguaacauugcauuucaagcaauaugaauucaacuccuccccaaacaaccaagugaugcugugugaaccaacaauaauagaaagaaacaucacagagauaguguaucugaccaacaccaccauagagaaggaaauaugccccaaaccagcagaauacagaaauuggucaaaaccgcaaugugacauuacaggauuugcaccuuuuucuaaggacaauucgauuaggcuuuccgcugguggggacaucugggugacaagagaaccuuaugugucaugcgauccugacaaguguuaucaauuugcccuuggacagggaacaacacuaaacaaugugcauucaaauaacacaguacgugauaggaccccuuaucggacuuuauugaugaaugaguuagguguuccuuuucaucuggggaccaagcaagugugcauagcaugguccagcucaaguugucacgauggaaaagcauggcugcauguuuguauaacgggggaugauaaaaaugcaacugcuagcuucauuuacaaugggaggcuuguagauaguguuguuucaugguccaaagaaauucucaggacccaggagucagaaugcguuuguaucaauggaacuuguacaguaguaaugacugauggaagugcuucaggaaaagcugauacuaaaauacuauucauugaggaggggaaaaucguucauacuagcacauugucaggaagugcucagcaugucgaggagugcucuugcuauccucgauauccuggugucagaugugucugcagagacaacuggaaaggcuccaauaggcccaucguagauauaaacauaaaggaucauagcauugucuccaguuauguguguucaggacuuguuggagacacacccagaaaaaacgacagcuccagcaguagccauuguuuggauccuaacaaugaagaagguggucauggagugaaaggcugggccuuugaugauggaaaugacguguggaugggaagaacaaucaacgagacgucacgcuuaggguaugaaaccuucaaagucauugaaggcugguccaacccuaaguccaaauugcagauaaauaggcaagucauaguugacagaggugauggguccgguuauucugguauuuucucuguugaaggcaaaagcugcaucaaucggugcuuuuauguggaguugauuaggggaagaaaagaggaaacugaagucuuguggaccucaaacaguauuguuguguuuuguggcaccucagguacauauggaacaggcucauggccugauggggcggaccucaaucucaugccuauauaa

SEQ ID NO: 56123 - RNA, 1410 nt, Artificial Sequence
  derived and/or modified CDS sequence (wt) from neuraminidase__InfluenzaA__AHC59978
augaauccaaaucaaaagauaauaacgauuggcucuguuucucucaccauuuccacaauaugcuucuucaugcaaauugccaucuugauaacuacuguaacauugcauuucaagcaauaugaauucaacucccccccaaacaaccaagugaugcugugugaaccaacaauaauagaaagaaacauuacagagauaguguaucugaccaacaccaccauagagaaggaaauaugccccaaaccagcagaauacagaaauuggucaaaaccgcaaugugacauuacaggauuugcaccuuuuucuaaggacaauucgauuaggcuuuccgcugguggggacaucugggugacaagagaaccuuaugugucaugcgauccugacaaguguuaucaauuugcccuuggacagggaacaacacuaaacaaugugcauucaaauaacacaguacgugauaggaccccuuaucggacuuuauugaugaaugaguuagguguuccuuuucaucuggggaccaagcaagugugcauagcaugguccagcucaaguugucacgauggaaaagcauggcugcauguuuguauaacgggggaugauaaaaaugcaacugcuagcuucauuuacaaugggaggcuuguagauaguguuguuucaugguccaaagaaauucucaggacccaggagucagaaugcguuuguaucaauggaacuuguacaguaguaaugacugauggaagugcuucaggaaaagcugauacuaaaauacuauucauugaggaggggaagaucguucauacuagcacauugucaggaagugcucagcaugucgaggagugcucuugcuauccucgauauccuggugucagaugugucugcagagacaacuggaaaggcuccaauaggcccaucguagauauaaacauaaaggaucauagcauugucuccaguuauguguguucaggacuuguuggagacacacccagaaaaaacgacagcuccagcaguagccauuguuuggauccuaacaaugaagaagguggucauggagugaaaggcugggccuuugaugauggaaaugacguguggaugggaagaacaaucaacgagacgucacgcuuaggguaugaaaccuucaaagucauugaaggcugguccaacccuaaauccaaauugcagauaaauaggcaagucauaguugacagaggugauagguccgguuauucugguauuuucucuguugaaggcaaaagcugcaucaaucggugcuuuuauguggaguugauuaggggaagaaaagaggaaacugaagucuuguggaccucaaacaguauuguuguguuuuguggcaccucagguacauauggaacaggcucauggccugauggggcggaccucaaucucaugccuauauaa

SEQ ID NO: 56124 - RNA, 1410 nt, Artificial Sequence
  derived and/or modified CDS sequence (wt) from neuraminidase__InfluenzaA__AHC59990
augaauccaaaucaaaagauaauaacgauuggcucuguuucucucaccauuuccacaauaugcuucuucaugcaaauugccaucuugauaacuacuguaacauugcauuucaagcaauaugaauucaacccccccccaaacaaccaagugaugcugugugaaccaacaauaauagaaagaaacauaacagagauaguguaucugaccaacaccaccauagagaaggaaauaugccccaaacuagcagaauacagaaauuggucaaagccgcaaugugacauuacaggauuugcaccuuuuucuaaggacaauucgauuaggcuuuccgcugguggggacaucugggugacaagagaaccuuaugugucaugcgauccugacaaguguuaucaguuugcccuuggacagggaacaacacuaaacaacgugcauucaaauaacacaguacgugauaggaccccuuaucggacccuauugaugaaugaguuagguguuccuuuucaucuggggaccaagcaagugugcauagcaugguccagcucaaguugccacgauggaaaagcauggcugcauguuuguauaacgggggaugauaaaaaugcaacugcuagcuucauuuacaaugggaggcuuguagauaguguuguuucaugguccaaagaaauccucaggacccaggagucagaaugcguuuguaucaauggaacuuguacaguaguaaugacugaugggagugcuucaggaaaagcugauacuaaaauacuauucauugaggaggggaaaaucguucauacuagcacauugucaggaagugcucagcaugucgaggagugcucuugcuauccucgauauccuggugucagaugugucugcagagacaacuggaaaggcuccaauaggcccaucguagauauaaacauaaaggaucauagcauuguuuccaguuauguguguucaggacuuguuggagacacacccagaaaaaacgacagcuccagcaguagccauuguuuggauccuaacaaugaagaagguggucauggagugaaaggcugggccuuugaugauggaaaugacguguggaugggaagaacgaucaacgagacgucacguuuaggguaugaaaccuucaaagucauugaaggcugguccaacccuaaguccaaauugcagauaaauaggcaagucauaguugacagagguaauagguccgguuauuccgguauuuucucuguugaaggcaaaagcugcaucaaucggugcuuuuauguggaguugauuaggggaagaaaagaggaaacugaagucuuguggaccucaaacaguauuguuguguuuuguggcaccucagguacauauggaacaggcucauggccugauggggcggaccucaaucucaugccuauauaa

SEQ ID NO: 56125 - RNA, 1410 nt, Artificial Sequence; identical to SEQ ID NO: 56042
  derived and/or modified CDS sequence (wt) from neuraminidase__InfluenzaA__AHC60002

SEQ ID NO: 56126 - RNA, 1410 nt, Artificial Sequence; identical to SEQ ID NO: 55987
  derived and/or modified CDS sequence (wt) from neuraminidase__InfluenzaA__AHC60014

SEQ ID NO: 56127 - RNA, 1410 nt, Artificial Sequence; identical to SEQ ID NO: 52717
  derived and/or modified CDS sequence (wt) from neuraminidase__InfluenzaA__AHC60026

SEQ ID NO: 56128 - RNA, 1410 nt, Artificial Sequence; identical to SEQ ID NO: 55983
  derived and/or modified CDS sequence (wt) from neuraminidase__InfluenzaA__AHC60038

SEQ ID NO: 56129 - RNA, 1410 nt, Artificial Sequence; identical to SEQ ID NO: 55983
  derived and/or modified CDS sequence (wt) from neuraminidase__InfluenzaA__AHC60050

SEQ ID NO: 56130 - RNA, 1410 nt, Artificial Sequence
  derived and/or modified CDS sequence (wt) from neuraminidase__InfluenzaA__AHC60062
augaauccaaaucaaaagauaauaacgauuggcucuguuucucucaccauuuccacaauaugcuucuucaugcaaauugccaucuugauaacuacuguaacaaugcauuucaagcaauaugaauucaacucccccccaaacaaccaagugaugcugugugaaccaacaauaauagaaagaaacauaacagagauaguguaucugaccaacaccaccauagagaaggaaauaugccccaaacuagcagaauacagaaauuggucaaagccgcaaugugacauuacaggauuugcaccuuuuucuaaggacaauucgauuaggcuuuccgcugguggggacaucugggugacaagagaaccuuaugugucaugcgauccugacaaguguuaucaauuugcccuuggacagggaacaacacuaaacaacgugcauucaaauaacacaguacgugauaggaccccuuaucggacccuauugaugaaugaguuagguguuccuuuucaucuggggaccaagcaagugugcauagcaugguccagcucaaguugucacgauggaaaagcauggcugcauguuuguauaacgggggaugauaaaaaugcaacugcuagcuucauuuacaaugggaagcuuguagauaguguuguuucaugguccaaagaaauccucaggacccaggagucagaaugcguuuguaucaauggaacuuguacaguaguaaugacugaugggagugcuucaggaaaagcugauacuaaaauacuauucauugaggaggggaaaaucguucauacuagcacauugucaggaagugcucagcaugucgaggagugcucuugcuauccucgauauccuggugucagaugugucugcagagacaauuggaaaggcuccaauaggcccaucguagauauaaacauaaaggaucauagcauuguuuccaguuauguguguucaggacuuguuggagacacacccagaaaaaacgacagcuccagcaguagccauuguuuggauccuaacaaugaagaagguggucauggagugaaaggcugggccuuugaugauggaaaugacguguggaugggaagaacgaucaacgagacgucacguuuaggguaugaaaccuucaaagucauugaaggcugguccaacccuaaguccaaauugcagauaaauaggcaagucauaguugacagagguaauagguccgguuauucugguauuuucucuguugaaggcaaaagcugcaucaaucggugcuuuuauguggaguugauuaggggaagaaaagaggaaacugaagucuuguggaccucaaacaguauuguuguguuuuguggcaccucagguacauauggaacaggcucauggccugauggggcggaccucaaucucaugccuauauaa

SEQ ID NO: 56131 - RNA, 1410 nt, Artificial Sequence; identical to SEQ ID NO: 55991
  derived and/or modified CDS sequence (wt) from neuraminidase__InfluenzaA__AHC60074

SEQ ID NO: 56132 - RNA, 1410 nt, Artificial Sequence; identical to SEQ ID NO: 56009
  derived and/or modified CDS sequence (wt) from neuraminidase__InfluenzaA__AHC60086

SEQ ID NO: 56133 - RNA, 1410 nt, Artificial Sequence
  derived and/or modified CDS sequence (wt) from neuraminidase__InfluenzaA__AHC60098
augaacccaaaucaaaagauaauaacgauuggcucuguuucucucaccauuuccacaauaugcuucuucaugcaaauugccaucuugauaacuacuguaacauugcauuucaagcaauaugaauucuacucccccccaaacaaccaagugaugcugugugaaccaacaauaauagaaagaaacauaacagagauaguguaucugaccaacaccaccauagagaaggaaauaugccccaaacuagcagaauacagaaauuggucaaagccgcaaugugacauuacaggauuugcaccuuuuucuaaggacaauucgauuaggcuuuccgcugguggggacaucugggugacaagagaaccuuaugugucaugcgauccugacaaguguuaucaauuugcccuuggacagggaacaacacuaaacaacgugcauucaaauaacacaguacgugauaggaccccuuaucggacccuauugaugaaugaguuagguguuccuuuucaucuggggaccaagcaagugugcauagcaugguccagcucaaguugucacgauggaaaagcauggcugcauguuuguauaacgggggaugauaaaaaugcaacugcuagcuucauuuacaaugggaggcuuguagauaguguuguuucaugguccaaagaaauccucaggacccaggagucagaaugcguuuguaucaauggaacuuguacaguaguaaugacugauggaagugcuucaggaaaagcugauacuaaaauacuauucauugaggaagggaaaaucguucauacuagcacauugucaggaagugcucagcaugucgaggagugcucuugcuauccucgauauccuggugucagaugugucugcagagacaacuggaaaggcuccaauaggcccaucguugauauaaacauaaaggaucauagcauuguuuccaguuauguguguucaggacuuguuggagacacacccagaaaaaacgacagcuccagcaguagccauuguuuggauccuaacaaugaagaagguggucauggagugaaaggcugggccuuugaugauggaaaugacguguggaugggaagaacgaucgacgagacgucacgcuuaggguaugaaaccuucaaagucauugaaggcugguccaacccuaagucaaaauugcagauaaauaggcaagucauaguugacagagguaauagguccgguuauucugguauuuucucuguugaaggcaagagcugcaucaaucggugcuuuuauguggaguugauuaggggaagaaaagaggaaacugaagucuuguggaccucaaacaguauuguuguguuuuguggcaccucagguacauauggaacaggcucauggccugauggggcggaccucaaucucaugccuauauaa

SEQ ID NO: 56134 - RNA, 1410 nt, Artificial Sequence; identical to SEQ ID NO: 56000
  derived and/or modified CDS sequence (wt) from neuraminidase__InfluenzaA__AHC60110

SEQ ID NO: 56135 - RNA, 1410 nt, Artificial Sequence; identical to SEQ ID NO: 56060
  derived and/or modified CDS sequence (wt) from neuraminidase__InfluenzaA__AHC60122

SEQ ID NO: 56136 - RNA, 1410 nt, Artificial Sequence; identical to SEQ ID NO: 55987
  derived and/or modified CDS sequence (wt) from neuraminidase__InfluenzaA__AHC60134

SEQ ID NO: 56137 - RNA, 1410 nt, Artificial Sequence; identical to SEQ ID NO: 56041
  derived and/or modified CDS sequence (wt) from neuraminidase__InfluenzaA__AHC60146

SEQ ID NO: 56138 - RNA, 1410 nt, Artificial Sequence; identical to SEQ ID NO: 56118
  derived and/or modified CDS sequence (wt) from neuraminidase__InfluenzaA__AHC60158

SEQ ID NO: 56139 - RNA, 1410 nt, Artificial Sequence; identical to SEQ ID NO: 55983
  derived and/or modified CDS sequence (wt) from neuraminidase__InfluenzaA__AHC60182

SEQ ID NO: 56140 - RNA, 1410 nt, Artificial Sequence
  derived and/or modified CDS sequence (wt) from neuraminidase__InfluenzaA__AHC60206
augaacccaaaucaaaagauaauaacgauuggcucuguuucucucaccauuuccauaauaugcuucuucaugcaaguugccaucuugauaacuacuguaacauugcauuucaagcaauaugaauucaacucccccccaaacaaccaagugaugcugugugaaccaacaauaauagaaagaaacauaacagagauaguguaucugaccaacaccaccauagagaaggaaauaugccccaaacuagcagaauacagaaauuggucaaagccgcaaugugacauuacaggauuugcaccuuuuucuaaggacaauucgauuaggcuuuccgcugguggggacaucugggugacaagagaaccuuaugugucaugcgauccugacaaguguuaucaauuugcccuuggacagggaacaacacuaaacaacgugcauucaaauaacacaguacgugauaggaccccuuaucggacccuauugaugaaugaguuagguguuccuuuucaucuggggaccaagcaagugugcauagcaugguccagcucaaguugucacgauggaaaagcauggcugcauguuuguauaacgggggaugauaaaaaugcaacugcuagcuucauuuacaaugggaagcuuguagauaguguuguuucaugguccaaagaaauccucaggacccaggagucagaaugcguuuguaucaauggaacuuguacaguaguaaugacugaugggagugcuucaggaaaagcugauacuaaaauacuauucauugaggaggggaaaaucguucauacuagcacauugucaggaagugcucagcauguagaggagugcucuugcuauccucgauauccuggugucagaugugucugcagagacaacuggaaaggcuccaauaggcccaucguagauauaaacauaaaggaucauagcauuguuuccaguuauguguguucaggacuuguuggagacacacccagaaaaaacgacagcuccagcaguagccauuguuuggauccuaacaaugaagaagguggucauggagugaaaggcugggccuuugaugauggaaaugacguguggaugggaagaacgaucaacgagacgucacguuuaggguaugaaaccuucaaagucauugaaggcugguccaacccuaaguccaaauugcagauaaauaggcaagucauaguugacagagguaauagguccgguuauucugguauuuucucuguugaaggcaaaagcugcaucaaucggugcuuuuauguggaguugauuaggggaagaaaagaggaaacugaagucuuguggaccucaaacaguauuguuguguuuuguggcaccucagguacauauggaacaggcucauggccugauggggcggaccucaaucucaugccuauauaa

SEQ ID NO: 56141 - RNA, 1410 nt, Artificial Sequence
  derived and/or modified CDS sequence (wt) from neuraminidase__InfluenzaA__AHC60218
augaauccaaaucaaaagauaauaacgauuggcucuguuucucucaccauuuccacaauaugcuucuucaugcaaauugccaucuugauaacuacuguaacauugcauuucaagcaauaugaauucaacucccccccaaacaaccaagugaugcugugugaaccaacaauaauagaaagaaacaucacagagauaguguaucugaccaacaccaccauagagaaggaaauaugccccaaaccagcagaauacagaaauuggucaaaaccgcaaugugacauuacaggauuugcaccuuuuucuaaggacaauucgauuaggcuuuccgcugguggggacaucugggugacaagagaaccuuaugugucaugcgauccugacaaguguuaucaauuugcccuuggacagggaacaacacuaaacaaugugcauucaaauaacacaguacgugauaggaccccuuaucggacuuuauugaugaaugaauuagguguuccuuuucaucuggggaccaagcaagugugcauagcaugguccagcucaaguugucaugauggaaaagcauggcugcauguuuguauaacgggggaugauaaaaaugcaacugcuagcuucauuuacaaugggaggcuuguagauaguguuguuucaugguccaaagaaauucucaggacccaggagucagaaugcguuuguaucaauggaacuuguacaguaguaaugacugauggaagugcuucaggaaaagcugauacuaaaauacuauucauugaggaggggaaaaucguucauacuagcacauugucaggaagugcucagcaugucgaggagugcucuugcuauccucgauauccuggugucagaugugucugcagagacaacuggaaaggcuccaauaggcccaucguagauauaaacauaaaggaucauagcauugucuccaguuauguguguucaggacuuguuggagacacacccagaaaaaacgacagcuccagcaguagccauuguuuggauccuaacaaugaagaagguggucauggagugaaaggcugggccuuugaugauggaaaugacguguggaugggaagaacaaucaacgagacgucacgcuuaggguaugaaaccuucaaagucauugaaggcugguccaacccuaaguccaaauugcagauaaauaggcaagucauaguugacagaggugauagguccgguuauucugguauuuucucuguugaaggcaaaagcugcaucaaucggugcuuuuauguggaguugauuaggggaagaaaagaggaaacugaagucuuguggaccucaaacaguauuguuguguuuuguggcaccucagguacauauggaacaggcucauggccugauggggcggaccucaaucucaugccuauauaa

SEQ ID NO: 56142 - RNA, 1410 nt, Artificial Sequence
  derived and/or modified CDS sequence (wt) from neuraminidase__InfluenzaA__AHC60230
augaauccaaaucaaaagauaauaacgauuggcucuguuucucucaccauuuccacaauaugcuucuucaugcaaauugccaucuugauaacuacuguaacauugcauuucaagcaauaugaauucaacucccccccaaacaaccaagugaugcugugugaaccaacaauaauagaaagaaacauaacagagauaguguaucugaccaacaccaccauagagaaggaaauaugccccaaacuagcagaauacagaaauuggucaaagccgcaaugugacauuacaggauuugcaccuuuuucuaaggacaauucgauuaggcuuuccgcugguggggacaucugggugacaagagaaccuuaugugucaugcgauccugacaaguguuaucaauuugcccuuggacagggaacaacacuaaacaacgugcauucaaauaacacaguacgugauaggaccccuuaucggacccuauugaugaaugaguuagguguuccuuuucaucuggggaccaagcaagugugcauagcaugguccagcucaaguugucacgauggaaaagcauggcugcauguuuguauaacgggggaugauaaaaaugcaacugcuagcuucauuuacaaugggaggcuuguagauaguguuguuucaugguccaaagaaauccucaggacccaggagucagaauguguuuguaucaauggaacuuguacaguaguaaugacugaugggagugcuucaggaaaagcugauacuaaaauacuauucauugaggaggggaaaaucguucauacuagcacauugucaggaagugcucagcaugucgaggagugcucuugcuauccucgauauccuggugucagauguguuugcagagacaacuggaaaggcuccaauaggcccaucguagauauaaacauaaaggaucauagcauuguuuccaguuauguguguucaggacuuguuggagacacacccagaaaaaacgacagcuccagcaguagccauuguuuggauccuaacaaugaagaagguggucauggagugaaaggcugggccuuugaugauggaaaugacguguggaugggaagaacgaucaacgagacgucacguuuaggguaugaaaccuucaaagucauugaaggcugguccaacccuaaguccaaauugcagauaaauaggcaagucauaguugacagagguaauagguccgguuauucugguauuuucucuguugaaggcaaaagcugcaucaaucggugcuuuuauguggaguugauuaggggaagaaaagaggaaacugaagucuuguggaccucaaacaguauuguuguguuuuguggcaccucagguacauauggaacaggcucauggccugauggggcggaccucaaucucaugccuauauaa

SEQ ID NO: 56143 - RNA, 1410 nt, Artificial Sequence; identical to SEQ ID NO: 55983
  derived and/or modified CDS sequence (wt) from neuraminidase__InfluenzaA__AHC60242

SEQ ID NO: 56144 - RNA, 1410 nt, Artificial Sequence
  derived and/or modified CDS sequence (wt) from neuraminidase__InfluenzaA__AHC60254
augaacccaaaucaaaagauaauaacgauuggcucuguuucucucaccauuuccacaauaugcuucuucaugcaaauugccaucuugauaacuacuguaacauugcauuucaagcaauaugaauucuacucccccccaaacaaccaagugaugcugugugaaccaacaauaauagaaagaaacauaacagagauaguguaucugaccaacaccaccauagagaaggaaauaugccccaaacuagcagaauacagaaauuggucaaagccgcaaugugacauuacaggauuugcaccuuuuucuaaggacaauucgauuaggcuuuccgcugguggggacaucugggugacaagagaaccuuaugugucaugcgauccugacaaguguuaucaauuugcccuuggacagggaacaacacuaaacaacgugcauucaaauaacacaguacgugauaggaccccuuaucggacccuauugaugaaugaguuagguguuccuuuucaucuggggaccaagcaagugugcauagcaugguccagcucaaguugucacgauggaaaagcauggcugcauguuuguauaacgggggaugauaaaaaugcaacugcuagcuucauuuacaaugggaggcuuguagauaguguuguuucaugguccaaagaaauccucaggacccaggagucagaaugcguuuguaucaauggaacuuguacaguaguaaugacugaugggagugcuucaggaaaagcugauacuaaaauacuauucauugaggaggggaaaaucguucauacuagcacauugucaggaagugcucagcaugucgaggagugcucuugcuauccucgauauccuggugucagaugugucugcagagacaacuggaaaggcuccaauaggcccaucguugauauaaacauaaaggaucauagcauuguuuccaguuauguguguucaggacuuguuggagacacacccagaaaaaacgacagcuccagcaguagccauuguuuggauccuaacaaugaagaagguggucauggagugaaaggcugggccuuugaugauggaaaugacguguggaugggaagaacgaucaacgagacaucacgcuuaggguaugaaaccuucaaagucauugaaggcugguccaacccuaaguccaaauugcagauaaauaggcaagucauaguugacagagguaauagguccgguuauucugguauuuucucuguugaaggcaagagcugcaucaaucggugcuuuuauguggaguugauuaggggaagaaaagaggaaacugaagucuuguggaccucaaacaguauuguuguguuuuguggcaccucagguacauauggaacaggcucauggccugauggggcggaccucaaucucaugccuauauaa

SEQ ID NO: 56145 - RNA, 1410 nt, Artificial Sequence
  derived and/or modified CDS sequence (wt) from neuraminidase__InfluenzaA__AHC60266
augaacccaaaucaaaagauaauaacgauuggcucuguuucucucaccauuuccacaauaugcuucuucaugcaaauugccaucuugauaacuacuguaacauugcauuucaagcaauaugaauucuacucccccccaaacaaccaagugaugcugugugaaccaacaauaauagaaagaaacauaacagagauaguguaucugaccaacaccaccauagagaaggaaauaugccccaaacuagcagaauacagaaauuggucaaagccgcaaugugacauuacaggauuugcaccuuuuucuaaggacaauucgauuaggcuuuccgcugguggggacaucugggugacaagagaaccuuaugugucaugcgauccugacaaguguuaucaauuugcccuuggacagggaacaacacuaaacaacgugcauucaaauaacacaguacgugauaggaccccuuaucggacccuauugaugaaugaguuagguguuccuuuucaucuggggaccaagcaagugugcauagcaugguccagcucaaguugucacgauggaaaagcauggcugcauguuuguauaacgggggaugacaaaaaugcaacugcuagcuucauuuacaaugggaggcuuguagauaguguuguuucaugguccaaagaaauccucaggacccaggagucagaaugcguuuguaucaauggaacuuguacaguaguaaugacugaugggagugcuucaggaaaagcugauacuaaaauacuauucauugaggaagggaaaaucguucauacuagcacauugucaggaagugcucagcaugucgaggagugcucuugcuauccucgauauccuggugucagaugugucugcagagacaacuggaaaggcuccaauaggcccaucguugauauaaacauaaaggaucauagcauuguuuccaguuauguguguucaggacuuguuggagacacacccagaaaaaacgacagcuccagcaguagccauuguuuggauccuaacaaugaagaagguggucauggagugaaaggcugggccuuugaugauggaaaugauguguggaugggaagaacgaucaacgagacgucacgcuuaggguaugaaaccuucaaagucauugaaggcugguccaacccuaaguccaaauugcagauaaauaggcaagucauaguugacagagguaauagguccgguuauucugguauuuucucuguugaaggcaagagcugcaucaaucggugcuuuuauguggaguugauuaggggaagaaaagaggaaacugaagucuuguggaccucaaacaguauuguuguguuuuguggcaccucagguacauauggaacaggcucauggccugauggggcggaccucaaucucaugccuauauaa

SEQ ID NO: 56146 - RNA, 1410 nt, Artificial Sequence
  derived and/or modified CDS sequence (wt) from neuraminidase__InfluenzaA__AHC60278
augaauccaaaucaaaagauaauaacgauuggcucuguuucucucaccauuuccacaauaugcuucuucaugcaaauugccaucuugauaacuacuguaacauugcauuucaagcaauaugaauucaacucccccccaaacaaccaagugaugcugugugaaccaacaauaauagaaagaaacauaacagagauaguguaucugaccaacaccaccauagagaaggaaauaugccccaaacuagcagaauacagaaauuggucaaagccgcaaugugacauuacaggauuugcaccuuuuucuaaggacaauucgauuaggcuuuccgcugguggggacaucugggugacaagagaaccuuaugugucaugcgauccugacaaguguuaucaauuugcccuuggacagggaacaacacuaaacaacgugcauucaaauaacacaguacgugauaggaccccuuaucggacccuauugaugaaugaguuagguguuccuuuucaucuggggaccaagcaagugugcauagcaugguccagcucaaguugucacgauggaaaagcauggcugcauguuuguauaacgggggaugauaaaaaugcaacugcuagcuucauuuacaaugggaggcuuguagauaguguuguuucaugguccaaagaaauccucaggacccaggagucagaaugcguuuguaucaauggaacuugugcaguaguaaugacugaugggagugcuucaggaaaagcugauacuaaaauacuauucauugaggaggggaaaaucguucauacuagcacauugucaggaagugcucagcaugucgaggagugcucuugcuauccucgauauccuggugucagaugugucugcagagacaacuggaaaggcuccaauaggcccaucguagauauaaacauaaaggaucauagcauuguuuccaguuauguguguucaggacuuguuggagacacacccagaaaaaacgacagcuccagcaguagccauuguuuggauccuaacaaugaagaagguggucauggagugaaaggcugggccuuugaugauggaaaugacguguggaugggaagaacgaucaacgagacgucacguuuaggguaugaaaccuucaaagucauugaaggcugguccaacccuaaguccaaauugcagauaaauaggcaagucauaguugacagagguaauagguccgguuauucugguauuuucucuguugaagguaaaagcugcaucaaucggugcuuuuauguggaguugauuaggggaagaaaagaggaaacugaagucuuguggaccucaaacaguauuguuguguuuuguggcaccucugguacauauggaacaggcucauggccugauggggcggaccucaaucucaugccuauauaa

SEQ ID NO: 56147 - RNA, 1410 nt, Artificial Sequence; identical to SEQ ID NO: 56000
  derived and/or modified CDS sequence (wt) from neuraminidase__InfluenzaA__AHC60290

SEQ ID NO: 56148 - RNA, 1410 nt, Artificial Sequence
  derived and/or modified CDS sequence (wt) from neuraminidase__InfluenzaA__AHC60302
augaauccaaaucaaaagauaauaacgauuggcucuguuucucucaccauuuccacaauaugcuucuucaugcaaauugccaucuugauaacuacuguaacauuacauuucaagcaauaugaauucaacucccccccaaacaaccaagugaugcugugugaaccaacaauaauagaaagaaacauaacagagauaguguaucugaccaacaccaccauagagaaggaaauaugucccaaacuagcagaauacagaaauuggucaaagccgcaaugugacauuacaggauuugcaccuuuuucuaaggacaauucgauuaggcuuuccgcugguggggacaucugggugacaagagaaccuuaugugucaugcgauccuaacaaguguuaucaauuugcccuuggacagggaacaacacuaaacaacgugcauucaaauaacacaguacgugauaggaccccuuaucggacccuauugaugaaugaguuagguguuccuuuucaucuggggaccaagcaagugugcauagcaugguccagcucaaguugucacgauggaaaagcauggcugcauguuuguauaacgggggaugauaaaaaugcaacugcuagcuucauuuacaaugggaagcuuguagauaguguuguuucaugguccaaagaaauccucaggacccaggagucagaaugcguuuguaucaauggaacuuguacaguaguaaugacugaugggagugcuucaggaaaagcugauacuaaaauacuauucauugaggaggggaaaaucauucauacuagcacauugucaggaagugcucagcaugucgaggagugcucuugcuauccucgauauccuggugucagaugugucugcagagacaacuggaaaggcuccaauaggcccaucguagauauaaacauaaaggaucauagcauuguuuccaguuauguguguucaggacuuguuggagacacacccagaaaaaacgacagcuccagcaguagccauuguuuggauccuaacaaugaagaagguggucauggagugaaaggcugggccuuugaugauggaaaugacguguggaugggaagaacgaucaacgagacuucacguuuaggguaugaaaccuucaaagucauugaaggcugguccaacccuaaguccaaauugcagauaaauaggcaagucauaguugacagagguaauagguccgguuauucugguauuuucucuguugaaggcaaaagcugcaucaaucggugcuuuuauguggaguugauuaggggaagaaaagaggaaacugaagucuuguggaccucaaacaguauuguuguguuuuguggcaccucagguacauauggaacaggcucauggccugauggggcggaccucaaucucaugccuauauaa

SEQ ID NO: 56149 - RNA, 1410 nt, Artificial Sequence; identical to SEQ ID NO: 55983
  derived and/or modified CDS sequence (wt) from neuraminidase__InfluenzaA__AHC60314

SEQ ID NO: 56150 - RNA, 1410 nt, Artificial Sequence; identical to SEQ ID NO: 55983
  derived and/or modified CDS sequence (wt) from neuraminidase__InfluenzaA__AHC60326

SEQ ID NO: 56151 - RNA, 1410 nt, Artificial Sequence
  derived and/or modified CDS sequence (wt) from neuraminidase__InfluenzaA__AHC60338
augaauccaaaucaaaagauaauaacgauuggcucuguuucucucaccauuuccacaauaugcuucuucaugcaaauugccaucuugauaacuacuguaacauugcauuucaagcaauaugaauucaacucccccccaaacaaccaagugaugcugugugaaccaacaauaauagaaagaaacaucacagagauaguguaucugaccaacaccaccauagagaaggaaauaugccccaaaccagcagaauacagaaauuggucaaaaccgcaaugugacauuacaggauuugcaccuuuuucuaaggacaauucgauuaggcuuuccgcugguggggacaucugggugacaagagaaccuuaugugucaugcgauccugacaaguguuaucaauuugcccuuggacagggaacaacacuaaacaaugugcauucaaauaacacaguacgugauaggaccccuuaucggacuuuauugaugaaugaauuagguguuccuuuucaucuggggaccaagcaagugugcauagcaugguccagcucaaguugucacgauggaaaagcauggcugcauguuuguauaacgggggaugauaaaaaugcaacugcuagcuucauuuacaaugggaggcuuguagauaguguuguuucaugguccaaagaaauucucaggacccaggagucagaaugcguuuguaucaauggaacuuguacaguaguaaugacugauggaagugcuucaggaaaagcugauacuaaaauacuauucauugaggaggggaaaaucguucauacuagcacauugucaggaagugcucagcaugucgaggagugcucuugcuauccucgauauccuggugucagaugugucugcagagacaacuggaaaggcuccaauaggcccaucguagauauaaacauaaaggaucauagcauugucuccaguuauguguguucaggacuuguuggagacacacccagaaaaaacgacagcuccagcaguagccauuguuuggauccuaacaaugaagaagguggucauggagugaaaggcugggccuuugaugauggagaugacguguggaugggaagaacaaucaacgagacgucacgcuuaggguaugaaaccuucaaagucauugaaggcugguccaacccuaaguccaaauugcagauaaauaggcaagucauaguugacagaggugauagguccgguuauucugguauuuucucuguugaaggcaaaagcugcaucaaucggugcuuuuauguggaguugauuaggggaagaaaagaggaaacugaagucuuguggaccucaaacaguauuguuguguuuuguggcaccucagguacauauggaacaggcucauggccugauggggcggaccucaaucucaugccuauauaa

SEQ ID NO: 56152 - RNA, 1410 nt, Artificial Sequence
  derived and/or modified CDS sequence (wt) from neuraminidase__InfluenzaA__AHC60350
augaauccaaaucaaaagauaauaacgauuggcucuguuucucucaccauuuccacaauaugcuucuucaugcaaauugccaucuugauaacuacuguaacauugcauuucaagcaauaugaauucaacccccccccaaacaaccaagugaugcugugugaaccaacaauaauagaaagaaacauaacagagauaguguaucugaccaacaccaccauagagaaggaaauaugccccaaacuagcagaauacagaaauuggucaaagccgcaaugugacauuacaggauuugcaccuuuuucuaaggacaauucgauuaggcuuuccgcugguggggacaucugggugacaagagaaccuuaugugucaugcgauccugacaaguguuaucaguuugcccuuggacagggaacaacacuaaacaacgugcauucaaauaacacaguacgugauaggaccccuuaucggacccuauugaugaaugaguuagguguuccuuuucaucuggggaccaagcaagugugcauagcaugguccagcucaaguugucacgauggaaaagcauggcugcauguuuguauaacgggggaugauaaaaaugcaacugcuagcuucauuuacaaugggaggcuuguagauaguguuguuucaugguccaaagaaauccucaggacccaggagucagaaugcguuuguaucaauggaacuuguacaguaguaaugacugaugggagugcuucaggaaaagcugauacuaaaauacuauucauugaggaggggaaaaucguucauacuagcacauugucaggaagugcucagcaugucgaggagugcucuugcuauccucgauauccuggugucagaugugucugcagagacaacuggaaaggcuccaauaggcccaucguagauauaaacauaaaggaucauagcauuguuuccaguuauguguguucaggacuuguuggagacacacccagaaaaaacgacagcuccagcaguagccauuguuuggauccuaacaaugaagaagguggucauggagugaaaggcugggccuuugaugauggaaaugacguguggaugggaagaacgaucaacgagacgucacguuuaggguaugaaaccuucaaagucauugaaggcugguccaacccuaaguccaaauugcagauaaauaggcaagucauaguugacagagguaauagguccgguuauuccgguauuuucucuguugaaggcaaaagcugcaucaaucggugcuuuuauguggaguugauuaggggaagaaaagaggaaacugaagucuuguggaccucaaacaguauuguuguguuuuguggcaccucagguacauauggaacaggcucauggccugauggggcggaccucaaucucaugccuauauaa

SEQ ID NO: 56153 - RNA, 1410 nt, Artificial Sequence
  derived and/or modified CDS sequence (wt) from neuraminidase__InfluenzaA__AHC60362
augaacccaaaucaaaagauaauaacgauuggcucuguuucucucaccauuuccacaauaugcuucuucaugcaaguugccaucuugauaacuacuguaacauugcauuucaagcaauaugaauucaacucccccccaaacaaccaagugaugcuguguaaaccaacaauaauagaaagaaacauaacagagauaguguaucugaccaacaccaccauagagaaggaaauaugccccaaacuagcagaauacagaaauuggucaaagccgcaaugugacauuacaggauuugcaccuuuuucuaaggacaauucgauuaggcuuuccgcugguggggacaucugggugacaagagaaccuuaugugucaugcgauccugacaaguguuaucaauuugcccuuggacagggaacaacacuaaacaacgugcauucaaauaacacaguacgugauaggaccccuuaucggacccuauugaugaaugaguuagguguuccuuuucaucuggggaccaagcaagugugcauagcaugguccagcucaaguugucacgauggaaaagcauggcugcauguuuguauaacgggggaugauaaaaaugcaacugcuagcuucauuuacaaugggaagcuuguagauaguguuguuucaugguccaaagaaauccucaggacccaggagucagaaugcguuuguaucaauggaacuuguacaguaguaaugacugaugggagugcuucaggaaaagcugauacuaaaauacuauucauugaggaggggaaaaucguucauacuagcacauugucaggaagugcucagcauguagaggagugcucuugcuauccucgauauccuggugucagaugugucugcagagacaacuggaaaggcuccaauaggcccaucguagauauaaacauaaaggaucauagcauuguuuccaguuauguguguucaggacuuguuggagacacacccagaaaaaacgacagcuccagcaguagccauuguuuggauccuaacaaugaagaagguggucauggagugaaaggcugggccuuugaugauggaaaugacguguggaugggaagaacgaucaacgagacgucacguuuaggguaugaaaccuucaaagucauugaaggcugguccaacccuaaguccaaauugcagauaaauaggcaagucauaguugacagagguaauagguccgguuauucugguauuuucucuguugaaggcaaaagcugcaucaaucggugcuuuuauguggaguugauuaggggaagaaaagaggaaacugaagucuuguggaccucaaacaguauuguuguguuuuguggcaccucagguacauauggaacaggcucauggccugauggggcggaccucaaucucaugccuauauaa

SEQ ID NO: 56154 - RNA, 1410 nt, Artificial Sequence; identical to SEQ ID NO: 56071
  derived and/or modified CDS sequence (wt) from neuraminidase__InfluenzaA__AHC60374

SEQ ID NO: 56155 - RNA, 1410 nt, Artificial Sequence
  derived and/or modified CDS sequence (wt) from neuraminidase__InfluenzaA__AHC60386
augaauccaaaucaaaagauaauaacgauuggcucuguuucucucaccauuuccacaauaugcuucuucaugcaaauugccaucuugauaacuacuguaacauugcauuucaagcaauaugaauucaacucccccccaaacaaccaagugaugcugugugaaccaacaauaauagaaagaaacauaacagagauaguguaucugaccaacaccaccauagagaaggaaauaugccccaaacuagcagaauacagaaauuggucaaagccgcaaugugacauuacaggauuugcaccuuuuucuaaggacaauucaauuaggcuuuccgcugguggggacaucugggugacaagagaaccuuaugugucaugcgauccugacaaguguuaucaauuugcccuuggacagggaacaacacuaaacaacgugcauucaaauaacacaguacgugauaggaccccuuaucggacccuauugaugaaugaguuagguguuccuuuucaucuggggaccaagcaagugugcauagcaugguccagcucaaguugucacgauggaaaagcauggcugcauguuuguauaacgggggaugauaaaaaugcaacugcuagcuucauuuacaaugggaggcuuguagauaguguuguuucaugguccaaagaaauccucaggacccaggagucagaauguguuuguaucaauggaacuuguacaguaguaaugacugaugggagugcuucaggaaaagcugauacuaaaauacuauucauugaggaggggaaaaucguucauacuagcacauugucaggaagugcucagcaugucgaggagugcucuugcuauccucgauauccuggugucagaugugucugcagagacaacuggaaaggcuccaauaggcccaucguagauauaaacauaaaggaucauagcauuguuuccaguuauguguguucaggacuuguuggagacacacccagaaaaaacgacagcuccagcaguagccauuguuuggauccuaacaaugaagaagguggucauggagugaaaggcugggccuuugaugauggaaaugacguguggaugggaagaacgaucaacgagacgucacguuuaggguaugaaaccuucaaagucauugaaggcugguccaacccuaaguccaaauugcagauaaauaggcaagucauaguugacagagguaauagguccgguuauucugguauuuucucuguugaaggcaaaagcugcaucaaucggugcuuuuauguggaguugauuaggggaagaaaagaggaaacugaagucuuguggaccucaaacaguauuguuguguuuuguggcaccucagguacauauggaacaggcucauggccugauggggcggaccucaaucucaugccuauauaa

SEQ ID NO: 56156 - RNA, 1410 nt, Artificial Sequence; identical to SEQ ID NO: 55987
  derived and/or modified CDS sequence (wt) from neuraminidase__InfluenzaA__AHC60398

SEQ ID NO: 56157 - RNA, 1410 nt, Artificial Sequence; identical to SEQ ID NO: 56088
  derived and/or modified CDS sequence (wt) from neuraminidase__InfluenzaA__AHC60410

SEQ ID NO: 56158 - RNA, 1410 nt, Artificial Sequence
  derived and/or modified CDS sequence (wt) from neuraminidase__InfluenzaA__AHC60422
augaauccaaaucaaaagauaauaacgauuggcucuguuucucucaccauuuccacaauaugcuucuucaugcaaauugccaucuugauaacuacuguaacauugcauuucaagcaauaugaauucaacucccccccaaacaaccaagugaugcugugugaaccaacaauaauagaaagaaacauaacagagauaguguaucugaccaacaccaccauagagaaggaaauaugccccaaacuagcagaauacagaaauuggucaaagccgcaaugugacauuacaggauuugcaccuuuuucuaaggacaauucgauuaggcuuuccgcugguggggacaucugggugacaagagaaccuuaugugucaugcgauccugacaaguguuaucaauuugcccuuggacagggaacaacacuaaacaacgugcauucaaauaacacaguacgugauaggaccccuuaucggacccuauugaugaaugaguuagguguuccuuuucaucuggggaccaagcaagugugcauagcaugguccagcucaaguugucacgaugggaaagcauggcugcauguuuguauaacgggggaugauaaaaaugcaacugcuagcuucauuuacaaugggaggcuuguagauaguguuguuucaugguccaaagaaauacucaggacccaggagucagaaugcguuuguaucaauggaacuuguacaguaguaaugacugaugggagugcuucaggaaaagcugauacuaaaauacuauucauugaggaggggaaaaucguucauacuagcacauugucaggaagugcucagcaugucgaggagugcucuugcuauccucgauauccuggugucagaugugucugcagagacaacuggaaaggcuccaauaggcccaucguagauauaaacauaaaggaucauagcauuguuuccaguuauguguguucaggacuuguuggagacacacccagaaaaaacgacagcuccagcaguagccauuguuuggauccuaacaaugaagaagguggucauggagugaaaggcugggccuuugaugauggaaaugacguguggaugggaagaacgaucaacgagacgucacguuuaggguaugaaaccuucaaagucauugaaggcugguccaacccuaaguccaaauugcagauaaauaggcaagucauaguugacagagguaauagguccgguuauucugguauuuucucuguugaaggcaaaagcugcaucaaucggugcuuuuauguggaguugauuaggggaagaaaagaggaaacugaagucuuguggaccucaaacaguauuguuguguuuuguggcaccucagguacauauggaacaggcucauggccugauggggcggaccucaaucucaugccuauauaa

SEQ ID NO: 56159 - RNA, 1410 nt, Artificial Sequence; identical to SEQ ID NO: 56019
  derived and/or modified CDS sequence (wt) from neuraminidase__InfluenzaA__AHC60434

SEQ ID NO: 56160 - RNA, 1410 nt, Artificial Sequence; identical to SEQ ID NO: 56009
  derived and/or modified CDS sequence (wt) from neuraminidase__InfluenzaA__AHC60446

SEQ ID NO: 56161 - RNA, 1410 nt, Artificial Sequence
  derived and/or modified CDS sequence (wt) from neuraminidase__InfluenzaA__AHC60458
augaauccaaaucaaaagauaauaacgauuggcucuguuucucucaccauuuccacaauaugcuucuucaugcaaauugccaucuugauaacuacuguaacauugcauuucaagcaauaugaauucaacucccccccaaacaaccaagugaugcugugugaaccaacaauaauagaaagaaacauaacagagauaguguaucugaccaacaccaccauagagaaggaaauaugccccaaacuagcagaauacagaaauuggucaaagccgcaaugugacauuacaggauuugcaccuuuuucuaaggacaauucgauuaggcuuuccgcugguggggacaucugggugacaagagaaccuuaugugucaugcgauccugacaaguguuaucaauuugcccuuggacagggaacaacacuaaacaacgugcauucaaauaacacaguacgugauaggaccccuuaucggacccuauugaugaaugaguuagguguuccuuuucaucuggggaccaagcaagugugcauagcaugguccagcucaaguugucacgauggaaaagcauggcugcauguuuguauaacgggggaugauaaaaaugcaacugcuagcuucauuuacaaugggaggcuuguagauaguguuguuucaugguccaaagaaauccucaggacccaggagucagaaugcguuuguaucaauggaacuugugcaguaguaaugacugaugggagugcuucaggaaaagcugauacuaaaauacuauucauugaggaggggaaaaucguucauacuagcacauugucaggaagugcucagcaugucgaggagugcucuugcuauccucgauauccuggugucagaugugucugcagagacaacuggaaaggcuccaauaggcccaucguagauauaaacauaaaggaucauagcauuguuuccaguuauguguguucaggacuuguuggagacacacccagaaaaaacgacggcuccagcaguagccauuguuuggauccuaacaaugaagaagguggucauggagugaaaggcugggccuuugaugauggaaaugacguguggaugggaagaacgaucaacgagacgucacguuuaggguaugaaaccuucaaagucauugaaggcugguccaacccuaaguccaaauugcagauaaauaggcaagucauaguugacagagguaauagguccgguuauucugguauuuucucuguugaagguaaaagcugcaucaaucggugcuuuuauguggaguugauuaggggaagaaaagaggaaacugaagucuuguggaccucaaacaguauuguuguguuuuguggcaccucagguacauauggaacaggcucauggccugauggggcggaccucaaucucaugccuauauaa

SEQ ID NO: 56162 - RNA, 1410 nt, Artificial Sequence; identical to SEQ ID NO: 56093
  derived and/or modified CDS sequence (wt) from neuraminidase__InfluenzaA__AHC60470

SEQ ID NO: 56163 - RNA, 1410 nt, Artificial Sequence
  derived and/or modified CDS sequence (wt) from neuraminidase__InfluenzaA__AHC60482
augaauccaaaucaaaagauaauaacgauuggcucuguuucucucaccauuuccacaauaugcuucuucaugcaaauugccaucuugacaacuacuguaacauugcauuucaagcaauaugaauucaacucccccccaaacaaccaagugaugcugugugaaccaacaauaauagaaagaaacaucacagagauaguguaucugaccaacaccaccauagagaaggaaauaugccccaaaccagcagaauacagaaauuggucaaaaccgcaaugugacauuacaggauuugcaccuuuuucuaaggacaauucgauuaggcuuuccgcugguggggacaucugggugacaagagaaccuuaugugucaugcgauccugacaaguguuaucaauuugcccuuggacagggaacaacacuaaacaaugugcauucaaauaacacaguacgugauaggaccccuuaucggacuuuauugaugaaugaguuagguguuccuuuucaucuggggaccaagcaagugugcauagcaugguccagcucaaguugucacgauggaaaagcauggcugcauguuuguauaacgggggaugauaaaaaugcaacugcuagcuucauuuacaaugggaggcuuguagauaguguuguuucaugguccaaagaaauucucaggacccaggagucagaaugcguuuguaucaauggaacuuguacaguaguaaugacugauggaagugcuucaggaaaagcugauacuaaaauacuauucauugaggaggggaaaaucguucauacuagcacauugucaggaagugcucagcaugucgaggagugcucuugcuauccucgauauccuggugucagaugugucugcagagacaacuggaaaggcuccaauaggcccaucguagauauaaacauaaaggaucauagcauugucuccaguuauguguguucaggacuuguuggagacacacccagaaaaaacgacagcuccagcaguagccauuguuuggauccuaacaaugaagaagguggucauggagugaaaggcugggccuuugaugauggaaaugacguguggaugggaagaacaaucaacgagacgucacgcuuaggguaugaaaccuucaaagucauugaaggcugguccaacccuaaguccaaauugcagauaaauaggcaagucauaguugacagaggugauagguccgguuauucugguauuuucucuguugaaggcaaaagcugcaucaaucggugcuuuuauguggaguugauuaggggaagaaaagaggaaacugaagucuuguggaccucaaacaguauuguuguguuuuguggcaccucagguacauauggaacaggcucauggccugauggggcggaccucaaucucaugccuauauaa

SEQ ID NO: 56164 - RNA, 1410 nt, Artificial Sequence; identical to SEQ ID NO: 55983
  derived and/or modified CDS sequence (wt) from neuraminidase__InfluenzaA__AHC60494

SEQ ID NO: 56165 - RNA, 1410 nt, Artificial Sequence
  derived and/or modified CDS sequence (wt) from neuraminidase__InfluenzaA__AHC60506
augaauccaaaucaaaagauaauaacgauuggcucuguuucucucaccauuuccacaauaugcuucuucaugcaaauugccaucuugauaacuacuguaacauugcauuucaagcaauaugaauucuacucccccccaaacaaccaagugaugcugugugaaccaacaauaauagaaagaaacauaacagagauaguguaucugaccaacaccaccauagagaaggaaauaugccccaaacuagcagaauacagaaauuggucaaagccgcaaugugacauuacaggauuugcaccuuuuucuaaggacaauucgauuaggcuuuccgcugguggggacaucugggugacaagagaaccuuaugugucaugcgauccugacaaguguuaucaauuugcccuuggacagggaacaacacuaaacaacgugcauucaaauaacacaguacgugauaggaccccuuaucggacccuauugaugaaugaguuagguguuccuuuucaucuggggaccaagcaagugugcauagcaugguccagcucaaguugucacgauggaaaagcauggcugcauguuuguauaacgggggaugauaaaaaugcaacugcuagcuucauuuacaaugggaggcuuguagauaguguuguuucaugguccaaagaaauccucaggacccaggagucagaaugcguuuguaucaauggaacuuguacaguaguaaugacugaugggagugcuucaggaaaagcugauacuaaaauacuauucauugaggaggggaaaaucguucauacuagcacauugucaggaagugcucagcaugucgaggagugcucuugcuauccucgauauccuggugucagaugugucugcagagacaacuggaaaggcuccaauaggcccaucguugauauaaacauaaaggaucauagcauuguuuccaguuauguguguucaggacuuguuggagacacacccagaaaaaacgacagcuccagcaguagccauuguuuggauccuaacaaugaagaagguggucauggagugaaaggcugggccuuugaugauggaaaugacguguggaugggaagaacgaucaacgagacgucacguuuaggguaugaaaccuucaaagucauugaaggcugguccaacccuaaguccaaauugcagauaaauaggcaagucauaguugacagagguaauagguccgguuauucugguauuuucucuguugaaggcaaaagcugcaucaaucggugcuuuuauguggaguugauuaggggaagaaaagaggaaacugaagucuuguggaccucaaacaguauuguuguguuuuguggcaccucagguacauauggaacaggcucauggccugauggggcggaccucaaucucaugccuauauaa

SEQ ID NO: 56166 - RNA, 1410 nt, Artificial Sequence; identical to SEQ ID NO: 55987
  derived and/or modified CDS sequence (wt) from neuraminidase__InfluenzaA__AHC60518

SEQ ID NO: 56167 - RNA, 1410 nt, Artificial Sequence
  derived and/or modified CDS sequence (wt) from neuraminidase__InfluenzaA__AHC60542
augaauccaaaucaaaagauaauaacgauuggcucuguuucucucaccauuuccacaauaugcuucuucaugcaaauugccaucuugauaacuacuguaacauugcauuucaagcaauaugaauucaacucccccccaaacaaccaagugaugcugugugaaccaacaauaauagaaagaaacauaacagagauaguguaucugaccaacaccaccauagagaaggaaauaugccccaaacuagcagaauacagaaauuggucaaagccgcaaugugacauuacaggauuugcaccuuuuucuaaggacaauucgauuaggcuuuccgcugguggggacaucugggugacaagagaaccuuaugugucaugcgauccuaacaaguguuaucaauuugcccuuggacagggaacaacacuaaacaacgugcauucaaauaacacaguacgugauaggaccccuuaucggacccuauugaugaaugaguuagguguuccuuuucaucuggggaccaagcaagugugcauagcaugguccagcucaaguugucacgauggaaaagcauggcugcauguuuguauaacgggggaugauaaaaaugcaacugcuagcuucauuuacaaugggaagcuuguagauaguguuguuucaugguccaaagaaauccucaggacccaggagucagaaugcguuuguaucaauggaacuuguacaguaguaaugacugaugggagugcuucaggaaaagcugauacuaaaauacuauucauugaggaggggaaaaucguucauacuagcacauugucaggaagugcucagcaugucgaggagugcucuugcuauccucgauauccuggugucagaugugucugcagagacaacuggaaaggcuccaauaggcccaucguagauauaaacauaaaggaucauagcauuguuuccaguuauguguguucaggacuuguuggagacacacccagaaaaaacgacagcuccagcaguagccauuguuuggauccuaacaaugaagaagguggucauggagugaaaggcugggccuuugaugaugggaaugacguguggaugggaagaacgaucaacgagacuucacguuuaggguaugaaaccuucaaagucauugaaggcugguccaacccuaaguccaaauugcagauaaauaggcaagucauaguugacagagguaauagguccgguuauucugguauuuucucuguugaaggcaaaagcugcaucaaucggugcuuuuauguggaguugauuaggggaagaaaagaggaaacugaagucuuguggaccucaaacaguauuguuguguuuuguggcaccucagguacauauggaacaggcucauggccugauggggcggaccucaaucucaugccuauauaa

SEQ ID NO: 56168 - RNA, 1410 nt, Artificial Sequence
  derived and/or modified CDS sequence (wt) from neuraminidase__InfluenzaA__AHC60554
augaacccaaaucaaaagauaauaacgauuggcucuguuucucucaccauuuccacaauaugcuucuucaugcaaauugccaucuugauaacuacuguaacauugcauuucaagcaauaugaauucuacucccccccaaacaaccaagugaugcugugugaaccaacaaugauagaaagaaacauaacagagauaguguaucugaccaacaccaccauagagaaggaaauaugccccaaacuagcagaauacagaaauuggucaaagccgcaaugugacauuacaggauuugcaccuuuuucuaaggacaauucgauuaggcuuuccgcugguggggacaucugggugacaagagaaccuuaugugucaugcgauccugacaaguguuaucaauuugcccuuggacagggaacaacacuaaacaacgugcauucaaauaacacaguacgugauaggaccccuuaucggacccuauugaugaaugaguuagguguuccuuuucaucuggggaccaagcaagugugcauagcaugguccagcucaaguugucacgauggaaaagcauggcugcauguuuguauaacgggggaugauaaaaaugcaacugcuagcuucauuuacaaugggaggcuuguagauaguguuguuucaugguccaaagaaauccucaggacccaggagucagaaugcguuuguaucaauggaacuuguacaguaguaaugacugaugggagugcuucaggaaaagcugauacuaaaauacuauucauugaggaggggaaaaucguucauacuagcacauugucaggaagugcucagcaugucgaggagugcucuugcuauccucgauauccuggugucagaugugucugcagagacaacuggaaaggcuccaauaggcccaucguugauauaaacauaaaggaucauagcauuguuuccaguuauguguguucaggacuuguuggagacacacccagaaaaaacgacagcuccagcaguagccauuguuuggauccuaacaaugaagaagguggucauggagugaaaggcugggccuuugaugauggaaaugacguguggaugggaagaacgaucaacgagacgucacgcuuaggguaugaaaccuucaaagucauugaaggcugguccaacccuaaguccaaauugcagauaaauaggcaagucauaguugacagagguaauagguccgguuauucugguauuuucucuguugaaggcaagagcugcaucaaucggugcuuuuauguggaguugauuaggggaagaaaagaggaaacugaagucuuguggaccucaaacaguauuguuguguuuuguggcaccucagguacauauggaacaggcacauggccugauggggcggaccucaaucucaugccuauauaa

SEQ ID NO: 56169 - RNA, 1410 nt, Artificial Sequence
  derived and/or modified CDS sequence (wt) from neuraminidase__InfluenzaA__AHC60566
augaauccaaaucaaaagauaauaacgauuggcucuguuucucucaccauuuccacaauaugcuucuucaugcaaauugccaucuugauaacuacuguaacauugcauuucaagcaauaugaauucaacucccccccaaacaaccaagugaugcugugugaaccaacaauaauagaaagaaacaucacagagauaguguaucugaccaacaccaccauagagaaggaaauaugccccaaaccagcagaauacagaaauuggucaaaaccgcaaugugacauuacaggauuugcaccuuuuucuaaggacaauucgauuaggcuuuccgcugguggggacaucugggugacaagagaaccuuaugugucaugcgauccugacaaguguuaucaauuugcccuuggacagggaacaacacuaaacaaugugcauucaaauaacacaguacgugauaggaccccuuaucggacuuuauugaugaaugaguuagguguuccuuuucaucuggggaccaagcaagugugcauagcaugguccagcucaaguugucacgauggaaaagcauggcugcauguuuguauaacgggggaugauaaaaaugcaacugcuagcuucauuuacaaugggaggcuuguagauaguguuguuucaugguccaaagaaauucucaggacccaggagucagaaugcguuuguaucaauggaacuuguacaguaguaaugacugauggaagugcuucaggaaaagcugauacuaaaauacuauucauugaggaggggaaaaucguucauacuagcacauugucaggaagugcucagcaugucgaggagugcucuugcuauccucgauauccuggugucagaugugucugcagagacaacuggaaaggcuccaauaggcccaucguagauauaaacauaaaggaucauagcauugucuccaguuauguguguucaggacuuguuggagacacacccagaaaaaacgacagcuccagcaguagccauuguuuggauccuaacaaugaagaagguggucauggagugaaaggcugggccuuugaugauggaaaugacguguggaugggaagaacaaucaacgagacgucacgcuuaggguaugaaaccuucaaagucauugaaggcugguccaacccuaaguccaaauugcagguaaauaggcaagucauaguugacagaggugauagguccgguuauucugguauuuucucuguugaaggcaaaagcugcaucaaucggugcuuuuauguggaguugauuaggggaagaaaagaggaaacugaagucuuguggaccucaaacaguauuguuguguuuuguggcaccucagguacauauggaacaggcucauggccugauggggcggaccucaaucucaugccuauauaa

SEQ ID NO: 56170 - RNA, 1410 nt, Artificial Sequence; identical to SEQ ID NO: 55991
  derived and/or modified CDS sequence (wt) from neuraminidase__InfluenzaA__AHC60578

SEQ ID NO: 56171 - RNA, 1410 nt, Artificial Sequence; identical to SEQ ID NO: 55983
  derived and/or modified CDS sequence (wt) from neuraminidase__InfluenzaA__AHC60590

SEQ ID NO: 56172 - RNA, 1410 nt, Artificial Sequence
  derived and/or modified CDS sequence (wt) from neuraminidase__InfluenzaA__AHC60602
augaauccaaaucaaaagauaauaacgauuggcucuguuucucucaccauuuccacaauaugcuucuucaugcaaauugccaucuugauaacuacuguaacauugcauuucaagcaauaugaauucaacccccccccaaacaaccaaguggugcugugugaaccaacaauaauagaaagaaacaucacagagauaguguaucugaccaacaccaccauagagaaggaaauaugccccaaaccagcagaauacagaaauuggucaaaaccgcaaugugacauuacaggauuugcaccuuuuucuaaggacaauucgauuaggcuuuccgcugguggggacaucugggugacaagagaaccuuaugugucaugcgauccugacaaguguuaucaauuugcccuuggacagggaacaacacuaaacaaugugcauucaaauaacacaguacgugauaggaccccuuaucggacuuuauugaugaaugaguuagguguuccuuuucaucuggggaccaagcaagugugcauagcaugguccagcucaaguugucacgauggaaaagcauggcugcauguuuguauaacgggggaugauaaaaaugcaacugcuagcuucauuuacaaugggaggcuuguagauaguguuguuucaugguccaaagaaauucucaggacccaggagucagaaugcguuuguaucaauggaacuuguacaguaguaaugacugauggaagugcuucaggaaaagcugauacuaaaauacuauucauugaggaggggaaaaucguucauacuagcacauugucaggaagugcucagcaugucgaggagugcucuugcuauccucgauauccuggugucagaugugucugcagagacaacuggaaaggcuccaauaggcccaucguagauauaaacauaaaggaucauagcauugucuccaguuauguguguucaggacuuguuggagacacacccagaaaaaacgacagcuccagcaguagccauuguuuggauccuaacaaugaagaagguggucauggagugaaaggcugggccuuugaugauggaaaugacguguggaugggaagaacaaucaacgagacgucacgcuuaggguaugaaaccuucaaagucauugaaggcugguccaacccuaaguccaaauugcagauaaauaggcaagucauaguugacagaggugauagguccgguuauucugguauuuucucuguugaaggcaaaagcugcaucaaucggugcuuuuauguggaguugauuaggggaagaaaagaggaaacugaagucuuguggaccucaaacaguauuguuguguuuuguggcaccucagguacauauggaacaggcucauggccugauggggcggaccucaaucucaugccuauauaa

SEQ ID NO: 56173 - RNA, 1410 nt, Artificial Sequence
  derived and/or modified CDS sequence (wt) from neuraminidase__InfluenzaA__AHC60614
augaauccaaaucaaaagauaauaacgauuggcucuguuucucucaccauuuccacaauaugcuucuucaugcaaauugccaucuugauaacuacuguaacauugcauuucaagcaauaugaauucaacucccccccaaacaaccaagugaugcugugugaaccaacaauaauagaaagaaacauaacagagauaguguaucugaccaacaccaccauagagaaggaaauaugccccaaacuagcagaauacagaaauuggucaaagccgcaaugugacauuacaggauuugcaccuuuuucuaaggacaauucgauuaggcuuuccgcugguggggacaucugggugacaagagaaccuuaugugucaugcgauccugacaaguguuaucaauuugcccuuggacagggaacaacacuaaacaacgugcauucaaauaacacaguacgugauaggaccccuuaucggacccuauugaugaaugaguuagguguuccuuuucaucuggggaccaagcaggugugcauagcaugguccagcucaaguugucacgauggaaaagcauggcugcauguuuguauaacgggggaugauaaaaaugcaacugcuagcuucauuuacaaugggaggcuuguagauaguguuguuucaugguccaaagaaauccucaggacccaggagucagaaugcguuuguaucaauggaacuuguacaguaguaaugacugaugggagugcuucaggaaaagcugauacuaaaauacuauucauugaggaggggaaaaucguucauacuagcacauugucaggaagugcucagcaugucgaggagugcucuugcuauccucgauauccuggugucagaugugucugcagagacaacuggaaaggcuccaauaggcccaucguagauauaaacauaaaggaucauagcauuguuuccaguuauguguguucaggacuuguuggagacacacccagaaaaaacgacagcuccagcaguagccauuguuuggauccuaacaaugaagaagguggucauggaguaaaaggcugggccuuugaugauggaaaugacguguggaugggaagaacgaucaacgagacgucacguuuaggguaugaaaccuucaaagucauugaaggcugguccaacccuaaguccaaauugcagauaaauaggcaagucauaguugacagagguaauagguccgguuauucugguauuuucucuguugaaggcaaaagcugcaucaaucggugcuuuuauguggaguugauuaggggaagaaaagaggaaacugaagucuuguggaccucaaacaguauuguuguguuuuguggcaccucagguacauauggaacaggcucauggccugauggggcggaccucaaucucaugccuauauaa

SEQ ID NO: 56174 - RNA, 1410 nt, Artificial Sequence
  derived and/or modified CDS sequence (wt) from neuraminidase__InfluenzaA__AHC60626
augaauccaaaucaaaagauaauaacgauuggcucuguuucucucaccauuuccacaauaugcuucuucaugcaaauugccaucuugauaacuacuguaacauugcauuucaagcaauaugaauucaacucccccccaaacaaccaagugaugcugugugaaccaacaauaauagaaagaaacauuacagagauaguguaucugaccaacaccaccauagagaaggaaauaugccccaaaccagcagaauacagaaauuggucaaaaccgcaaugugacauuacaggauuugcaccuuuuucuaaggacaauucgauuaggcuuuccgcugguggggacaucugggugacaagagaaccuuaugugucaugcgauccugacaaguguuaucaauuugcccuuggacagggaacaacacuaaacaaugugcauucaaauaacacaguacgugauaggaccccuuaucggacuuuauugaugaaugaguuagguguuccuuuucaucuggggaccaagcaagugugcauagcaugguccagcucaaguugucacgauggaaaagcauggcugcauguuuguauaacgggggaugauaaaaaugcaacugcuagcuucauuuacaaugggaggcuuguagauaguguuguuucaugguccaaagaaauucucaggacccaggagucagaaugcguuuguaucaauggaacuuguacaguaguaaugacugauggaagugcuucaggaaaagcugauacuaaaauacuauucauugaggaggggaagaucguucauacuagcacauugucaggaagugcucagcaugucgaggagugcucuugcuauccucgauauccuggugucagaugugucugcagagacaacuggaaaggcuccaauaggcccaucguagauauaaacauaaaggaucauagcauugucuccaguuauguguguucaggacuuguuggagacacacccagaaaaaacgacagcuccagcaguagccauuguuuggauccuaacaaugaagaagguggucauggagugaaaggcugggccuuugaugauggaaaugacguguggaugggaagaacaaucaacgagacgucacgcuuaggguaugaaaccuucaaagucauugaaggcugguccaacccuaaauccaaauugcagauaaauaggcaagucauaguugacagaggugauagguccgguuauucugguauuuucucuguugaaggaaaaagcugcaucaaucggugcuuuuauguggaguugauuaggggaagaaaagaggaaacugaagucuuguggaccucaaacaguauuguuguguuuuguggcaccucagguacauauggaacaggcucauggccugauggggcggaccucaaucucaugccuauauaa

SEQ ID NO: 56175 - RNA, 1410 nt, Artificial Sequence
  derived and/or modified CDS sequence (wt) from neuraminidase__InfluenzaA__AHC60650
augaacccaaaucaaaagauaauaacgauuggcucuguuucucucaccauuuccacaauaugcuucuucaugcaaauugccaucuugauaacuacuguaacauugcauuucaagcaauaugaauucuacucccccccaaacaaccaagugaugcugugugaaccaacaauaauagaaagaaacauaacagagauaguguaucugaccaacaccaccauagagaaggaaauaugccccaaacuagcagaauacagaaauuggucaaagccgcaaugugacauuacaggauuugcaccuuuuucuaaggacaauucgauuaggcuuuccgcugguggggacaucugggugacaagagaaccuuaugugucaugcgauccugacaaguguuaucaauuugcccuugggcagggaacaacacuaaacaacgugcauucaaauaacacaguacgugauaggaccccuuaucggacccuauugaugaaugaguuagguguuccuuuucaucuggggaccaagcaagugugcauagcaugguccagcucaaguugucacgauggaaaagcauggcugcauguuuguauaacgggggaugaugaaaaugcaacugcuagcuucauuuacaaugggaggcuuguagauaguguuguuucaugguccaaagaaauccucaggacccaggagucagaaugcguuuguaucaauggaacuuguacaguaguaaugacugaugggagugcuucaggaaaagcugauacuaaaauacuauucauugaggaggggaaaaucguucauacuagcacauugucaggaagugcucagcaugucgaggagugcucuugcuauccucgauauccuggugucagaugugucugcagagacaacuggaaaggcuccaauaggcccaucguugauauaaacauaaaggaucauagcauuguuuccaguuauguguguucaggacuuguuggagacacacccagaaaaaacgacagcuccagcaguagccauuguuuggauccuaacaaugaagaagguggucauggagugaaaggcugggccuuugaugauggaaaugacguguggaugggaagaacgaucaacgagacgucacgcuuaggguaugaaaccuucaaagucauugaaggcugguccaacccuaaguccaaauugcagauaaauaggcaagucauaguugacagagguaauagguccgguuauucugguauuuucucuguugaaggcaagagcugcaucaaucggugcuuuuauguggaguugauuaggggaagaaaagaggaaacugaagucuuguggaccucaaacaguauuguuguguuuuguggcaccucagguacauauggaacaggcucauggccugauggggcggaccucaaucucaugccuauauaa

SEQ ID NO: 56176 - RNA, 1410 nt, Artificial Sequence
  derived and/or modified CDS sequence (wt) from neuraminidase__InfluenzaA__AHC60662
augaauccaaaucaaaagauaauaacgauuggcucuguuucucucaccauuuccacaauaugcuucuucaugcaaauugccaucuugauaacuacuguaacauugcauuucaagcaauaugaauucaacucccccccgaacaaccaagugaugcugugugaaccaacaauaauagaaagaaacauaacagagauaguguaucugaccaacaccaccauagagaaggaaauaugccccaaacuagcagaauacagaaauuggucaaagccgcaaugugacauuacaggauuugcaccuuuuucuaaggacaauucgauuaggcuuuccgcugguggggacaucugggugacaagagaaccuuaugugucaugcgauccugacaaguguuaucaauuugcccuuggacagggaacaacacuaaacaacgugcauucaaauaacacaguacgugauaggaccccuuaucggacccuauugaugaaugaguuagguguuccuuuucaucuggggaccaagcaagugugcauagcaugguccagcucaaguugucacgauggaaaagcauggcugcauguuuguauaacgggggaugauaaaaaugcaacugcuagcuucauuuacaaugggaggcuuguagauaguguuguuucaugguccaaagaaauccucaggacccaggagucagaaugcguuuguaucaauggaacuugugcaguaguaaugacugaugggagugcuucaggaaaagcugauacuaaaauacuauucauugaggaggggaaaaucguucauacuagcacauugucaggaagugcucagcaugucgaggagugcucuugcuauccucgauauccuggugucagaugugucugcagagacaacuggaaaggcuccaauaggcccaucguagauauaaacauaaaggaucauagcauuguuuccaguuauguguguucaggacuuguuggagacacacccagaaaaaacgacagcuccagcaguagccauuguuuggauccuaacaaugaagaagguggucauggagugaaaggcugggccuuugaugauggaaaugacguguggaugggaagaacgaucaaugagacgucacguuuaggguaugaaaccuucaaagucauugaaggcugguccaacccuaaguccaaauugcagauaaauaggcaagucauaguugacagagguaauagguccgguuauucugguauuuucucuguugaagguaaaagcugcaucaaucggugcuuuuauguggaguugauuaggggaagaaaagaggaaacugaagucuuguggaccucaaacaguauuguuguguuuuguggcaccucagguacauauggaacaggcucauggccugauggggcggaccucaaucucaugccuauauaa

SEQ ID NO: 56177 - RNA, 1410 nt, Artificial Sequence; identical to SEQ ID NO: 56011
  derived and/or modified CDS sequence (wt) from neuraminidase__InfluenzaA__AHC60674

SEQ ID NO: 56178 - RNA, 1410 nt, Artificial Sequence
  derived and/or modified CDS sequence (wt) from neuraminidase__InfluenzaA__AHC60686
augaauccaaaucaaaagauaauaacgauuggcucuguuucucucaccauuuccacaauaugcuucuucaugcaaauugccaucuugauaacuacuguaacauugcauuucaagcaauaugaauucaacucccccccaaacaaccaagugaugcugugugaaccaacaauaauagaaagaaacauaacagagauaguguaucugaccaacaccaccauagagaaggaaauaugccccaaacuagcagaauacagaaauuggucaaagccgcaaugugacauuacaggauuugcaccuuuuucuaaggacaauucgauuaggcuuuccgcugguggggacaucugggugacaagagaaccuuaugugucaugcgauccugacaaguguuaucaauuugcccuuggacagggaacaacacuaaacaacgugcauucaaauaacacaguacgugauaggaccccuuaucggacccuauugaugaaugaguuagguguuccuuuucaucuggggaccaagcaagugugcauagcaugguccagcucaaguugucacgauggaaaagcauggcugcauguuuguauaacgggggaugauaaaaaugcaacugcuagcuucauuuacaaugggaggcuuguagauaguguuguuucaugguccaaagaaauccucaggacccaggagucagaauguguuuguaucaauggaacuuguacaguaguaaugacugaugggagugcuucaggaaaagcugauacuaaaauacuauucauugaggagggaaaaaucguucauacuagcacauugucaggaagugcucagcaugucgaggagugcucuugcuauccucgauauccuggugucagaugugucugcagagacaacuggaaaggcuccaauaggcccaucguagauauaaacauaaaggaucauagcauuguuuccaguuauguguguucaggacuuguuggagacacacccagaaaaaacgacagcuccagcaguagccauuguuuggauccuaacaaugaagaagguggucauggagugaaaggcugggccuuugaugauggaaaugacguguggaugggaagaacgaucaacgagacgucacguuuaggguaugaaaccuucaaagucauugaaggcugguccaacccuaaguccaaauugcagauaaauaggcaagucauaguugacagagguaauagguccgguuauucugguauuuucucuguugaaggcaaaagcugcaucaaucggugcuuuuauguggaguugauuaggggaagaaaagaggaaacugaagucuuguggaccucaaacaguauuguuguguuuuguggcaccucagguacauauggaacaggcucauggccugauggggcggaccucaaucucaugccuauauaa

SEQ ID NO: 56179 - RNA, 1410 nt, Artificial Sequence; identical to SEQ ID NO: 56009
  derived and/or modified CDS sequence (wt) from neuraminidase__InfluenzaA__AHC60698

SEQ ID NO: 56180 - RNA, 1410 nt, Artificial Sequence; identical to SEQ ID NO: 56028
  derived and/or modified CDS sequence (wt) from neuraminidase__InfluenzaA__AHC60710

SEQ ID NO: 56181 - RNA, 1410 nt, Artificial Sequence; identical to SEQ ID NO: 56093
  derived and/or modified CDS sequence (wt) from neuraminidase__InfluenzaA__AHC60722

SEQ ID NO: 56182 - RNA, 1410 nt, Artificial Sequence
  derived and/or modified CDS sequence (wt) from neuraminidase__InfluenzaA__AHC60734
augaauccaaaucaaaagauaauaacgauuggcucuguuucucucaccauuuccacaauaugcuucuucaugcaaauugccaucuugauaacuacuguaacauugcauuucaagcaauaugaauucaacucccccccaaacaaccaagugaugcugugugaaccaacaauaauagaaagaaacauaacagagauaguguaucugaucaacaccaccauagagaaggaaauaugccccaaacuagcagaauacagaaauuggucaaagccgcaaugugacauuacaggauuugcaccuuuuucuaaggacaauucgauuaggcuuuccgcugguggggacaucugggugacaagagaaccuuaugugucaugcgauccuaacaaguguuaucaauuugcccuuggacagggaacaacacuaaacaacgugcauucaaauaacacaguacgugauaggaccccuuaucggacccuauugaugaaugaguuagguguuccuuuucaucuggggaccaagcaagugugcauagcaugguccagcucaaguugucacgauggaaaagcauggcugcauguuuguauaacgggggaugauaaaaaugcaacugcuagcuucauuuacaaugggaagcuuguagauaguguuguuucaugguccaaagaaauccucaggacccaggagucagaaugcguuuguaucaauggaacuuguacaguaguaaugacugaugggagugcuucaggaaaagcugauacuaaaauacuauucauugaggaggggaaaaucguucauacuagcacauugucaggaagugcucagcaugucgaggagugcucuugcuauccucgauauccuggugucagaugugucugcagagacaacuggaaaggcuccaauaggcccaucguagauauaaacauaaaggaucauagcauuguuuccaguuauguguguucaggacuuguuggagacacacccagaaaaaacgacagcuccagcaguagccauuguuuggauccuaacaaugaagaagguggucauggagugaaaggcugggccuuugaugauggaaaugacguguggaugggaagaacgaucaacgagacuucacguuuaggguaugaaaccuucaaagucauugaaggcugguccaacccuaaguccaaauugcagauaaauaggcaagucauaguugacagagguaauagguccgguuauucugguauuuucucuguugaaggcaaaagcugcaucaaucggugcuuuuauguggaguugauuaggggaagaaaagaggaaacugaagucuuguggaccucaaacaguauuguuguguuuuguggcaccucagguacauauggaacaggcucauggccugauggggcggaccucaaucucaugccuauauaa

SEQ ID NO: 56183 - RNA, 1410 nt, Artificial Sequence; identical to SEQ ID NO: 56088
  derived and/or modified CDS sequence (wt) from neuraminidase__InfluenzaA__AHC60746

SEQ ID NO: 56184 - RNA, 1410 nt, Artificial Sequence
  derived and/or modified CDS sequence (wt) from neuraminidase__InfluenzaA__AHC60770
augaacccaaaucaaaagauaauaacgauuggcucuguuucucucaccauuuccacaauaugcuucuucauacaaauugccaucuugauaacuacuguaacauugcauuucaagcaauaugaauucaacucccccccaaacaaccaagugaugcugugugaaccaacaauaauagaaagaaacauaacagagauaguguaucugaccaacaccaccauagagaaggaaauaugccccaaacuagcagaauacagaaauuggucaaagccgcaaugugacauuacaggguuugcaccuuuuucuaaggacaauucgauuaggcuuuccgcugguggggacaucugggugacaagagaaccuuaugugucaugcgauccugacaaguguuaucaauuugcccuuggacagggaacaacacuaaacaacgugcauucaaauaacacaguacgugauaggaccccuuaucggacccuauugaugaaugaguuagguguuccuuuucaucuggggaccaagcaagugugcauagcaugguccagcucaaguugucacgauggaaaagcauggcugcauguuuguauaacgggggaugauaaaaaugcaacugcuagcuucauuuacaaugggaggcuuguggauaguguuguuucaugguccaaagaaauccucaggacccaggagucagaaugcguuuguaucaauggaacuuguacaguaguaaugacugaugggagugcuucaggaaaagcugauacuaaaauacuauucauugaggaggggaaaaucguucauacuagcacauugucaggaagugcucagcaugucgaggagugcucuugcuauccucgauaucccggugucagaugugucugcagagacaacuggaaaggcuccaauaggcccaucguagauauaaacauaaaggaucauagcauuguuuccaguuauguguguucaggacuuguuggagacacacccagaaaaaacgacagcuccagcagcagccauuguuuggauccuaacaaugaagaagguggucauggagugaaaggcugggccuuugaugauggaaaugacguguggaugggaagaacgaucaacgagacgucacgcuuaggguaugaaaccuucaaagucauugaaggcugguccaacccuaaguccaaauugcagaugaauaggcaagucauaguugacagagguaauagguccgguuauucugguauuuucucuguugaaggcaagagcugcaucaaucggugcuuuuauguggaguugauuaggggaagaaaagaggaaacugaagucuuguggaccucaaacaguauuguuguguuuuguggcaccucagguacauauggaacaggcucauggccugauggggcggaccucaaucucaugccuauauaa

SEQ ID NO: 56185 - RNA, 1410 nt, Artificial Sequence
  derived and/or modified CDS sequence (wt) from neuraminidase__InfluenzaA__AHC60782
augaauccaaaucaaaagauaauaacgauuggcucuguuucucucaccauuuccacaauaugcuucuucaugcaaauugccaucuugauaacuacuguaacauugcauuucaagcaauaugaauucaacucccccccaaacaaccaagugaugcugugugaaccaacaauaauagaaagaaacauaacagagauaguguaucugaccaacaccaccauagagaaggaaauaugccccaaacuagcagaauacagaaauuggucaaagccgcaaugugacauuacaggauuugcaccuuuuucuaaggacaauucgauuaggcuuuccgcugguggggacaucugggugacaagagaaccuuaugugucaugcgauccugacaaguguuaucaauuugcccuuggacagggaacaacacuaaacaacgugcauucaaauaacacaguacgugauaggaccccuuaucggacccuauugaugaaugaguuagguguuccuuuucaucuggggaccaagcaagugugcauagcaugguccagcucaaguugucacgauggaaaagcauggcugcauguuuguauaacgggggaugauaaaaaugcaacugcuagcuucauuuacaaugggaggcuuguagauaguguuguuucaugguccaaagaaauccucaggacccaggagucagaaugcguuuguaucaauggaacuuguacaguaguaaugacugaugggagugcuucaggaaaagcugauacuaaaauacuauucauugaggaggggaaaaucguucauacuagcacauugucaggaagugcucagcaugucgaggagugcucuugcuauccucgauauccuggugucagaugugucugcagagacaacuggaaaggcuccaauaggcccaucguagauauaaacauaaaggaucauagcauuguuuccgguuauguguguucaggacuuguuggagacacacccagaaaaaacgacagcuccagcaguagccauuguuuggauccuaacaaugaagaagguggucauggagugaaaggcugggccuuugaugauggaaaugacguguggaugggaagaacgaucaacgagacgucacguuuaggguaugaaaccuucaaagucauugaaggcugguccaacccuaaguccaaauugcagauaaauaggcaagucauaguugacagagguaauagguccgguuauucugguauuuucucuguugaaggcaaaagcugcaucaaucggugcuuuuauguggaguugauuaggggaagaaaagaggaaacugaagucuuguggaccucaaacaguauuguuguguuuuguggcaccucagguacauauggaacaggcucauggccugauggggcggaccucaaucucaugccuauauaa

SEQ ID NO: 56186 - RNA, 1410 nt, Artificial Sequence; identical to SEQ ID NO: 56114
  derived and/or modified CDS sequence (wt) from neuraminidase__InfluenzaA__AHC60794

SEQ ID NO: 56187 - RNA, 1410 nt, Artificial Sequence
  derived and/or modified CDS sequence (wt) from neuraminidase__InfluenzaA__AHC60806
augaauccaaaucaaaagauaauaacaauuggcucuguuucucucaccauuuccacaauaugcuucuucaugcaaauugccaucuugauaacuacuguaacauuacauuucaagcaaugugaauucaacucccccccaaacaaccaagugaugcugugugaaccaacaauaauagaaagaaacauaacagagauaguguaucugaccaacaccaccauagagaaggaaauaugccccaaacuagcagaauacagaaauuggucaaagccgcaaugugacauuacaggauuugcaccuuuuucuaaggacaauucgauuaggcuuuccgcugguggggacaucugggugacaagagaaccuuaugugucaugcgauccuaacaaguguuaucaauuugcccuuggacagggaacaacacuaaacaacgugcauucaaauaacacaguacgugauaggaccccuuaucggacccuauugaugaaugaguuagguguuccuuuucaucuggggaccaagcaagugugcauagcaugguccagcucaaguugucacgauggaaaagcauggcugcauguuuguauaacgggggaugauaaaaaugcaacugcuagcuucauuuacaaugggaagcuuguagauaguguuguuucaugguccaaagaaauccucaggacccaggagucagaaugcguuuguaucaauggaacuuguacaguaguaaugacugaugggagugcuucaggaaaagcugauacuaaaauacuauucauugaggaggggaaaaucguucauacuagcacauugucaggaagugcucagcaugucgaggagugcucuugcuauccucgauauccuggugucagaugugucugcagagacaacuggaaaggcuccaauaggcccaucguagauauaaacauaaaggaucauagcauuguuuccaguuauguguguucaggacuuguuggagacacacccagaaaaaacgacagcuccagcaguagccauuguuuggauccuaacaaugaagaagguggucauggagugaaaggcugggccuuugaugauggaaaugacguguggaugggaagaacgaucaacgagacuucacguuuaggguaugaaaccuucaaagucauugaaggcugguccaacccuaaguccaaauugcagauaaauaggcaagucauaguugacagagguaauagguccgguuauucugguauuuucucuguugaaggcaaaagcugcaucaaucggugcuuuuauguagaguugauuaggggaagaaaagaggaaacuggagucuuguggaccucaaacaguauuguuguguuuuguggcaccucagguacauauggaacaggcucauggccugauggggcggaccucaaucucaugccuauauaa

SEQ ID NO: 56188 - RNA, 1410 nt, Artificial Sequence; identical to SEQ ID NO: 56152
  derived and/or modified CDS sequence (wt) from neuraminidase__InfluenzaA__AHC60818

SEQ ID NO: 56189 - RNA, 1410 nt, Artificial Sequence; identical to SEQ ID NO: 56009
  derived and/or modified CDS sequence (wt) from neuraminidase__InfluenzaA__AHC60830

SEQ ID NO: 56190 - RNA, 1410 nt, Artificial Sequence; identical to SEQ ID NO: 56168
  derived and/or modified CDS sequence (wt) from neuraminidase__InfluenzaA__AHC60842

SEQ ID NO: 56191 - RNA, 1410 nt, Artificial Sequence; identical to SEQ ID NO: 55987
  derived and/or modified CDS sequence (wt) from neuraminidase__InfluenzaA__AHC60854

SEQ ID NO: 56192 - RNA, 1410 nt, Artificial Sequence
  derived and/or modified CDS sequence (wt) from neuraminidase__InfluenzaA__AHC60866
augaauccaaaucaaaagauaauaacgauuggcucuguuucucucaccauuuccacaauaugcuucuucaugcaaauugccaucuugauaacuacuguaacauugcauuucaagcaauaugaauucaacucccccccaaacaaccaagugaugcugugugaaccaacaauaauagaaagaaacauaacagagauaguguaucugaccaacaccaccauagagaaggaaauaugccccaaacuagcagaauacagaaauuggucaaagccgcaaugugacauuacaggauuugcaccuuuuucuaaggacaauucgauuaggcuuuccgcugguggggacaucugggugacaagagaaccuuaugugucaugcgauccugacaaguguuaucaauuugcccuuggacagggaacaacacuaaacaacgugcauucaaauaacacaguacgugauaggaccccuuaucggacccuauugaugaaugaguuagguguuccuuuucaucuggggaccaagcaagugugcauagcaugguccagcucaaguugucacgauggaaaagcauggcugcauguuuguauaacgggggaugauaaaaaugcaacugcuagcuucauuuacaaugggaggcuuguagauaguguuguuucaugguccaaagaaauccucaggacccaggagucagaaugcguuuguaucaauggaacuugugcaguaguaaugacugaugggagugcuucaggaaaagcugauacuaaaauacuauucauugaggaggggaaaaucguucauacuagcacauugucaggaagugcucagcaugucgaggagugcucuugcuauccucgauauccuggugucagaugugucugcagggacaacuggaaaggcuccaauaggcccaucguagauauaaacauaaaggaucauagcauuguuuccaguuauguguguucaggacuuguuggagacacacccagaaaaaacgacagcuccagcaguagccauuguuuggauccuaacaaugaagaagguggucauggagugaaaggcugggccuuugaugauggaaaugacguguggaugggaagaacgaucaacgagacgucacguuuaggguaugaaaccuucaaagucauugaaggcugguccaacccuaaguccaaauugcagauaaauaggcaagucauaguugacagagguaauagguccgguuauucugguauuuucucuguugaaggcaaaagcugcaucaaucggugcuuuuauguggaguugauuaggggaagaaaagaggaaacugaagucuuguggaccucaaacaguauuguuguguuuuguggcaccucagguacauauggaacaggcucauggccugauggggcggaccucaaucucaugccuauauaa

SEQ ID NO: 56193 - RNA, 1410 nt, Artificial Sequence; identical to SEQ ID NO: 56019
  derived and/or modified CDS sequence (wt) from neuraminidase__InfluenzaA__AHC60878

SEQ ID NO: 56194 - RNA, 1410 nt, Artificial Sequence; identical to SEQ ID NO: 56105
  derived and/or modified CDS sequence (wt) from neuraminidase__InfluenzaA__AHC60890

SEQ ID NO: 56195 - RNA, 1410 nt, Artificial Sequence; identical to SEQ ID NO: 56184
  derived and/or modified CDS sequence (wt) from neuraminidase__InfluenzaA__AHC60902

SEQ ID NO: 56196 - RNA, 1410 nt, Artificial Sequence; identical to SEQ ID NO: 55983
  derived and/or modified CDS sequence (wt) from neuraminidase__InfluenzaA__AHC60914

SEQ ID NO: 56197 - RNA, 1410 nt, Artificial Sequence
  derived and/or modified CDS sequence (wt) from neuraminidase__InfluenzaA__AHC60926
augaauccaaaucaaaagauaauaacaauuggcucuguuucucucaccauuuccacaauaugcuucuucaugcaaauugccaucuugauaacuacuguaacauuacauuucaagcaauaugaauucaacucccccccaaacaaccaagugaugcugugugaaccaacaauaauagaaagaaacauaacagagauaguguaucugaccaacaccaccauagagaaggaaauaugccccaaacuagcagaauacagaaauuggucaaagccgcaaugugacauuacaggauuugcaccuuuuucuaaggacaauucgauuaggcuuuccgcugguggggacaucugggugacaagagaaccuuaugugucaugcgauccuaacaaguguuaucaauuugcccuuggacagggaacaacacuaaacaacgugcauucaaauaacacaguacgugauaggaccccuuaucggacccuauugaugaaugaguuagguguuccuuuucaucuggggaccaagcaagugugcauagcaugguccagcucaaguugucacgauggaaaagcauggcugcauguuuguauaacgggggaugauaaaaaugcaacugcuagcuucauuuacaaugggaagcuuguagauaguguuguuucaugguccaaagaaauccucaggacccaggagucagaaugcguuuguaucaauggaacuuguacaguaguaaugacugaugggagugcuucaggaaaagcugauacuaaaauacuauucauugaggaggggaaaaucguucauacuaguacauugucaggaagugcucagcaugucgaggagugcucuugcuauccucgauauccuggugucagaugugucugcagagacaacuggaaaggcuccaauaggcccaucguagauauaaacauaaaggaucauagcauuguuuccaguuauguguguucaggacuuguuggagacacacccagaaaaaacgacagcuccagcaguagccauuguuuggauccuaacaaugaagaagguggucauggagugaaaggcugggccuuugaugauggaaaugacguguggaugggaagaacgaucaacgagacuucacguuuaggguaugaaaccuucaaagucauugaaggcugguccaacccuaaguccaaauugcagauaaauaggcaagucauaguugacagagguaauagguccgguuauucugguauuuucucuguugaaggcaaaagcugcaucaaucggugcuuuuauguggaguugauuaggggaagaaaagaggaaacugaagucuuguggaccucaaacaguauuguuguguuuuguggcaccucagguacauauggaacaggcucauggccugauggggcggaccucaaucucaugccuauauaa

SEQ ID NO: 56198 - RNA, 1410 nt, Artificial Sequence; identical to SEQ ID NO: 55983
  derived and/or modified CDS sequence (wt) from neuraminidase__InfluenzaA__AHC60938

SEQ ID NO: 56199 - RNA, 1410 nt, Artificial Sequence; identical to SEQ ID NO: 55987
  derived and/or modified CDS sequence (wt) from neuraminidase__InfluenzaA__AHC60950

SEQ ID NO: 56200 - RNA, 1410 nt, Artificial Sequence
  derived and/or modified CDS sequence (wt) from neuraminidase__InfluenzaA__AHC60962
augaacccaaaucaaaagauaauaacgauuggcucuguuucucucaccauuuccacaauaugcuucuucaugcaaauugccaucuugauaacuacuguaacauugcauuucaagcaauaugaauucuacucccccccaaacaaccaagugaugcugugugaaccaacaauaauagaaagaaacauaacagagauaguguaucugaccaacaccaccauagagaaggaaauaugccccaaacuagcagaauacagaaauuggucaaagccgcaaugugacauuacaggauuugcaccuuuuucuaaggacaauucgauuaggcuuuccgcugguggggacaucugggugacaagagaaccuuaugugucaugcgauccugacaaguguuaucaauuugcccuuggacagggaacaacacuaaacaacgugcauucaaauaacacaguacgugauaggaccccuuaucggacccuauugaugaaugaguuagguguuccuuuucaucuggggaccaagcaagugugcauagcaugguccagcucaaguugucacgauggaaaagcauggcugcauguuuguguaacgggggaugauaaaaaugcaacugcuagcuucauuuacaaugggaggcuuguagauaguguuguuucaugguccaaagaaauccucaggacccaggagucagaaugcguuuguaucaauggaacuuguacaguaguaaugacugaugggagugcuucaggaaaagcugauacuaaaauacuauucauugaggaggggaaaaucguucauacuagcacauugucaggaagugcucagcaugucgaggagugcucuugcuauccucgauauccuggugucagaugugucugcagagacaacuggaaaggcuccaauaggcccaucguugauauaaacauaaaggaucauagcauuguuuccaguuauguguguucaggacuuguuggagacacacccagaaaaaacgacagcuccagcaguagccauuguuuggauccuaacaaugaagaagguggucauggagugaaaggcugggccuuugaugauggaaaugacguguggaugggaagaacgaucaacgagacgucacgcuuaggguaugaaaccuucaaagucauugaaggcugguccaacccuaaguccaaauugcagauaaauaggcaagucauaguugacagagguaauagguccgguuauucugguauuuucucuguugaaggcaagagcugcaucaaucggugcuuuuauguggaguugauuaggggaagaaaagaggaaacugaagucuuguggaccucaaacaguauuguuguguuuuguggcaccucagguacauauggaacaggcucauggccugauggggcggaccucaaucucaugccuauauaa

SEQ ID NO: 56201 - RNA, 1410 nt, Artificial Sequence; identical to SEQ ID NO: 56032
  derived and/or modified CDS sequence (wt) from neuraminidase__InfluenzaA__AHC60974

SEQ ID NO: 56202 - RNA, 1410 nt, Artificial Sequence; identical to SEQ ID NO: 55983
  derived and/or modified CDS sequence (wt) from neuraminidase__InfluenzaA__AHC60986

SEQ ID NO: 56203 - RNA, 1410 nt, Artificial Sequence; identical to SEQ ID NO: 56130
  derived and/or modified CDS sequence (wt) from neuraminidase__InfluenzaA__AHC60998

SEQ ID NO: 56204 - RNA, 1410 nt, Artificial Sequence; identical to SEQ ID NO: 56114
  derived and/or modified CDS sequence (wt) from neuraminidase__InfluenzaA__AHC61010

SEQ ID NO: 56205 - RNA, 1410 nt, Artificial Sequence
  derived and/or modified CDS sequence (wt) from neuraminidase__InfluenzaA__AHC61022
augaauccaaaucaaaagauaauaacgauuggcucuguuucucucaccauuuccacaauaugcuucuucaugcaaauugccaucuugauaaccacuguaacauugcauuucaagcaauaugaauucaacucccccccaaacaaccaagugaugcugugugaaccaacaauaauagaaagaaacauaacagagauaguguaucugaccaacaccaccauagagaaggaaauaugccccaaacuagcagaauacagaaauuggucaaagccgcaaugugacauuacaggauuugcaccuuuuucuaaggacaauucgauuaggcuuuccgcugguggggacaucugggugacaagagaaccuuaugugucaugcgauccugacaaguguuaucaauuugcccuuggacagggaacaacacuaaacaacgugcauucaaauaacacaguacgugauaggaccccuuaucggacccuauugaugaaugaguuagguguuccuuuucaucuggggaccaagcaagugugcauagcaugguccagcucaaguugucacgauggaaaagcauggcugcauguuuguauaacgggggaugauaaaaaugcaacugcuagcuucauuuacaaugggaggcuuguagauaguguuguuucaugguccaaagaaauccucaggacccaggagucagaaugcguuuguaucaauggaacuuguacaguaguaaugacugaugggagugcuucaggaaaagcugauacuaaaauacuauucauugaggaggggaaaauuguucauacuagcacauugucaggaagugcucagcaugucgaggagugcucuugcuauccucgauauccuggugucagaugugucugcagagacaacuggaaaggcuccaauaggcccaucguagauauaaacauaaaggaucauagcauuguuuccaguuauguguguucaggacuuguuggagacacacccagaaaaaacgacagcuccagcauuagccauuguuuggauccuaacaaugaagaagguggucauggagugaaaggcugggccuuugaugauggaaaugacguguggaugggaagaacgaucaacgagacgucacguuuaggguaugaaaccuucaaagucauugaaggcugguccaacccuaaguccaaauugcagauaaauaggcaagucauaguugacagagguaauagguccgguuauucugguauuuucucuguugaaggcaaaagcugcaucaaucggugcuuuuauguggaguugauuaggggaagaaaagaggaaacugaagucuuguggaccucaaacaguauuguuguguuuuguggcaccucagguacauauggaacaggcucauggccugauggggcggaccucaaucucaugccuauauaa

SEQ ID NO: 56206 - RNA, 1410 nt, Artificial Sequence; identical to SEQ ID NO: 52717
  derived and/or modified CDS sequence (wt) from neuraminidase__InfluenzaA__AHC61034

SEQ ID NO: 56207 - RNA, 1410 nt, Artificial Sequence
  derived and/or modified CDS sequence (wt) from neuraminidase__InfluenzaA__AHC61046
augaacccaaaucaaaagauaauaacgauuggcucuguuucucucaccauuuccacaauaugcuucuucaugcaaauugccaucuugauaacuacuguaacauugcauuucaagcaauacgaauucuacucccccccaaacaaccaagugaugcugugugaaccaacaauaauagaaagaaacauaacagagauaguguaucugaccaacaccaccauagagaaggaaauaugccccaaacuagcagaauacagaaauuggucaaagccgcaaugugacauuacaggauuugcaccuuuuucuaaggacaauucgauuaggcuuuccgcugguggggacaucugggugacaagagaaccuuaugugucaugcgauccugacaaguguuaucaauuugcccuuggacagggaacaacacuaaacaacgugcauucaaauaacacaguacgugauaggaccccuuaucggacccuauugaugaaugaguuagguguuccuuuucaucuggggaccaagcaagugugcauagcaugguccagcucaaguugucacgauggaaaagcauggcugcauguuuguauaacgggggaugauaaaaaugcaacugcuagcuucauuuacaaugggaggcuuguagauaguguuguuucaugguccaaagaaauccucaggacccaggagucagaaugcguuuguaucaauggaacuuguacaguaguaaugacugaugggagugcuucaggaaaagcugauacuaaaauacuauucauugaggaggggaaaaucguucauacuagcacauugucaggaagugcucagcaugucgaggagugcucuugcuauccucgauauccuggugucagaugugucugcagagacaacuggaaaggcuccaauaggcccaucguugauauaaacauaaaggaucauagcauuguuuccaguuauguguguucaggacuuguuggagacacacccagaaaaaacgacagcuccagcaguagccauuguuuggauccuaacaaugaagaagguggucauggagugaaaggcugggccuuugaugauggaaaugacguguggaugggaagaacgaucaacgagacgucacgcuuaggguaugaaaccuucaaagucauugaaggcugguccaacccuaaguccaaguugcagauaaauaggcaagucauaguugacagagguaauagguccgguuauucugguauuuucucuguugaaggcaagagcugcaucaaucggugcuuuuauguggaguugauuaggggaagaaaagaagaaacugaagucuuguggaccucaaacaguauuguuguguuuuguggcaccucagguacauauggaacaggcucauggccugauggggcggaccucaaucucaugccuauauaa

SEQ ID NO: 56208 - RNA, 1410 nt, Artificial Sequence; identical to SEQ ID NO: 56032
  derived and/or modified CDS sequence (wt) from neuraminidase__InfluenzaA__AHC61058

SEQ ID NO: 56209 - RNA, 1410 nt, Artificial Sequence; identical to SEQ ID NO: 56071
  derived and/or modified CDS sequence (wt) from neuraminidase__InfluenzaA__AHC61070

SEQ ID NO: 56210 - RNA, 1410 nt, Artificial Sequence
  derived and/or modified CDS sequence (wt) from neuraminidase__InfluenzaA__AHC61082
augaauccaaaucaaaagauaauaacgauuggcucuguuucucucaccauuuccacaauaugcuucuucaugcaaauugccaucuugauaacuacuguaacauugcauuucaagcaauaugaauucaacucccccccaaacaaccaaguggugcugugugaaccaacaauaauagaaagaaacaucacagaaauaguguaucugaccaacaccaccauagagaaggaaauaugccccaaaccagcagaauacagaaauuggucaaaaccgcaaugugacauuacaggauuugcaccuuuuucuaaggacaauucgauuaggcuuuccgcugguggggacaucugggugacaagagaaccuuaugugucaugcgauccugacaaguguuaucaauuugcccuuggacagggaacaacacuaaacaaugugcauucaaauaacacaguacgugauaggaccccuuaucggacuuuauugaugaaugaguuagguguuccuuuucaucuggggaccaagcaagugugcauagcaugguccagcucaaguugucacgauggaaaagcauggcugcauguuuguauaacgggggaugauaaaaaugcaacugcuagcuucauuuacaaugggaggcuuguagauaguguuguuucaugguccaaagaaauucucaggacccaggagucagaaugcguuuguaucaauggaacuuguacaguaguaaugacugauggaagugcuucaggaaaagcugauacuaaaauacuauucauugaggaggggaaaaucguucauacuagcacauugucaggaagugcucagcaugucgaggagugcucuugcuauccucgauauccuggugucagaugugucugcagagacaacuggaaaggcuccaauaggcccaucguagauauaaacauaaaggaucauagcauugucuccaguuauguguguucaggacuuguuggagacacacccagaaaaaacgacagcuccagcaguagccauugcuuggauccuaacaaugaagaagguggucauggagugaaaggcugggccuuugaugauggaaaugacguguggaugggaagaacaaucaacgagacgucacgcuuaggguaugaaaccuucaaagucauugaaggcugguccaaccccaaguccaaauugcagauaaauaggcaagucauaguugacagaggugauagguccgguuauucugguauuuucucuguugaaggcaaaagcugcaucaaucggugcuuuuauguggaguugauuaggggaagaaaagaggaaacuggagucuuguggaccucaaacaguauuguuguguuuuguggcaccucagguacauauggaacaggcucauggccugauggggcggaccucaaucucaugccuauauaa

SEQ ID NO: 56211 - RNA, 1410 nt, Artificial Sequence; identical to SEQ ID NO: 52717
  derived and/or modified CDS sequence (wt) from neuraminidase__InfluenzaA__AHC61094

SEQ ID NO: 56212 - RNA, 1410 nt, Artificial Sequence; identical to SEQ ID NO: 56019
  derived and/or modified CDS sequence (wt) from neuraminidase__InfluenzaA__AHC61106

SEQ ID NO: 56213 - RNA, 1410 nt, Artificial Sequence
  derived and/or modified CDS sequence (wt) from neuraminidase__InfluenzaA__AHC61118
augaacccaaaucaaaagauaauaacgauuggcucuguuucucucaccauuuccacaauaugcuucuucaugcaaguugccaucuugauaacuacuguaacacugcauuucaagcaauaugaauucaacucccccccaaacaaccaagugaugcugugugaaccaacaauaauagaaagaaacauaacagagauaguguaucugaccaacaccaccauagagaaggaaauaugccccaagcuagcagaauacagaaauuggucaaagccgcaaugugacauuacaggauuugcaccuuuuucuaaggacaauucgauuaggcuuuccgcugguggggacaucugggugacaagagaaccuuaugugucaugcgauccugacaaguguuaucaauuugcccuuggacagggaacaacacuaaacaacgugcauucaaauaacacaguacgugauaggaccccuuaucggacccuauugaugaaugaguuagguguuccuuuucaucuggggaccaagcaagugugcauagcaugguccagcucaaguugucacgauggaaaagcauggcugcauguuuguauaacgggggaugauaaaaaugcaacugcuagcuucauuuacaaugggaagcuuguagauaguguuguuucaugguccaaagaaauccucaggacccaggagucagaaugcguuuguaucaauggaacuuguacaguaguaaugacugaugggagugcuucaggaaaagcugauacuaaaauacuauucauugaggaggggaaaaucguucauacuagcacauugucaggaagugcucagcauguagaggagugcucuugcuauccucgauauccuggugucagaugugucugcagagacaacuggaaaggcuccaauaggcccaucguagauauaaacauaaaggaucauagcauuguuuccaguuauguguguucaggacuuguuggagacacacccagaaaaaacgacagcuccagcaguagccauuguuuggauccuaacaaugaagaagguggucauggagugaaaggcugggccuuugaugauggaaaugacguguggaugggaagaacgaucaacgagacgucacguuuaggguaugaaaccuucaaagucauugaaggcugguccaacccuaaguccaaauugcagauaaauaggcaagucauaguugacagagguaauagguccgguuauucugguauuuucucuguugaaggcaaaagcugcaucaaucggugcuuuuauguggaguugauuaggggaagaaaagaggaaacugaagucuuguggaccucaaacaguauuguuguguuuuguggcaccucagguacauauggaacaggcucauggccugauggggcggaccucaaucucaugccuauauaa

SEQ ID NO: 56214 - RNA, 1410 nt, Artificial Sequence; identical to SEQ ID NO: 55983
  derived and/or modified CDS sequence (wt) from neuraminidase__InfluenzaA__AHC61130

SEQ ID NO: 56215 - RNA, 1410 nt, Artificial Sequence; identical to SEQ ID NO: 56130
  derived and/or modified CDS sequence (wt) from neuraminidase__InfluenzaA__AHC61142

SEQ ID NO: 56216 - RNA, 1410 nt, Artificial Sequence; identical to SEQ ID NO: 56019
  derived and/or modified CDS sequence (wt) from neuraminidase__InfluenzaA__AHC61154

SEQ ID NO: 56217 - RNA, 1410 nt, Artificial Sequence
  derived and/or modified CDS sequence (wt) from neuraminidase__InfluenzaA__AHC61166
augaacccaaaucaaaagauaauaacgauuggcucuguuucucucaccauuuccacgauaugcuucuucaugcaaguugccaucuugauaacuacuguaacauugcauuucaagcaauaugaauucaacucccccccaaacaaccaagugaugcugugugaaccaacaauaauagaaagaaacauaacagagauaguguaucugaccaacaccaccauagagaaggaaauaugccccaaacuagcagaauacagaaauuggucaaagccgcaaugugacauuacaggauuugcaccuuuuucuaaggacaauucgauuaggcuuuccgcugguggggacaucugggugacaagagaaccuuaugugucaugcgauccugacaaguguuaucaauuugcccuuggacagggaacaacacuaaacaacgugcauucaaauaacacaguacgugauaggaccccuuaucggacccuauugaugaaugaguuagguguuccuuuucaucuggggaccaagcaagugugcauagcaugguccagcucaaguugucacgauggaaaagcauggcugcauguuuguauaacgggggaugauaaaaaugcaacugcuagcuucauuuacaaugggaagcuuguagauaguguuguuucaugguccaaagaaauccucaggacccaggagucagaaugcguuuguaucaauggaacuuguacaguaguaaugacugaugggagugcuucaggaaaagcugauacuaaaauacuauucauugaggaggggaaaaucguucauacuagcacauugucaggaagugcucagcauguagaggagugcucuugcuauccucgauauccuggugucagaugugucugcagagacaacuggaaaggcuccaauaggcccaucguagauauaaacauaaaggaucauagcauuguuuccaguuauguguguucaggacuuguuggagacacacccagaaaaaacgacagcuccagcaguagccauuguuuggauccuaacaaugaagaagguggucauggagugaaaggcugggccuuugaugauggaaaugacguguggaugggaagaacgaucaacgagacgucacguuuaggguaugaaaccuucaaagucauugaaggcugguccaacccuaaguccaaauugcagacaaauaggcaagucauaguugacagagguaauagguccgguuauucugguauuuucucuguugaaggcaaaagcugcaucaaucggugcuuuuauguggaguugauuaggggaagaaaagaggaaacugaagucuuguggaccucaaacaguauuguuguguuuuguggcaccucagguacauauggaacaggcucauggccugauggggcggaccucaaucucaugccuauauaa

SEQ ID NO: 56218 - RNA, 1410 nt, Artificial Sequence; identical to SEQ ID NO: 55983
  derived and/or modified CDS sequence (wt) from neuraminidase__InfluenzaA__AHC61178

SEQ ID NO: 56219 - RNA, 1410 nt, Artificial Sequence; identical to SEQ ID NO: 56213
  derived and/or modified CDS sequence (wt) from neuraminidase__InfluenzaA__AHC61190

SEQ ID NO: 56220 - RNA, 1410 nt, Artificial Sequence; identical to SEQ ID NO: 56032
  derived and/or modified CDS sequence (wt) from neuraminidase__InfluenzaA__AHC61202

SEQ ID NO: 56221 - RNA, 1410 nt, Artificial Sequence; identical to SEQ ID NO: 55996
  derived and/or modified CDS sequence (wt) from neuraminidase__InfluenzaA__AHC61214

SEQ ID NO: 56222 - RNA, 1410 nt, Artificial Sequence; identical to SEQ ID NO: 56093
  derived and/or modified CDS sequence (wt) from neuraminidase__InfluenzaA__AHC61226

SEQ ID NO: 56223 - RNA, 1410 nt, Artificial Sequence; identical to SEQ ID NO: 56019
  derived and/or modified CDS sequence (wt) from neuraminidase__InfluenzaA__AHC61238

SEQ ID NO: 56224 - RNA, 1410 nt, Artificial Sequence
  derived and/or modified CDS sequence (wt) from neuraminidase__InfluenzaA__AHC61250
augaacccaaaucaaaagauaauaacgauuggcucuguuucucucaccauuuccacaauaugcuucuucaugcaaauugccaucuugauaacuacuguaacauugcauuucaagcaauaugaauucuacucccccccaaacaaccaagugaugcugugugaaccaacaauaauagaaagaaacauaacagagauaguguaucugaccaacaccaccauagagaaggaaauaugccccaaacuagcagaauacagaaauuggucaaagccgcaaugugacauuacaggauuugcaccuuuuucuaaggacaauucgauuaggcuuuccgcugguggggacaucugggugacaagagaaccuuaugugucaugcgauccugacaaguguuaucaauuugcccuuggacagggaacaacacuaaacaacgugcauucaaauaacacaguacgugauaggaccccuuaucggacccuauugaugaaugaguuagguguuccuuuucaucuggggaccaagcaagugugcauagcaugguccagcucaaguugucacgauggaaaagcauggcugcauguuuguguaacgggggaugauaaaaaugcaacugcuagcuucauuuacaaugggaggcuuguagauaguguuguuucaugguccaaagaaauccucaggacccaggagucagaaugcguuuguaucaauggaacuuguacaguaguaaugacugaugggagugcuucaggaaaagcugauacuaaaauacuauucauugaggaggggaaaaucguucauacuagcacauugucaggaagugcucagcaugucgaggagugcucuugcuauccucgauauccuggugucagaugugucugcagagacaacuggaaaggcuccaauaggcccaucguugauauaaacauaaaggaucauagcauuguuuccaguuauguguguucaggacuuguuggagacacacccagaaaaaacgacagcuccagcaguagccauuguuuggauccuaacaaugaagaagguggucauggagugaaaggcugggccuuugaugauggaaaugacguguggaugggaagaacgaucaacgagacgucacgcuuaggguaugaaaccuucaaagucauugaaggcugguccaacccuaaguccaaauugcagauaaauaggcaagucauaguugacagagguaauagguccgguuauucugguauuuucucuguugaaggcaagagcugcaucaaucggugcuuuuauguggaguugauuaggggaagaaaagaggaaacugaagucuuguggaccucaaacaguauuguuguguuuuguggcaccucagguacauauggaacaggcucauggccugauggggcagaccucaaucucaugccuauauaa

SEQ ID NO: 56225 - RNA, 1410 nt, Artificial Sequence
  derived and/or modified CDS sequence (wt) from neuraminidase__InfluenzaA__AHC61262
augaacccaaaucaaaagauaauaacgauuggcucuguuucucucaccauuuccacaauaugcuucuucaugcaaauugccaucuugauaacuacuguaacauugcauuucaagcaauaugaauucuacucccccccaaacaaccaagugaugcugugugaaccaacaauaauagaaagaaacauaacagagauaguguaucugaccaacaccaccauagagaaggaaauaugccccaaacuagcagaauacagaaauuggucaaagccgcaaugugacauuacaggauuugcaccuuuuucuaaggacaauucgauuaggcuuuccgcugguggggacaucugggugacaagagaaccuuaugugucaugcgauccugacaaguguuaucaauuugcccuuggacagggaacaacacuaaacaacgugcauucaaauaacacaguacgugauaggaccccuuaucggacccuauugaugaaugaguuagguguuccuuuucaucuggggaccaagcaagugugcauagcaugguccagcucaaguugucacgauggaaaagcauggcugcauguuuguauaacgggggaugauaaaaaugcaacugcuagcuucauuuacaaugggaggcuuguagauaguguuguuucaugguccaaagaaauccucaggacccaggagucagaaugcguuuguaucaauggaacuuguacaguaguaaugacugaugggagugcuucaggaaaagcugauacuaaaauacuauucauugaggaggggaaaaucguucauacgagcacauugucaggaagugcucagcaugucgaggagugcucuugcuauccucgauauccuggugucagaugugucugcagagacaacuggaaaggcuccaauaggcccaucguugauauaaacauaaaggaucauagcauuguuuccaguuauguguguucaggacuuguuggagacacacccagaaaaaacgacagcuccagcaguagccauuguuuggauccuaacaaugaagaagguggucauggagugaaaggcugggccuuugaugauggaaaugacguguggaugggaagaacgaucaacgagacgucacgcuuaggguaugaaaccuucaaagucauugaaggcugguccaacccuaaguccaaauugcagauaaauaggcaagucauaguugacagagguaauagguccgguuauucugguauuuucucuguugaaggcaagagcugcaucaaucggugcuuuuauguggaguugauuaggggaagaaaagaggaaacugaagucuuguggaccucaaacaguauuguuguguuuuguggcaccucagguacauauggaacaggcucauggccugauggggcggaccucaaucucaugccuauauga

SEQ ID NO: 56226 - RNA, 1410 nt, Artificial Sequence; identical to SEQ ID NO: 55987
  derived and/or modified CDS sequence (wt) from neuraminidase__InfluenzaA__AHC61274

SEQ ID NO: 56227 - RNA, 1410 nt, Artificial Sequence; identical to SEQ ID NO: 52717
  derived and/or modified CDS sequence (wt) from neuraminidase__InfluenzaA__AHC61286

SEQ ID NO: 56228 - RNA, 1410 nt, Artificial Sequence; identical to SEQ ID NO: 56073
  derived and/or modified CDS sequence (wt) from neuraminidase__InfluenzaA__AHC61298

SEQ ID NO: 56229 - RNA, 1410 nt, Artificial Sequence
  derived and/or modified CDS sequence (wt) from neuraminidase__InfluenzaA__AHC61310
augaauccaaaucaaaagauaauaacgauuggcucuguuucucucaccauuuccacaauaugcuucuucaugcaaauugccaucuugauaacuacuguaacauuacauuucaagcaauaugaauucaacucccccccaaacaaccaagugaugcugugugaaccaacaauaauagaaagaaacauaacagagauaguguaucugaccaacaccaccauagagaaggaaauaugucccaaacuagcagaauacagaaauuggucaaagccgcaaugugacauuacaggauuugcaccuuuuucuaaggacaauucgauuaggcuuuccgcugguggggacaucugggugacaagagaaccuuaugugucaugcgauccuaacaaguguuaucaauuugcccuuggacagggaacaacacuaaacaacgugcauucaaauaacacaguacgugauaggaccccuuaucgaacccuauugaugaaugaguuagguguuccuuuucaucuggggaccaagcaagugugcauagcaugguccagcucaaguugucacgauggaaaagcauggcugcauguuuguauaacgggggaugauaaaaaugcaacugcuagcuucauuuacaaugggaagcuuguagauaguguuguuucaugguccaaagaaauccucaggacccaggagucagaaugcguuuguaucaauggaacuuguacaguaguaaugacugaugggagugcuucaggaaaagcugauacuaaaauacuauucauugaggaggggaaaaucguucauacuagcacauugucaggaagugcucagcaugucgaggagugcucuugcuauccucgauauccuggugucagaugugucugcagagacaacuggaaaggcuccaauaggcccaucguagauauaaacauaaaggaucauagcauuguuuccaguuauguguguucaggacuuguuggagacacacccagaaaaaacgacagcuccagcaguagccauuguuuggauccuaacaaugaagaagguggucauggagugaaaggcugggccuuugaugauggaaaugacguguggaugggaagaacgaucaacgagacuucacguuuaggguaugaaaccuucaaagucauugaaggcugguccaacccuaaguccaaauugcagauaaauaggcaagucauaauugacagagguaauagguccgguuauucugguauuuucucuguugaaggcaaaagcugcaucaaucggugcuuuuauguggaguugauuaggggaagaaaagaggaaacugaagucuuguggaccucaagcaguauuguuguguuuuguggcaccucagguacauauggaacaggcucauggccugauggggcggaccucaaucucaugccuauauaa

SEQ ID NO: 56230 - RNA, 1410 nt, Artificial Sequence; identical to SEQ ID NO: 56100
  derived and/or modified CDS sequence (wt) from neuraminidase__InfluenzaA__AHC61322

SEQ ID NO: 56231 - RNA, 1410 nt, Artificial Sequence
  derived and/or modified CDS sequence (wt) from neuraminidase__InfluenzaA__AHC61334
augaacccaaaucaaaagauaauaacgauuggcucuguuucucucaccauuuccacaauaugcuucuucaugcaaguugccaucuugauaacuacuguaacauugcauuucaagcaauaugaauucaacucccccccaaacaaccaagugaugcugugugaaccaacaauaauagaaagaaacauaacagagauaguguaucugaccaacaccaccauagagaaggaaauaugccccaaacuagcagaauacagaaauuggucaaagccgcaaugugacauuacaggauuugcaccuuuuucuaaggacaauucgauuaggcuuuccgcugguggggacaucugggugacaagagaaccuuaugugucaugcgauccugacaaguguuaucaauuugcccuuggacagggaacaacacuaaacaacgugcauucaaauaacacaguacgugauaggaccccuuaucggacccuauugaugaaugaguuagguguuccuuuucaucuggggaccaagcaagugugcauagcaugguccagcucaaguugucacgauggaaaagcauggcugcauguuuguauaacgggggaugacaaaaaugcaacugcuagcuucauuuacaaugggaagcuuguagauaguguuguuucaugguccaaagaaauccucaggacccaggagucagaaugcguuuguaucaauggaacuuguacaguaguaaugacugaugggagugcuucaggaaaagcugauacuaaaauacuauucauugaggaggggaaaaucguucauacuagcacauugucaggaagugcucagcauguagaggagugcucuugcuauccucgauauccuggugucagaugugucugcagagacaacuggaaaggcuccaauaggcccaucguagauauaaacauaaaggaucauagcauuguuuccaguuauguguguucaggacuuguuggagacacacccagaaaaaacgacagcuccagcaguagccauuguuuggauccuaacaaugaagaagguggucauggagugaaaggcugggccuuugaugauggaaaugacguguggauggggagaacgaucaacgagacgucacguuuaggguaugaaaccuucaaagucauugaaggcugguccaacccuaaguccaaauugcagauaaauaggcaagucauaguugacagagguaauagguccgguuauucugguauuuucucuguugaaggcaaaagcugcaucaaucggugcuuuuauguggaguugauuaggggaagaaaagaggaaacugaagucuuguggaccucaaacaguauuguuguguuuuguggcaccucagguacauauggaacaggcucauggccugauggggcggaccucaaucucaugccuauauaa

SEQ ID NO: 56232 - RNA, 1410 nt, Artificial Sequence; identical to SEQ ID NO: 55996
  derived and/or modified CDS sequence (wt) from neuraminidase__InfluenzaA__AHC61346

SEQ ID NO: 56233 - RNA, 1410 nt, Artificial Sequence
  derived and/or modified CDS sequence (wt) from neuraminidase__InfluenzaA__AHC61358
augaauccaaaucaaaagauaauaacgauuggcucuguuucucucaccauuuccacaauaugcuucuucaugcaaauugccaucuugauaacuacuguaacauugcauuucaagcaauaugaauucaacucccccccaaacaaccaagugaugcugugugaaccaacaauaauagaaagaaacauaacagagauaguguaucugaccaacaccaccauagagaaggaaauaugccccaaacuagcagaauacagaaauuggucaaagccgcaaugugacauuacaggauuugcaccuuuuucuaaggacaauucgauuaggcuuuccgcugguggggacaucugggugacaagagaaccuuaugugucaugcgauccugacaaguguuaucaauuugcccuuggacagggaacaacacuaaacaacgugcauucaaauaacacaguacgugauaggaccccuuaucggacccuauugaugaaugaguuagguguuccuuuucaucuggggaccaagcaagugugcauagcaugguccagcucaaguugucacgauggaaaagcauggcugcauguuuguauaacgggggaugauaaaaaugcaacugcuagcuucauuuacaaugggaggcuuguagauaguguuguuucaugguccaaagaaauccucaggacccaggagucagaaugcguuuguaucaauggaacuuguacaguaguaaugacugaugggagugcuucaggaaaagcugauacuaaaauacuauucauugaggaggggaaaaucguucauacuagcacauugucaggaagugcucagcaugucgaggagugcucuugcuauccucgauauccuggugucagaugugucugcagagacaacuggaaaggcuccaauaggcccaucguagauauaaacauaaaggaucauagcauuguuuccaguuauguguguucaggacuuguuggagacacacccagaaaaaacgacaucuccagcaguagccauuguuuggauccuaacaaugaagaagguggucauggagugaaaggcugggccuuugaugauggaaaugacguguggaugggaagaacgaucaacgagacgucacguuuaggguaugaaaccuucaaagucauuaaaggcugguccaacccuaaguccaaauugcagauaaauaggcaaguuauaguugacagagguaauagguccgguuauucugguauuuucucuguugaaggcaaaagcugcaucaaucggugcuuuuauguggaguugauuaggggaagaaaagaggaaacugaagucuuguggaccucaaacaguauuguuguguuuuguggcaccucagguacauauggaacaggcucauggccugauggggcggaccucaaucucaugccuauauaa

SEQ ID NO: 56234 - RNA, 1410 nt, Artificial Sequence
  derived and/or modified CDS sequence (wt) from neuraminidase__InfluenzaA__AHC61370
augaauccaaaucaaaagauaauaacgauuggcucuguuucucucaccauuuccacaauaugcuucuucaugcaaauugccaucuugauaacuacuguaacauugcauuucaagcaauaugaauucaacucccccccgaacaaccaagugaugcugugugaaccaacaauaauagaaagaaacauaacagagauaguguaucugaccaacaccaccauagagaaggaaauaugccccaaacuagcagaauacagaaauuggucaaagccgcaaugugacauuacaggauuugcaccuuuuucuaaggacaauucgauuaggcuuuccgcugguggggacaucugggugacaagagaaccuuaugugucaugcgauccugacaaguguuaucaauuugcccuuggacagggaacaacacuaaacaacgugcauucaaauaacacaguacgugauaggaccccuuaucggacccuauugaugaaugaguuagguguuccuuuucaucuggggaccaagcaagugugcauagcaugguccagcucaaguugucacgauggaaaagcauggcugcauguuuguauaacgggggaugauaaaaaugcaacugcuagcuucauuuacaaugggaggcuuguagauaguguuguuucaugguccaaagaaauccucaggacccaggagucagaaugcguuuguaucaauggaacuugugcaguaguaaugacugaugggagugcuucaggaaaagcugauacuaaaauacuauucauugaggaggggaaaaucguucauacuagcacauugucaggaagugcucagcauguugaggagugcucuugcuauccucgauauccuggugucagaugugucugcagagacaacuggaaaggcuccaauaggcccaucguagauauaaacauaaaggaucauagcauuguuuccaguuauguguguucaggacuuguuggagacacacccagaaaaaacgacagcuccagcaguagccauuguuuggauccuaacaaugaagaagguggucauggagugaaaggcugggccuuugaugauggaaaugacguguggaugggaagaacgaucaacgagacgucacguuuaggguaugaaaccuucaaagucauugaaggcugguccaacccuaaguccaaauugcagauaaauaggcaagucauaguugacagagguaauagguccgguuauucugguauuuucucuguugaagguaaaagcugcaucaaucggugcuuuuauguggaguugauuaggggaagaaaagaggaaacugaagucuuguggaccucaaacaguauuguuguguuuuguggcaccucagguacauauggaacaggcucauggccugauggggcggaccucaaucucaugccuauauaa

SEQ ID NO: 56235 - RNA, 1410 nt, Artificial Sequence; identical to SEQ ID NO: 56060
  derived and/or modified CDS sequence (wt) from neuraminidase__InfluenzaA__AHC61382

SEQ ID NO: 56236 - RNA, 1410 nt, Artificial Sequence; identical to SEQ ID NO: 56093
  derived and/or modified CDS sequence (wt) from neuraminidase__InfluenzaA__AHC61394

SEQ ID NO: 56237 - RNA, 1410 nt, Artificial Sequence; identical to SEQ ID NO: 56060
  derived and/or modified CDS sequence (wt) from neuraminidase__InfluenzaA__AHC61406

SEQ ID NO: 56238 - RNA, 1410 nt, Artificial Sequence; identical to SEQ ID NO: 56019
  derived and/or modified CDS sequence (wt) from neuraminidase__InfluenzaA__AHC61418

SEQ ID NO: 56239 - RNA, 1410 nt, Artificial Sequence; identical to SEQ ID NO: 56142
  derived and/or modified CDS sequence (wt) from neuraminidase__InfluenzaA__AHC61430

SEQ ID NO: 56240 - RNA, 1410 nt, Artificial Sequence; identical to SEQ ID NO: 56032
  derived and/or modified CDS sequence (wt) from neuraminidase__InfluenzaA__AHC61442

SEQ ID NO: 56241 - RNA, 1410 nt, Artificial Sequence; identical to SEQ ID NO: 56146
  derived and/or modified CDS sequence (wt) from neuraminidase__InfluenzaA__AHC61454

SEQ ID NO: 56242 - RNA, 1410 nt, Artificial Sequence
  derived and/or modified CDS sequence (wt) from neuraminidase__InfluenzaA__AHC61466
augaauccaaaucaaaagauaauaacgauuggcucuguuucucucaccauuuccacaauaugcuucuucaugcaaauugccaucuugauaacuacuguaacauugcauuucaagcaauaugaauucaauucccccccaaacaaccaagugaugcugugugaaccaacaauaauagaaagaaacacaacagagauaguguaucugaccaacaccaccauagagaaggaaauaugccccaaacuagcagaauacagaaauuggucaaagccgcaaugugacauuacaggauuugcaccuuuuucuaaggacaauucgauuaggcuuuccgcugguggggacaucugggugacaagagaaccuuaugugucaugcgauccugacaaguguuaucaauuugcccuuggacagggaacaacacuaaacaacgugcauucaaauaacacaguacgugauaggaccccuuaucggacccuauugaugaaugaguuagguguuccuuuucaucuggggaccaagcaagugugcauagcaugguccagcucaaguugucacgauggaaaagcauggcugcauguuuguauaacgggggaugauaaaaaugcaacugcuagcuucauuuacaaugggaggcuuguagauaguguuguuucaugguccaaagaaauccucaggacccaggagucagaaugcguuuguaucaauggaacuuguacaguaguaaugacugaugggagugcuucaggaaaagcugauacuaaaauacuauucauugaggaggggaaaaucguucauacuagcacauugucaggaagugcucagcaugucgaggagugcucuugcuauccucgauauccuggugucagaugugucugcagagacaacuggaaaggcuccaauaggcccaucguagauauaaacauaaaggaucauagcauuguuuccaguuauguguguucaggacuuguuggagacacacccagaaaaaacgacagcuccagcaguagccauuguuuggauccuaacaaugaagaagguggucauggagugaaaggcugggccuuugaugauggaaaugacguguggaugggaagaacgaucaacgagacgucacguuuaggguaugaaaccuucaaagucauugaaggcugguccaacccuaaguccaaauugcagauaaauaggcaagucauaguugacaaagguaauagguccgguuauucugguauuuucucuguugaaggcaaaagcugcaucaaucggugcuuuuauguggaguugauuaggggaagaaaagaggaaacugaagucuuguggaccucaaacaguauuguuguguuuuguggcaccucagguacauauggaacaggcucauggccugauggggcggaccucaaucucaugccuauauaa

SEQ ID NO: 56243 - RNA, 1410 nt, Artificial Sequence
  derived and/or modified CDS sequence (wt) from neuraminidase__InfluenzaA__AHC61478
augaacccaaaucaaaagauaauaacgauuggcucuguuucucucaccauuuccacaauaugcuucuucaugcaaauugccaucuugauaacuacuguaacauugcauuucaagcaauaugaauucuacucccccccaaacaaccaagugaugcugugugaaccaacaauaauagaaagaaacauaacagagauaguguaucugaccaacaccaccauagagaaggaaauaugccccaaacuagcagaauacagaaauuggucaaagccgcaaugugacauuacaggauuugcaccuuuuucuaaggacaauucgauuaggcuuuccgcugguggggacaucugggugacaagagaaccuuaugugucaugcgauccugacaaguguuaucaauuugcccuuggacagggaacaacacuaaacaacgugcauucaaauaacacaguacgugauaggaccccuuaucggacccuauugaugaaugaguuagguguuccuuuucaucuggggaccaagcaagugugcauagcaugguccagcucaaguugucacgauggaaaagcauggcugcauguuuguauaacgggggaugauaaaaaugcaacugcuagcuucauuuacaaugggaggcuuguagauaguguugucucaugguccaaagaaauccucaggacccaggagucagaaugcguuuguaucaauggaacuuguacaguaguaaugacugaugggagugcuucaggaaaagcugauacuaaaauacuauucauugaggaggggaaaaucguucauacuagcacauugucaggaagugcucagcaugucgaggagugcucuugcuauccucgauauccuggugucagaugugucugcagagacaacuggaaaggcuccaauaggcccaucguugauauaaacauaaaggaucauagcauuguuuccaguuauguguguucaggacuuguuggagacacacccagaaaaaacgacagcuccagcaguagccauuguuuggauccuaacaaugaagaagguggucauggagugaaaggcugggccuuugaugauggaaaugacguguggaugggaagaacgaucaacgagacgucacgcuuaggguaugaaaccuucaaagucauugaaggcugguccaacccuaaguccaaauugcagauaaauaggcaagucauaguugacagagguaauagguccgguuauucugguauuuucucuguugaaggcaagagcugcaucaaucggugcuuuuauguggaguugauuaggggaagaaaagaggaaacugaagucuuguggaccucaaacaguauuguuguguuuuguggcaccucagguacauauggaacaggcucauggccugauggggcggaccucaaucucaugccuauauaa

SEQ ID NO: 56244 - RNA, 1410 nt, Artificial Sequence; identical to SEQ ID NO: 56105
  derived and/or modified CDS sequence (wt) from neuraminidase__InfluenzaA__AHC61490

SEQ ID NO: 56245 - RNA, 1410 nt, Artificial Sequence; identical to SEQ ID NO: 55983
  derived and/or modified CDS sequence (wt) from neuraminidase__InfluenzaA__AHC61502

SEQ ID NO: 56246 - RNA, 1410 nt, Artificial Sequence; identical to SEQ ID NO: 56032
  derived and/or modified CDS sequence (wt) from neuraminidase__InfluenzaA__AHC61514

SEQ ID NO: 56247 - RNA, 1410 nt, Artificial Sequence
  derived and/or modified CDS sequence (wt) from neuraminidase__InfluenzaA__AHC61526
augaauccaaaucaaaagauaauaacgauuggcucuguuucucucaccauuuccacaauaugcuucuucaugcaaauugccaucuugauaacuacuguaacauugcauuucaagcaauaugaauucaacucccccccaaacaaccaagugaugcugugugaaccaacaauaauagaaagaaacaucacagagauaguguaucugaccaacaccaccauagagaaggaaauaugccccaaaccagcagaauacagaaauuggucaaaaccgcaaugugacauuacaggauuugcaccuuuuucuaaggacaauucgauuaggcuuuccgcugguggggacaucugggugacaagagaaccuuaugugucaugcgauccugacaaguguuaucaauuugcccuuggacagggaacaacacuaaacaaugugcauucaaauaacacaguacgugauaggaccccuuaucggacuuuauugaugaaugaguuagguguuccuuuucaucuggggaccaagcaagugugcauagcaugguccagcucaaguugucacgauggaaaagcauggcugcauguuuguauaacgggggaugauaaaaaugcaacugcuagcuucauuuacaaugggaggcuuguagauaguguuguuucaugguccaaagaaauucucaggacccaggagucagaaugcguuuguaucaauggaacuuguacaguaguaaugacugauggaagugcuucaggaaaagcugauacuaaaauacuauucauugaggaggggaaaaucguucauacuagcacauugucaggaagugcucagcaugucgaggagugcucuugcuauccucgauauccuggugucagaugugucugcagagacaacuggaaaggcuccaauaggcccaucguagauauaaacauaaaggaucauagcauugucuccaguuauguguguucaggacuuguuggagacacacccagaaaaaacgacagcuccagcaguagccauuguuuggauccuaacaaugaagaagguggucauggagugaaaggcugggccuuugaugauggaaaugacguguggaugggaagaacaaucaacgagacaucacgcuuaggguaugaaaccuucaaagucauugaaggcugguccaacccuaaguccaaauugcagauaaauaggcaagucauaguugacagaggugauagguccgguuauucugguauuuucucuguugaaggcaaaagcugcaucaaucggugcuuuuauguggaguugauuaggggaagaaaagaggaaacugaagucuuguggaccucaaacaguauuguuguguuuuguggcaccucagguacauauggaacaggcucauggccugauggggcggaccucaaucucaugccuauauaa

SEQ ID NO: 56248 - RNA, 1410 nt, Artificial Sequence
  derived and/or modified CDS sequence (wt) from neuraminidase__InfluenzaA__AHC61538
augaauccaaaucaaaagauaauaacgauuggcucuguuucucucaccauuuccacaauaugcuucuucaugcaaauugccaucuugauaacuacuguaacauugcauuucaagcaauaugaauucaacucccccccaaacaaccaagugaugcugugugaaccaacaauaauagaaagaaacauaacagagauaguguaucugaccaacaccaccauagagaaggaaauaugccccaaacuagcagaauacagaaauuggucaaagccgcaaugugacauuacaggauuugcaccuuuuucuaaggacaauucgauuaggcuuuccgcugguggggacaucugggugacaagagaaccuuaugugucaugcgauccuaacaaguguuaucaauuugcccuuggacagggaacaacacuaaacaacgugcauucaaauaacacaguacgugauaggaccccuuaucggacccuauugaugaaugaguuagguguuccuuuucaucuggggaccaagcaagugugcauagcaugguccagcucaaguugucacgauggaaaagcauggcugcauguuuguauaacgggggaugauaaaaaugcaacugcuagcuucauuuacaaugggaagcuuguagauaguguuguuucaugguccaaagaaauccucaggacccaggagucagaaugcguuuguaucaauggaacuuguacaguaguaaugacugaugggagugcuucaggaaaagcugauacuaaaauacuauucauugaggaggggaaaaucguucauacuagcacauugucaggaagugcucagcaugucgaggagugcucuugcuauccucgauauccuggugucagaugugucugcagagacaacuggaaaggcuccaauaggcccaucguagauauaaacauaaaggaucauagcauuguuuccaguuauguguguucaggacuuguuggagacacacccagaaaaaacgacagcuccagcaguagccauuguuuggauccuaacaaugaagaagguagucauggagugaaaggcugggccuuugaugauggaaaugacguguggaugggaagaacgaucaacgagacuucacguuuaggguaugaaaccuucaaagucauugaaggcugguccaacccuaaguccaaauugcagauaaauaggcaagucauaguugacagagguaauagguccgguuauucugguauuuucucuguugaaggcaaaagcugcaucaaucggugcuuuuauguggaguugauuaggggaagaaaagaggaaacugaagucuuguggaccucaaacaguauuguuguguuuuguggcaccucagguacauauggaacaggcucauggccugauggggcggaccucaaucucaugccuauauaa

SEQ ID NO: 56249 - RNA, 1410 nt, Artificial Sequence
  derived and/or modified CDS sequence (wt) from neuraminidase__InfluenzaA__AHC61550
augaauccaaaucaaaagauaauaacgauuggcucuguuucucucaccauuuccacaauaugcuucuucaugcaaauugccaucuugauaacuacuguaacauugcauuucaagcaauaugaauucaacucccccccaaacaaccaagugaugcugugugaaccaacaauaauagaaagaaacauaacagagauaguguaucugaccaacaccaccauagagaaggaaauaugccccaaacuagcagaauacagaaauuggucaaagccgcaaugugacauuacaggauuugcaccuuuuucuaaggacaauucgauuaggcuuuccgcugguggggacaucugggugacaagagaaccuuaugugucaugcgauccugacaaguguuaucaauuugcccuuggacagggaacaacacuaaacaacgugcauucaaauaacacaguacgugauaggaccccuuaucggacccuauugaugaaugaguuagguguuccuuuucaucuggggaccaagcaagugugcauagcaugguccagcucaaguugucacgauggaaaagcauggcugcauguuuguauaacgggggaugauaaaaaugcaacugcuagcuucauuuacaaugggaggcuuguagauaguguuguuucaugguccaaagaaauccucaggacccaggagucagaaugcguuuguaucaauggaacuugugcaguaguaaugacugaugggagugcuucaggaaaagcugauacuaaaauacuauucauugaggaggggaaaaucguucauacuagcacauugucaggaagugcucagcaugucgaggagugcucuugcuauccucgauauccuggugucagauguguaugcagagacaacuggaaaggcuccaauaggcccaucguagauauaaacauaaaggaucauagcauuguuuccaguuauguguguucaggacuuguuggagacacacccagaaaaaacgacagcuccagcaguagccauuguuuggauccuaacaaugaagaagguggucauggagugaaaggcugggccuuugaugauggaaaugacguguggaugggaagaacgaucaacgagacgucacguuuaggguaugaaaccuucaaagucauugaaggcugguccaacccuaaguccaaauugcagauaaauaggcaagucauaguugacagagguaauagguccgguuauucugguauuuucucuguugaaggcaaaagcugcaucaaucggugcuuuuauguggaguugauuaggggaagaaaagaggaaacugaagucuuguggaccucaaacaguauuguuguguuuuguggcaccucagguacauauggaacaggcucauggccugauggggcggaccucaaucucaugccuauauaa

SEQ ID NO: 56250 - RNA, 1410 nt, Artificial Sequence
  derived and/or modified CDS sequence (wt) from neuraminidase__InfluenzaA__AHC61562
augaacccaaaucaaaagauaauaacgauuggcucuguuucucucaccauuuccacaauaugcuucuucaugcaaauugccaucuugauaacuacuguaacauugcauuucaagcaauaugaauucuacucccccccaaacaaccaagugaugcugugugaaccaacaaugauagaaagaaacauaacagagauaguguaucugaccaacaccaccauagagaaggaaauaugccccaaacuagcagaauacagaaauuggucaaagccgcaaugugacauuacaggauuugcaccuuuuucuaaggacaauucgauuaggcuuuccgcugguggggacaucugggugacaagagaaccuuaugugucaugcgauccugacaaguguuaucaauuugcccuuggacagggaacaacacuaaacaacgugcauucaaauaacacaguacgugauaggaccccuuaucggacccuauugaugaaugaguuagguguuccuuuucaucuggggaccaagcaagugugcauagcaugguccagcucaaguugucacgauggaaaagcauggcugcauguuuguauaacgggggaugauaaaaaugcaacugcuagcuucauuuacaaugggaggcuuguagauaguguuguuucaugguccaaagaaauccucaggacccaggagucagaaugcguuuguaucaauggaacuuguacaguaguaaugacugaugggagugcuucaggaaaagcugauacuaaaauacuauucauugaggaggggaaaaucguucauacuagcacauugucaggaagugcucagcaugucgaggagugcucuugcuauccucgauauccuggugucagaugugucugcagagacaacuggaaaggcuccaauaggcccaucguugauauaaacauaaaggaucauagcauuguuuccaguuauguguguucaggacuuguuggagacacacccagaaaaaacgacagcuccagcaguagccauuguuuggauccuaacaaugaagaagguggucauggagugaaaggcugggccuuugaugauggaaaugacguguggaugggaagaacgaucaacgagacgucacgcuuaggguaugaaaccuucaaagucauugaaggcugguccaacccuaaguccaaauugcagauaaauaggcaagucauaguugacagagguaauagguccgguuauucugguauuuucucuguugaaagcaagagcugcaucaaucggugcuuuuauguggaguugauuaggggaagaaaagaggaaacugaagucuuguggaccucaaacaguauuguuguguuuuguggcaccucagguacauauggaacaggcacauggccugauggggcggaccucaaucucaugccuauauaa

SEQ ID NO: 56251 - RNA, 1410 nt, Artificial Sequence; identical to SEQ ID NO: 56073
  derived and/or modified CDS sequence (wt) from neuraminidase__InfluenzaA__AHC61574

SEQ ID NO: 56252 - RNA, 1410 nt, Artificial Sequence; identical to SEQ ID NO: 56032
  derived and/or modified CDS sequence (wt) from neuraminidase__InfluenzaA__AHC61586

SEQ ID NO: 56253 - RNA, 1410 nt, Artificial Sequence; identical to SEQ ID NO: 56033
  derived and/or modified CDS sequence (wt) from neuraminidase__InfluenzaA__AHC61598

SEQ ID NO: 56254 - RNA, 1410 nt, Artificial Sequence; identical to SEQ ID NO: 55983
  derived and/or modified CDS sequence (wt) from neuraminidase__InfluenzaA__AHC61610

SEQ ID NO: 56255 - RNA, 1410 nt, Artificial Sequence; identical to SEQ ID NO: 56073
  derived and/or modified CDS sequence (wt) from neuraminidase__InfluenzaA__AHC61622

SEQ ID NO: 56256 - RNA, 1410 nt, Artificial Sequence
  derived and/or modified CDS sequence (wt) from neuraminidase__InfluenzaA__AHC61634
augaauccaaaucaaaagauaauaacgauuggcucuguuucucucaccauuuccacaauaugcuucuucaugcaaauugccaucuugauaacuacuguaacauugcauuucaagcaauaugaauucaacucccccccaaacaaccaagugaugcugugugaaccaacaauaauagaaagaaacauaacagagauaguguaucugaccaacaccaccauagagaaggaaauaugccccaaacuagcagaauacagaaauuggucaaagccgcaaugugacauuacaggauuugcaccuuuuucuaaggacaauucgauuaggcuuuccgcugguggggacaucugggugacaagagaaccuuaugugucaugcgauccugacaaguguuaucaauuugcccuuggacagggaacaacacuaaacaacgugcauucaaauaacacaguacgugauaggaccccuuaucggacccuauugaugaaugaguuagguguuccuuuucaucuggggaccaagcaagugugcauagcaugguccagcucaaguugucacgauggaaaagcauggcugcauguuuguauaacgggggaugauaaaaaugcaacugcuagcuucauuuacaaugggaggcuuguagauaguguuguuucaugguccaaagaaauccucaggacccaggagucagaaugcguuuguaucaauggaacuuguacaguaguaaugacugaugggagugcuucaggaaaagcugauacuaaaauacuauucauugaggaggggaaaaucguucauacuagcacauuaucaggaagugcucagcaugucgaggagugcucuugcuauccucgauauccuggugucagaugugucugcagagacaacuggaaaggcuccaauaggcccaucguagauauaaacauaaaggaucauagcauuguuuccaguuauguguguucaggacuuguuggagacacacccagaaaaaacgacagcuccagcaguagccauuguuuggauccuaacaaugaagaagguggucauggagugaaaggcugggccuuugaugauggaaaugacguguggaugggaagaacgaucaacgagacgucacguuuaggguaugaaaccuucaaagucauugaaggcugguccaacccuaaguccaaauugcagauaaauaggcaagucauaguugacagagguaauagguccgguuauucugguauuuucucuguugaaggcaaaagcugcaucaaucggugcuuuuauguggaguugauuaggggaagaaaagaggaaacugaagucuuguggaccucaaacaguauuguuguguuuuguggcaccucagguacauauggaacaggcucauggccugauggggcggaccucaaucucaugccuauauaa

SEQ ID NO: 56257 - RNA, 1410 nt, Artificial Sequence; identical to SEQ ID NO: 52717
  derived and/or modified CDS sequence (wt) from neuraminidase__InfluenzaA__AHC61646

SEQ ID NO: 56258 - RNA, 1410 nt, Artificial Sequence; identical to SEQ ID NO: 56142
  derived and/or modified CDS sequence (wt) from neuraminidase__InfluenzaA__AHC61658

SEQ ID NO: 56259 - RNA, 1410 nt, Artificial Sequence; identical to SEQ ID NO: 56033
  derived and/or modified CDS sequence (wt) from neuraminidase__InfluenzaA__AHC61670

SEQ ID NO: 56260 - RNA, 1410 nt, Artificial Sequence; identical to SEQ ID NO: 55996
  derived and/or modified CDS sequence (wt) from neuraminidase__InfluenzaA__AHC61682

SEQ ID NO: 56261 - RNA, 1410 nt, Artificial Sequence
  derived and/or modified CDS sequence (wt) from neuraminidase__InfluenzaA__AHC61694
augaauccaaaucaaaagauaauaacgauuggcucuguuucucucaccauuuccacaauaugcuucuucaugcaaauugccaucuugauaacuacuguaacauugcauuucaagcaauaugaauucaacucccccccaaacaaccaagugaugcugugugaaccaacaauaauagaaagaaacaucacagagauaguguaucugaccaacaccaccauagagaaggaaauaugccccaaaccagcagaauacagaaauuggucaaaaccgcaaugugacauuacaggauuugcaccuuuuucuaaggacaauucgauuaggcuuuccgcugguggggacaucugggugacaagagaaccuuaugugucaugcgauccugacaaguguuaucaauuugcccuuggacagggaacaacacuaaacaaugugcauucaaauaacacaguacgugauaggaccccuuaucggacuuuauugaugaaugaguuagguguuccuuuucaucuggggaccaagcaagugugcauagcaugguccagcucaaguugucacgauggaaaagcauggcugcauguuuguauaacgggggaugauaaaaaugcaacugcuagcuucauuuacaaugggaggcuuguagauaguguuguuucaugguccaaagaaauucucaggacccaggagucagaaugcguuuguaucaauggaacuuguacaguaguaaugacugauggaagugcuucaggaaaagcugauacuaaaauacuauucauugaggaggggaaaaucguucauacuagcacauugucaggaagugcucagcaugucgaggagugcucuugcuauccucgauauccuggugucagaugugucugcagagacaacuggaaaggcuccaauaggcccaucguagauauaaacauaaaggaucauagcauugucuccaguuauguguguucaggacuuguuggagacacacccagaaaaaacgacagcuccagcaguagccauuguuuggauccuaacaaugaagaagguggucauggagugaaaggcugggccuuugaugauggaaaugacguguggaugggaagaacaaucaacgagacgucacgcuuaggguaugaaaccuucaaagucauugaaggcugguccaacccuaaguccaaauugcagauaaauaggcaagucauaguugacagaggugauagguccgguuauucuggcauuuucucuguugaaggcaaaagcugcaucaaucggugcuuuuauguggaguugauuaggggaagaaaagaggaaacugaagucuuguggaccucaaacaguauuguuguguuuuguggcaccucagguacauauggaacaggcucauggccugauggggcggaccucaaucucaugccuauauaa

SEQ ID NO: 56262 - RNA, 1410 nt, Artificial Sequence
  derived and/or modified CDS sequence (wt) from neuraminidase__InfluenzaA__AHC61706
augaauccaaaucaaaagauaauaacgauuggcucuguuucucucaccauuuccacaauaugcuucuucaugcaaauugccaucuugauaacuacuguaacauugcauuucaagcaauaugaauucaacucccccccaaacaaccaagugaugcugugugaaccaacaauaauagaaagaaacauaacagagauaguguaucugaccaacaccaccauagagaaggaaauaugccccaaacuagcagaauacagaaauuggucaaagccgcaaugugacauuacaggauuugcaccuuuuucuaaggacaauucgauuaggcuuuccgcugguggggacaucugggugacaagagaaccuuaugugucaugcgauccugacaaguguuaucaauuugcccuuggacagggaacaacacuaaacaacgugcauucaaauaacacaguacgugauaggaccccuuaucggacccuauugaugaaugaguuagguguuccuuuucaucuggggaccaagcaagugugcauagcaugguccagcucaaguugucacgauggaaaagcauggcugcauguuuguauaacgggggaugauaaaaaugcaacugcuagcuucauuuacaaugggaggcuuguagauaguguuguuucaugguccaaagaaauccucaggacccaggagucagaaugcguuuguaucaauggaacuuguacaguaguaaugacugaugggagugcuucaggaaaagcugauacuaaaauacuauucauugaggaggggaaaaucguucauacuagcacauugucaggaagugcucagcaugucgaggagugcucuugcuauccucgauauccuggugucagaugugucugcagagacaacuggaaaggcuccaauaggcccaucguagauauaaacauaaaggaacauagcauuguuuccaguuauguguguucaggacuuguuggagacacacccagaaaaaacgacagcuccagcaguagccauuguuuggauccuaacaaugaagaagguggucauggagugaaaggcugggccuuugaugauggaaaugacguguggaugggaagaacgaucaacgagacgucacguuuaggguaugaaaccuucaaagucauugaaggcugguccaacccuaaguccaaauugcagauaaauaggcaagucauaguugacagagguaauagguccgguuauucugguauuuucucuguugaaggcaaaagcugcaucaaucggugcuuuuauguggaguugauuaggggaagaaaagaggaaacugaagucuuguggaccucaaacaguauuguuguguuuuguggcaccucagguacauauggaacaggcucauggccugauggggcggaccucaaucucaugccuauauaa

SEQ ID NO: 56263 - RNA, 1410 nt, Artificial Sequence
  derived and/or modified CDS sequence (wt) from neuraminidase__InfluenzaA__AHC61718
augaauccaaaucaaaagauaauaacaauuggcucuguuucucucaccauuuccacaauaugcuucuucaugcaaauugccaucuugauaacuacuguaacauuacauuucaagcaaugugaauucaacucccccccaaacaaccaagugaugcugugugaaccaacaauaauagaaagaaacauaacagagauaguguaucugaccaacaccaccauagagaaggaaauaugccccaaacuaacagaauacagaaauuggucaaagccgcaaugugacauuacaggauuugcaccuuuuucuaaggacaauucgauuaggcuuuccgcugguggggacaucugggugacaagagaaccuuaugugucaugcgauccuaacaaguguuaucaauuugcccuuggacagggaacaacacuaaacaacgugcauucaaauaacacaguacgugauaggaccccuuaucggacccuauugaugaaugaguuagguguuccuuuucauuuggggaccaagcaagugugcauagcaugguccagcucaaguugucacgauggaaaagcauggcugcauguuuguauaacgggggaugauaaaaaugcaacugcuagcuucauuuacaaugggaagcuuguagauaguguuguuucaugguccaaagaaauccucaggacccaggagucagaaugcguuuguaucaauggaacuuguacaguaguaaugacugaugggagugcuucaggaaaagcugauacuaaaauacuauucauugaggaggggaaaaucguucauacuagcacauugucaggaagugcucagcaugucgaggagugcucuugcuauccucgauauccuggugucagaugugucugcagagacaacuggaaaggcuccaauaggcccaucguagauauaaacauaaaggaucauagcauuguuuccaguuauguguguucaggacuuguuggagacacacccagaaaaaacgacagcuccagcaguagccauuguuuggauccuaacaaugaagaagguggucauggagugaaaggcugggccuuugaugauggaaaugacguguggaugggaagaacgaucaacgagacuucacguuuaggguaugaaaccuucaaagucauugaaggcugguccaacccuaaguccaaauugcagauaaauaggcaagucauaguugacagagguaauagguccgguuauucugguauuuucucuguugaaggcaaaagcugcaucaaucggugcuuuuauguagaguugauuaggggaagaaaagaggaaacuggagucuuguggaccucaaacaguauuguuguguuuuguggcaccucagguacauauggaacaggcucauggccugauggggcggaccucaaucucaugccuauauaa

SEQ ID NO: 56264 - RNA, 1410 nt, Artificial Sequence; identical to SEQ ID NO: 55983
  derived and/or modified CDS sequence (wt) from neuraminidase__InfluenzaA__AHC61730

SEQ ID NO: 56265 - RNA, 1410 nt, Artificial Sequence; identical to SEQ ID NO: 56042
  derived and/or modified CDS sequence (wt) from neuraminidase__InfluenzaA__AHC61742

SEQ ID NO: 56266 - RNA, 1410 nt, Artificial Sequence
  derived and/or modified CDS sequence (wt) from neuraminidase__InfluenzaA__AHC61754
augaacccaaaucaaaagauaauaacgauuggcucuguuucucucaccauuuccacaauaugcuucuucaugcaaauugccaucuugauaacuacuguaacauugcauuucaagcaauaugaauucuacucccccccaaacaaccaagugaugcugugugaaccaacaauaauagaaagaaacauaacagagauaguguaucugaccaacaccaccauagagaaggaaauaugccccaaacuagcagaauacagaaauuggucaaagccgcaaugugacauuacaggauuugcaccuuuuucuaaggacaauucgauuaggcuuuccgcugguggggacaucugggugacaagagaaccuuaugugucaugcgauccugacaaguguuaucaauuugcccuuggacagggaacaacacuaaacaacgugcauucaaauaacacaguacgugauaggaccccuuaucggacccuauugaugaaugaguuagguguuccuuuucaucuggggaccaagcaagugugcauagcaugguccagcucaaguugucacgauggaaaagcauggcugcauguuuguauaacgggggaugauaaaaaugcaacugcuagcuucauuuacaaugggaggcuuguagauaguguuguuucaugguccaaagaaauccucaggacccaggagucagaaugcguuuguaucaauggaacuuguacaguaguaaugacugaugggagugcuucagguaaagcugauacuaaaauacuauucauugaggaggggaaaaucguucauacuagcacauugucaggaagugcucagcaugucgaggagugcucuugcuauccucgauauccuggugucagaugugucugcagagacaacuggaaaggcuccaauaggcccaucguugauauaaacauaaaggaucauagcauuguuuccaguuauguguguucaggacuuguuggagacacacccagaaaaaacgacagcuccagcaguagccauuguuuggauccuaacaaugaagaagguggucauggagugaaaggcugggccuuugaugauggaaaugacguguggaugggaagaacgaucaacgagacgucacgcuuaggguaugaaaccuucaaagucauugaaggcugguccaacccuaaguccaaauugcagauaaauaggcaagucauaguugacagagguaauagguccgguuauucugguauuuucucuguugaaggcaagagcugcaucaaucggugcuuuuauguggaguugauuaggggaagaaaagaggaaacugaagucuuguggaccucaaacaguauuguuguguuuuguggcaccucagguacauauggaacaggcucauggccugauggggcggaccucaaucucaugccuauauaa

SEQ ID NO: 56267 - RNA, 1410 nt, Artificial Sequence; identical to SEQ ID NO: 52717
  derived and/or modified CDS sequence (wt) from neuraminidase__InfluenzaA__AHC61766

SEQ ID NO: 56268 - RNA, 1410 nt, Artificial Sequence; identical to SEQ ID NO: 56019
  derived and/or modified CDS sequence (wt) from neuraminidase__InfluenzaA__AHC61778

SEQ ID NO: 56269 - RNA, 1410 nt, Artificial Sequence; identical to SEQ ID NO: 56057
  derived and/or modified CDS sequence (wt) from neuraminidase__InfluenzaA__AHC61790

SEQ ID NO: 56270 - RNA, 1410 nt, Artificial Sequence; identical to SEQ ID NO: 55996
  derived and/or modified CDS sequence (wt) from neuraminidase__InfluenzaA__AHC61802

SEQ ID NO: 56271 - RNA, 1410 nt, Artificial Sequence; identical to SEQ ID NO: 55983
  derived and/or modified CDS sequence (wt) from neuraminidase__InfluenzaA__AHC61814

SEQ ID NO: 56272 - RNA, 1410 nt, Artificial Sequence
  derived and/or modified CDS sequence (wt) from neuraminidase__InfluenzaA__AHC61826
augaauccaaaucaaaagauaauaacgauuggcucuguuucucucaccauuuccacaauaugcuucuucaugcaaauugccaucuugauaacuacuguaacauugcauuucaagcaauaugaauucaacucccccccaaacaaccaaguggugcugugugaaccaacaauaauagaaagaaacaucacagagauaguguaucugaccaacaccaccauagagaaggaaauaugccccaaaccagcagaguacagaaauuggucaaaaccgcaaugugacauuacaggauuugcaccuuuuucuaaggacaauucgauuaggcuuuccgcugguggggacaucugggugacaagagaaccuuaugugucaugcgauccugacaaguguuaucaauuugcccuuggacagggaacaacacuaaacaaugugcauucaaauaacacaguacgugauaggaccccuuaucggacuuuauugaugaaugaguuagguguuccuuuucaucuggggaccaagcaagugugcauagcaugguccagcucaaguugucacgauggaaaagcauggcugcauguuuguauaacgggggaugauaaaaaugcaacugcuagcuucauuuacaaugggaggcuuguagauaguguuguuucaugguccaaagaaauucucaggacccaggagucagaaugcguuuguaucaauggaacuuguacaguaguaaugacugauggaagugcuucaggaaaagcugauacuaaaauacuauucauugaggaggggaaaaucguucauacuagcacauugucaggaagugcucagcaugucgaggagugcucuugcuauccucgauauccuggugucagaugugucugcagagacaacuggaaaggcuccaauaggcccaucguagauauaaacauaaaggaucauagcauugucuccaguuauguguguucaggacuuguuggagacacacccagaaaaaacgacagcuccagcaguagccauuguuuggauccuaacaaugaagaagguggucauggagugaaaggcugggccuuugaugauggaaaugacguguggaugggaagaacaaucaacgagacgucacgcuuaggguaugaaaccuucaaagucauugaaggcugguccaacccuaaguccaaauugcagauaaauaggcaagucauaguugacagaagugauagguccgguuauucugguauuuucucuguugaaggcaaaagcugcaucaaucggugcuuuuauguggaguugauuaggggaagaaaagaggaaacugaagucuuguggaccucaaacaguauuguuguguuuuguggcaccucagguacauauggaacaggcucauggccugauggggcggaccucaaucucaugccuauauaa

SEQ ID NO: 56273 - RNA, 1410 nt, Artificial Sequence; identical to SEQ ID NO: 55983
  derived and/or modified CDS sequence (wt) from neuraminidase__InfluenzaA__AHC61838

SEQ ID NO: 56274 - RNA, 1410 nt, Artificial Sequence
  derived and/or modified CDS sequence (wt) from neuraminidase__InfluenzaA__AHC61850
augaacccaaaucaaaagauaauaacgauuggcucuguuucucucaccauuuccacaauaugcuucuucaugcaaguugccaucuugauaacuacuguaacacugcauuucaagcaauaugaauucaacucccccccaaacaaccaagugaugcugugugaaccaacaauaauagaaagaaacauaacagagauaguguaucugaccaacaccaccauagagaaggaaauaugccccaagcuagcagaauacagaaauuggucaaagccgcaaugugacauuacaggauuugcaccuuuuucuaaggacaauucgauuaggcuuuccgcugguggggacaucugggugacaagagaaccuuaugugucaugcgauccugacaaguguuaucaauuugcccuuggacagggaacaacacuaaacaacgugcauucaaauaacacaguacgugauaggaccccuuaucggacccuauugaugaaugaguuagguguuccuuuucaucuggggaccaagcaagugugcauagcaugguccagcucaaguugucacgauggaaaagcauggcugcauguuuguauaacgggggaugauaaaaaugcaacugcgagcuucauuuacaaugggaagcuuguagauaguguuguuucaugguccaaagaaauccucaggacccaggagucagaaugcguuuguaucaauggaacuuguacaguaguaaugacugaugggagugcuucaggaaaagcugauacuaaaauacuauucauugaggaggggaaaaucguucauacuagcacauugucaggaagugcucagcauguagaggagugcucuugcuauccucgauauccuggugucagaugugucugcagagacaacuggaaaggcuccaauaggcccaucguagauauaaacauaaaggaucauagcauuguuuccaguuauguguguucaggacuuguuggagacacacccagaaaaaacgacagcuccagcaguagccauuguuuggauccuaacaaugaagaagguggucauggagugaaaggcugggccuuugaugauggaaaugacguguggaugggaagaacgaucaacgagacgucacguuuaggguaugaaaccuucaaagucauugaaggcugguccaacccuaaguccaaauugcagauaaauaggcaagucauaguugacagagguaauagguccgguuauucugguauuuucucuguugaaggcaaaagcugcaucaaucggugcuuuuauguggaguugauuaggggaagaaaagaggaaacugaagucuuguggaccucaaacaguauuguuguguuuuguggcaccucagguacauauggaacaggcucauggccugauggggcggaccucaaucucaugccuauauaa

SEQ ID NO: 56275 - RNA, 1410 nt, Artificial Sequence; identical to SEQ ID NO: 56032
  derived and/or modified CDS sequence (wt) from neuraminidase__InfluenzaA__AHC61862

SEQ ID NO: 56276 - RNA, 1410 nt, Artificial Sequence; identical to SEQ ID NO: 55983
  derived and/or modified CDS sequence (wt) from neuraminidase__InfluenzaA__AHC61874

SEQ ID NO: 56277 - RNA, 1410 nt, Artificial Sequence
  derived and/or modified CDS sequence (wt) from neuraminidase__InfluenzaA__AHC61886
augaauccaaaucaaaagauaauaacgauuggcucuguuucucucaccauuuccacaauaugcuucuucaugcaaauugccaucuugauaacuacuguaacauugcauuucaagcaauaugaauucaacccccccccaaacaaccaaguggugcugugugaaccaacaauaauagaaagaaacaucacagagauaguguaucugaccaacaccaccauagagaaggaaauaugccccaaaccagcagaauacagacauuggucaaaaccgcaaugugacauuacaggauuugcaccuuuuucuaaggacaauucgauuaggcuuuccgcugguggggacaucugggugacaagagaaccuuaugugucaugcgauccugacaaguguuaucaauuugcccuuggacagggaacaacacuaaacaaugugcauucaaauaacacaguacgugauaggaccccuuaucggacuuuauugaugaaugaguuagguguuccuuuucaucuggggaccaagcaagugugcauagcaugguccagcucaaguugucacgauggaaaagcauggcugcauguuuguauaacgggggaugauaaaaaugcaacugcuagcuucauuuacaaugggaggcuuguagauaguguuguuucaugguccaaagaaauucucaggacccaggagucagaaugcguuuguaucaauggaacuuguacaguaguaaugacugauggaagugcuucaggaaaagcugauacuaaaauacuauucauugaggaggggaaaaucguucauacuagcacauugucaggaagugcucagcaugucgaggagugcucuugcuauccucgauauccuggugucagaugugucugcagagacaacuggaaaggcuccaauaggcccaucguagauauaaacauaaaggaucauagcauugucuccaguuauguguguucaggacuuguuggagacacacccagaaaaaacgacagcuccagcaguagccauuguuuggauccuaacaaugaagaagguggucauggagugaaaggcugggccuuugaugauggaaaugacguguggaugggaagaacaaucaacgagacgucacgcuuaggguaugaaaccuucaaagucauugaaggcugguccaacccuaaguccaaauugcagauaaauaggcaagucauaguugacagaggugauagguccgguuauucugguauuuucucuguugaaggcaaaagcugcaucaaucggugcuuuuauguggaguugauuaggggaagaaaagaggaaacugaagucuuguggaccucaaacaguauuguuguguuuuguggcaccucagguacauauggaacaggcucauggccugauggggcggaccucaaucucaugccuauauaa

SEQ ID NO: 56278 - RNA, 1410 nt, Artificial Sequence; identical to SEQ ID NO: 55987
  derived and/or modified CDS sequence (wt) from neuraminidase__InfluenzaA__AHC61898

SEQ ID NO: 56279 - RNA, 1410 nt, Artificial Sequence; identical to SEQ ID NO: 56019
  derived and/or modified CDS sequence (wt) from neuraminidase__InfluenzaA__AHC61910

SEQ ID NO: 56280 - RNA, 1410 nt, Artificial Sequence; identical to SEQ ID NO: 52717
  derived and/or modified CDS sequence (wt) from neuraminidase__InfluenzaA__AHC61934

SEQ ID NO: 56281 - RNA, 1410 nt, Artificial Sequence
  derived and/or modified CDS sequence (wt) from neuraminidase__InfluenzaA__AHC61946
augaacccaaaucaaaagauaauaacgauuggcucuguuucucucaccauuuccacaauaugcuucuucaugcaaauugccaucuugauaacuacuguaacauugcauuucaagcaauaugaauccuacucccccccaaacaaccaagugaugcugugugaaccaacaauaauagaaagaaacauaacagagauaguguaucugaccaacaccaccauagagaaggaaauaugccccaaacuagcagaauacagaaauuggucaaagccgcaaugugacauuacaggauuugcaccuuuuucuaaggacaauucgauuaggcuuuccgcugguggggacaucugggugacaagagaaccuuaugugucaugcgauccugacaaguguuaucaauuugcccucggacagggaacaacacuaaacaacgugcauucaaauaacacaguacgugauaggaccccuuaucggacccuauugaugaaugaguuagguguuccuuuucaucuggggaccaagcaagugugcauagcaugguccagcucaaguugucacgauggaaaagcauggcugcauguuuguauaacgggggaugauaaaaaugcaacugcuagcuucauuuacaaugggaggcuuguagauaguguuguuucaugguccaaagaaauccucaggacccaggagucagaaugcguuuguaucaauggaacuuguacaguaguaaugacugauggaagugcuucaggaaaagcugauacuaaaauacuauucauugaggaggggaaaaucguucauacuagcacauugucaggaagugcucagcaugucgaggagugcucuugcuauccucgaaauccuggugucagaugugucugcagagacaacuggaaaggcuccaauaggcccaucguugauauaaacauaaaggaucauagcauuguuuccaguuauguguguucaggacuuguuggagacacacccagaaaaaacgacagcuccagcaguagccauuguuuggauccuaacaaugaagaagguggucauggagugaaaggcugggccuuugaugauggaaaugacguguggaugggaagaacgaucaacgagacgucacgcuuaggguaugaaaccuucaaagucauugaaggcugguccaacccuaaguccaaauugcagauaaauaggcaagucauaguugacagagguaauagguccgguuauucugguauuuucucuguugaaggcaagagcugcaucaaucggugcuuuuauguggaguugauuaggggaagaaaagaggaaacugaagucuuguggaccucaaacaguauuguuguguuuuguggcaccucagguacauauggaacaggcucauggccugauggggcggaccucaaucucaugccuauauaa

SEQ ID NO: 56282 - RNA, 1410 nt, Artificial Sequence; identical to SEQ ID NO: 55991
  derived and/or modified CDS sequence (wt) from neuraminidase__InfluenzaA__AHC61958

SEQ ID NO: 56283 - RNA, 1410 nt, Artificial Sequence; identical to SEQ ID NO: 55983
  derived and/or modified CDS sequence (wt) from neuraminidase__InfluenzaA__AHC61970

SEQ ID NO: 56284 - RNA, 1410 nt, Artificial Sequence
  derived and/or modified CDS sequence (wt) from neuraminidase__InfluenzaA__AHC61982
augaauccaaaucaaaagauaauaacgauuggcucuguuucucucaccauuuccacaauaugcuucuucaugcaaauugccaucuugauaacuacuguaacauugcauuucaagcaauaugaauucaacucccccccgaacaaccaagugaugcugugugaaccaacaauaauagaaagaaacauaacagagauaguguaucugaccaacaccaccauagagaaggaaauaugccccaaacuagcagaauacagaaauuggucaaagccgcaaugugacauuacaggauuugcaccuuuuucuaaggacaauucgauuaggcuuuccgcugguggggacaucugggugacaagagaaccuuaugugucaugcgauccugacaaguguuaucaauuugcccuuggacagggaacaacacuaaacaacgugcauucaaauaacacaguacgugauaggaccccuuaucggacccuauugaugaaugaguuagguguuccuuuucaucuggggaccaagcaagugugcauagcaugguccagcucaaguugucacgauggaaaagcauggcugcauguuuguauaacgggggaugauaaaaaugcaacugcuagcuucauuuacaaugggaggcuuguagauaguguuguuucaugguccaaagaaauccucaggacccaggagucagaaugcguuuguaucaauggaacuugugcaguaguaaugacugaugggagugcuucaggaaaagcugauacuaaaauacuauucauugaggaggggaaaaucguucauacuagcacauugucaggaagugcucagcaugucgaggagugcucuugcuauccucgauauccuggugucagaugugucugcagagacaacuggaaaggcuccaauaggcccaucguagauauaaacauaaaggaucauggcauuguuuccaguuauguguguucaggacuuguuggagacacacccagaaaaaacgacagcuccagcaguagccauuguuuggauccuaacaaugaagaagguggucauggagugaaaggcugggccuuugaugauggaaaugacguguggaugggaagaacgaucaacgagacgucacguuuaggguaugaaaccuucaaagucauugaaggcugguccaacccuaaguccaaauugcagauaaauaggcaagucauaguugacagagguaauagguccgguuauucugguauuuucucuguugaagguaaaagcugcaucaaucggugcuuuuauguggaguugauuaggggaagaaaagaggaaacugaagucuuguggaccucaaacaguauuguuguguuuuguggcaccucagguacauauggaacaggcucauggccugauggggcggaccucaaucucaugccuauauaa

SEQ ID NO: 56285 - RNA, 1410 nt, Artificial Sequence; identical to SEQ ID NO: 55987
  derived and/or modified CDS sequence (wt) from neuraminidase__InfluenzaA__AHC61994

SEQ ID NO: 56286 - RNA, 1410 nt, Artificial Sequence; identical to SEQ ID NO: 56077
  derived and/or modified CDS sequence (wt) from neuraminidase__InfluenzaA__AHC62006

SEQ ID NO: 56287 - RNA, 1410 nt, Artificial Sequence; identical to SEQ ID NO: 55983
  derived and/or modified CDS sequence (wt) from neuraminidase__InfluenzaA__AHC62018

SEQ ID NO: 56288 - RNA, 1410 nt, Artificial Sequence; identical to SEQ ID NO: 56033
  derived and/or modified CDS sequence (wt) from neuraminidase__InfluenzaA__AHC62030

SEQ ID NO: 56289 - RNA, 1410 nt, Artificial Sequence; identical to SEQ ID NO: 56117
  derived and/or modified CDS sequence (wt) from neuraminidase__InfluenzaA__AHC62042

SEQ ID NO: 56290 - RNA, 1410 nt, Artificial Sequence; identical to SEQ ID NO: 56060
  derived and/or modified CDS sequence (wt) from neuraminidase__InfluenzaA__AHC62053

SEQ ID NO: 56291 - RNA, 1410 nt, Artificial Sequence
  derived and/or modified CDS sequence (wt) from neuraminidase__InfluenzaA__AHC62065
augaauccaaaucaaaagauaauaacgauuggcucuguuucucucaccauuuccacaauaugcuucuucaugcaaauugccaucuugguaacuacuguaacauugcauuucaagcaauaugaauucaacucccccccaaacaaccaagugaugcugugugaaccaacaauaauagaaagaaacaucacagagauaguguaucugaccaacaccaccauagagaaggaaauaugccccaaaccagcagaauacagaaauuggucaaaaccgcaaugugacauuacaggauuugcaccuuuuucuaaggacaauucgauuaggcuuuccgcugguggggacaucugggugacaagagaaccuuaugugucaugcgauccugacaaguguuaucaauuugcccuuggacagggaacaacacuaaacaaugugcauucaaauaacacaguacgugauaggaccccuuaucggacuuuauugaugaaugaguuagguguuccuuuucaucuggggaccaagcaagugugcauagcaugguccagcucaaguugucacgauggaaaagcauggcugcauguuuguauaacgggggaugauaaaaaugcaacugcuagcuucauuuacaaugggaggcuuguagauaguguuguuucaugguccaaagaaauucucaggacccaggagucagaaugcguuuguaucaauggaacuuguacaguaguaaugacugauggaagugcuucaggaaaagcugauacuaaaauacuauucauugaggaggggaaaaucguucauacuagcacauugucaggaagugcucagcaugucgaggagugcucuugcuauccucgauauccuggugucagaugugucuguagagacaacuggaaaggcuccaauaggcccaucguagauauaaacauaaaggaucauagcauugucuccaguuauguguguucaggacuuguuggagacacacccagaaaaaacgacagcuccagcaguagccauuguuuggauccuaacaaugaagaagguggucauggagugaaaggcugggccuuugaugauggaaaugacguguggaugggaagaacaaucaacgagacgucacgcuuaggguaugaaaccuucaaagucauugaaggcugguccaacccuaaguccaaauugcagauaaauaggcaagucauaguugacagaggugauagguccgguuauucugguauuuucucuguugaaggcaaaagcugcaucaaucggugcuuuuauguggaguugauuaggggaagaaaagaggaaacugaagucuuguggaccucaaacaguauuguuguguuuuguggcaccucagguacauauggaacaggcucauggccugauggggcggaccucaaucucaugccuauauaa

SEQ ID NO: 56292 - RNA, 1410 nt, Artificial Sequence; identical to SEQ ID NO: 56184
  derived and/or modified CDS sequence (wt) from neuraminidase__InfluenzaA__AHC62077

SEQ ID NO: 56293 - RNA, 1410 nt, Artificial Sequence; identical to SEQ ID NO: 56093
  derived and/or modified CDS sequence (wt) from neuraminidase__InfluenzaA__AHC62089

SEQ ID NO: 56294 - RNA, 1410 nt, Artificial Sequence; identical to SEQ ID NO: 55983
  derived and/or modified CDS sequence (wt) from neuraminidase__InfluenzaA__AHC62101

SEQ ID NO: 56295 - RNA, 1410 nt, Artificial Sequence; identical to SEQ ID NO: 56086
  derived and/or modified CDS sequence (wt) from neuraminidase__InfluenzaA__AHC62113

SEQ ID NO: 56296 - RNA, 1410 nt, Artificial Sequence
  derived and/or modified CDS sequence (wt) from neuraminidase__InfluenzaA__AHC62125
augaauccaaaucaaaagauaauaacgauugggucuguuucucucaccauuuccacaauaugcuucuucaugcaaauugccaucuugauaacuacuguaacauuacauuucaagcaauaugaauucaacucccccccaaacaaccaagugaugcugugugaaccaacaauaauagaaagaaacauaacagagauaguguaucugaccaacaccaccauagagaaggaaauaugccccaaacuagcagaauacagaaauuggucaaagccgcaaugugacauuacaggauuugcaccuuuuucuaaggacaauucgauuaggcuuuccgcugguggggacaucugggugacaagagaaccuuaugugucaugcgauccuaacaaguguuaucaauuugcccuuggacagggaacaacacuaaacaacgugcauucaaauaacacaguacgugauaggaccccuuaucggacccuauugaugaaugaguuagguguuccuuuucaucuggggaccaagcaagugugcauagcaugguccagcucaaguugucacgauggaaaagcauggcugcauguuuguauaacgggggaugauaaaaaugcaacugcuagcuucauuuacaaugggaagcuuguagauaguguuguuucaugguccaaagaaauccucaggacccaggagucagaaugcguuuguaucaauggaacuuguacaguaguaaugacugaugggagugcuucaggaaaagcugauacuaaaauacuauucauugaggaggggaaaaucguucauacuagcacauugucaggaagugcucagcaugucgaggagugcucuugcuauccucgauauccuggugucagaugugucugcagagacaacuggaaaggcuccaauaggcccaucguagauauaaacauaaaggaucauagcauuguuuccaguuauguguguucaggacuuguuggagacacacccagaaaaaacgacagcuccagcaguagccauuguuuggauccuaacaaugaagaagguggucauggagugaaaggcugggccuuugaugauggaaaugacguguggaugggaagaacgaucaacgagacuucacguuuaggguaugaaaccuucaaagucauugaaggcugguccaacccuaaguccaaauugcagauaaauaggcaagucauaguugacagagguaauaaguccgguuauucugguauuuucucuguugaaggcaaaagcugcaucaaucggugcuuuuauguggaguugauuaggggaagaaaagaggaaacugaagucuuguggaccucaaacaguauuguuguguuuuguggcaccucagguacauauggaacaggcucauggccugauggggcggaccucaaucucaugccuauauaa

SEQ ID NO: 56297 - RNA, 1410 nt, Artificial Sequence
  derived and/or modified CDS sequence (wt) from neuraminidase__InfluenzaA__AHC62137
augaauccaaaucaaaagauaauaacgauuggcucuguuucucucaccauuuccacaauaugcuucuucaugcaaauugccaucuugauaacuacuguaacauugcauuucaagcaauaugaauucaacucccccccaaacaaccaagugaugcugugugaaccaacaauaauagaaagaaacauaacagagauaguguaucugaccaacaccaccauagagaaggaaauaugccccaaacuagcagaauacagaaauuggucaaaaccgcaaugugacauuacaggauuugcaccuuuuucuaaggacaauucgauuaggcuuuccgcugguggggacaucugggugacaagagaaccuuaugugucaugugauccugacaaguguuaucaauuugcccuuggacagggaacaacacuaaacaacgugcauucaaauaacacaguacgugauaggaccccuuaucggacccuauugaugaaugaguuagguguuccuuuucaucuggggaccaagcaagugugcauagcaugguccagcucaagcugucacgauggaaaagcauggcugcauguuuguauaacgggggaugauaaaaaugcaacugcuagcuucauuuacaaugggaggcuuguagauaguguuguuucaugguccaaagaaauccucaggacccaggagucagaaugcguuugcaucaauggaacuuguacaguaguaaugacugaugggagugcuucaggaaaagcugauacuaaaauacuauucauugaggaggggaaaaucguucauacuagcacauugucaggaagugcucagcaugucgaggagugcucuugcuauccucgauauccuggugucagaugugucugcagagacaacuggaaaggcuccaauaggcccaucguagauauaaacauaaaggaucauagcauuguuuccaguuauguguguucaggacuuguuggagacacacccagaaaaaacgacagcuccagcaguagccauuguuuggauccuaacaaugaagaagguggucauggagugaaaggcugggccuuugaugauggaaaugacguguggaugggaagaacgaucaacgagacgucacguuuaggguaugaaaccuucaaagucauugaaggcugguccaacccuaaguccaaauugcagauaaauaggcaagucauaguugacagaggugauagguccgguuauucugguauuuucucuguugaaggcaaaagcugcaucaaucggugcuuuuauguggaguugauuaggggaagaaaagaggaaacugaagucuuguggaccucaaacaguauuguuguguuuuguggcaccucagguacauauggaacaggcucauggccugauggggcggaccucaaucucaugccuauauaa

SEQ ID NO: 56298 - RNA, 1410 nt, Artificial Sequence
  derived and/or modified CDS sequence (wt) from neuraminidase__InfluenzaA__AHC62149
augaauccaaaucaaaagauaauaacgauuggcucuguuucucucaccauuuccacaauaugcuucuucaugcaaauugccaucuugauaacuacuguaacauugcauuucaagcaauaugaauucaacucccccccaaacaaccaagugaugcugugugaaccaacaauaauagaaagaaacaucacagagauaguguaucugaccaacaccaccauagagaaggaaauaugccccaaaccagcagaauacagaaauuggucaaaaccgcaaugugacauuacaggauuugcaccuuuuucuaaggacaauucgauuaggcuuuccgcugguggggacaucugggugacaagagaaccuuaugugucaugcgauccugacaaguguuaucaauuugcccuuggacagggaacaacacuaaacaaugugcauucaaauaacacaguacgugauaggaccccuuaucggacuuuauugaugaaugaguuagguguuccuuuucaucuggggaccaagcaagugugcauagcaugguccagcucaaguugucacgauggaaaagcauggcugcauguuuguauaacgggggaugauaaaaaugcaacugcuagcuucauuuacaaugggaggcuuguagauaguguuguuucaugguccaaagaaauucucaggacccaggagucagaaugcguuuguaucaauggaacuuguacaguaguaaugacugauggaagugcuucaggaaaagcugauacuaaaauacuauucauugaggaggggaaaaucguucauacuagcacauugucaggaagugcucagcaugucgaggagugcucuugcuauccucgauauccuggugucagaugugucugcagagacaacuggaaaggcuccaauaggcccaucguagauauaaacauaagggaucauagcauugucuccaguuauguguguucaggacuuguuggagacacacccagaaaaaacgacagcuccagcaguagccauuguuuggauccuaacaaugaagaagguggucauggagugaaaggcugggccuuugaugauggaaaugacguguggaugggaagaacaaucaacgagacgucacgcuuaggguaugaaaccuucaaagucauugaaggcugguccaacccuaaguccaaauugcagauaaauaggcaagucauaguugacagaggugauagguccgguuauucugguauuuucucuguugaaggcaaaagcugcaucaaucggugcuuuuauguggaguugauuaggggaagaaaagaggaaacugaagucuuguggaccucaaacaguauuguuguguuuuguggcaccucagguacauauggaacaggcucauggccugauggggcggaccucaaucucaugccuauauaa

SEQ ID NO: 56299 - RNA, 1410 nt, Artificial Sequence; identical to SEQ ID NO: 56019
  derived and/or modified CDS sequence (wt) from neuraminidase__InfluenzaA__AHC62161

SEQ ID NO: 56300 - RNA, 1410 nt, Artificial Sequence
  derived and/or modified CDS sequence (wt) from neuraminidase__InfluenzaA__AHC62173
augaauccaaaucaaaagauaauaacaauuggcucuguuucucucaccauuuccacaauaugcuucuucaugcaaauugccaucuugauaacuacuguaacauuacauuucaagcaaugugaauucaacucccccccaaacaaccaagugaugcugugugaaccaacaauaauagaaagaaacauaacagagauaguguaucugaccaacaccaccauagagaaggaaauaugccccaaacuagcagaauacagaaauuggucaaagccgcaaugugacauuacaggauuugcaccuuuuucuaaggacaauucgauuaggcuuuccgcugguggggacaucugggugacaagagaaccuuaugugucaugcgauccuaacaaguguuaucaauuugcccuuggacagggaacaacacuaaacaacgugcauucaaauaacacaguacgugauaggaccccuuaucggacccuauugaugaaugaguuagguguuccuuuucaucuggggaccaagcaagugugcauagcaugguccagcucaaguugucacgauggaaaagcauggcugcauguuuguauaacgggggaugauaaaaaugcaacugcuagcuucauuuacaaugggaagcuuguagauaguguuguuucaugguccaaagaaauccucaggacccaggagucagaaugcguuuguaucaauggaacuuguacaguaguaaugacugaugggagugcuucaggaaaagcugauacuaaaauacuauucauugaggaggggaaaaucguucauacuagcacacugucgggaagugcucagcaugucgaggagugcucuugcuauccucgauauccuggugucagaugugucugcagagacaacuggaaaggcuccaauaggcccaucguagauauaaacauaaaggaucauagcauuguuuccaguuauguguguucaggacuuguuggagacacacccagaaaaaacgacagcuccagcaguagccauuguuuggauccuaacaaugaagaagguggucauggagugaaaggcugggccuuugaugauggaaaugacguguggaugggaagaacgaucaacgagacuucacguuuaggguaugaaaccuucaaagucauugaaggcugguccaacccuaaguccaaauugcagauaaauaggcaagucauaguugacagagguaauagguccgguuauucugguauuuucucuguugaaggcaaaagcugcaucaaucggugcuuuuauguggaguugauuaggggaagaaaagaggaaacugaagucuuguggaccucaaacaguauuguuguguuuuguggcaccucagguacauauggaacaggcucauggccugauggggcggaccucaaucucaugccuauauaa

SEQ ID NO: 56301 - RNA, 1410 nt, Artificial Sequence; identical to SEQ ID NO: 56032
  derived and/or modified CDS sequence (wt) from neuraminidase__InfluenzaA__AHC62185

SEQ ID NO: 56302 - RNA, 1410 nt, Artificial Sequence; identical to SEQ ID NO: 55991
  derived and/or modified CDS sequence (wt) from neuraminidase__InfluenzaA__AHC62197

SEQ ID NO: 56303 - RNA, 1410 nt, Artificial Sequence
  derived and/or modified CDS sequence (wt) from neuraminidase__InfluenzaA__AHC62209
augaauccaaaucaaaagauaauaacgauuggcucuguuucucucaccauuuccacaauaugcuucuucaugcaaauugccaucuugauaacuacuguaacauugcauuucaagcaauaugaauucaacucccccccaaacaaccaagugaugcugugugaaccaacaauaauagaaagaaacaucacagagauaguguaucugaccaacaccaccauagagaaggaaauaugccccaaaccagcagaauacagaaauuggucaaaaccgcaaugugacauuacaggauuugcaccuuuuucuaaggacaauucgauuaggcuuuccgcugguggggacaucugggugacaagagaaccuuaugugucaugcgauccugacaaguguuaucaauuugcccuuggacagggaacaacacuaaacaaugugcauucaaauaacacaguacgugauaggaccccuuaucggacuuuauugaugaaugaguuagguguuccuuuucaucuggggaccaagcaagugugcauagcaugguccagcucaaguugucacgauggaaaagcauggcugcauguuuguauaacgggggaugauaaaaaugcaacugcuagcuucauuuacaaugggaggcuuguagauaguguuguuucaugguccaaagaaauucucaggacccaggagucagaaugcguuuguaucaauggaacuuguacaguaguaaugacugauggaagugcuucaggaaaagcugauacuaaaauacuauucauugaggaggggaaaaucguucauacuagcacauugucaggaagugcucagcaugucgaggagugcucuugcuauccucgauauccuggugucagaugugucugcagagacaacuggaaaggcuccaauaggcccaucguagauauaaacauaaagaaucauagcauugucuccaguuauguguguucaggacuuguuggagacacacccagaaaaaacgacagcuccagcaguagccauugucuggauccuaacaaugaagaagguggucauggagugaaaggcugggccuuugaugauggaaaugacguguggaugggaagaacaaucaacgagacgucacgcuuaggguaugaaaccuucaaaguaauugaaggcugguccaacccuaaguccaaauugcagauaaauaggcaagucauaguugacagaggugauagguccgguuauucugguauuuucucuguugaaggcaaaagcugcaucaaucggugcuuuuauguggaguugauuaggggaagaaaagaggaaacugaagucuuguggaccucaaacaguauuguuguguuuuguggcaccucagguacauauggaacaggcucauggccugauggggcggaccucaaucucaugccuauauaa

SEQ ID NO: 56304 - RNA, 1410 nt, Artificial Sequence; identical to SEQ ID NO: 55987
  derived and/or modified CDS sequence (wt) from neuraminidase__InfluenzaA__AHC62221

SEQ ID NO: 56305 - RNA, 1410 nt, Artificial Sequence
  derived and/or modified CDS sequence (wt) from neuraminidase__InfluenzaA__AHC62233
augaauccaaaucaaaagauaauaacgauuggcucuguuucucucaccauuuccacaauaugcuucuucaugcaaauugccaucuugauaacuacuguaacauugcauuucaagcaauaugaauucaacucucccccaaacaaccaagugaugcugugugaaccaacaauaauagaaagaaacauaacagagauaguguaucugaccaacaccaccauagagaaggaaauaugccccaaacuagcagaauacagaaauuggucaaagccgcaaugugacauuacaggauuugcaccuuuuucuaaggacaauucgauuaggcuuuccgcugguggggacaucugggugacaagagaaccuuaugugucaugcgauccugacaaguguuaucaauuugcccuuggacagggaacaacacuaaacaacgugcauucaaauaacacaguacgugauaggaccccuuaucggacccuauugaugaaugaguuagguguuccuuuucaucuggggaccaagcaagugugcauagcaugguccagcucaaguugucacgauggaaaagcauggcugcauguuuguauaacgggggaugauaaaaaugcaacugcuagcuucauuuacaaugggaggcuuguagauaguguuguuucaugguccaaagaaauccucaggacccaggagucagaaugcguuuguaucaauggaacuuguacaguaguaaugacugaugggagugcuucaggaaaagcugauacuaaaauacuauucauugaggaggggaaaaucguucauacuagcacauugucaggaagugcucagcaugucgaggagugcucuugcuauccucgauauccuggugucagaugugucugcagagacaacuggaaaggcuccaauaggcccaucguagauauaaacauaaaggaucauagcauuguuuccaguuauguauguucaggacuuguuggagacacacccagaaaaaacgacagcuccagcaguagccauuguuuggauccuaacaaugaagaagguggucauggagugaaaggcugggccuuugaugauggaaaugacguguggaugggaagaacgaucaacgagacgucacguuuaggguaugaaaccuucaaagucauugaaggcugguccaacccuaaguccaaauugcagauaaauaggcaagucauaguugacagagguaauagguccgguuauucugguauuuucucuguugaaggcaaaagcugcaucaaucggugcuuuuauguggaguugauuaggggaagaaaagaggaaacugaagucuuguggaccucaaacaguauuguuguguuuuguggcaccucagguacauauggaacaggcucauggccugauggggcggaccucaaucucaugccuauauaa

SEQ ID NO: 56306 - RNA, 1410 nt, Artificial Sequence; identical to SEQ ID NO: 55983
  derived and/or modified CDS sequence (wt) from neuraminidase__InfluenzaA__AHC62245

SEQ ID NO: 56307 - RNA, 1410 nt, Artificial Sequence
  derived and/or modified CDS sequence (wt) from neuraminidase__InfluenzaA__AHC62257
augaauccaaaucaaaagauaauaacgauuggcucuguuucucucaccauuuccacaauaugcuucuucaugcaaauugccaucuugauaacuacuguaacauugcauuucaagcaauaugaauucaacucccccccaaacaaccaagugaugcugugugaaccaacaauaauagaaagaaacaucacagagauaguguaucugaccaacaccaccauagagaaggaaauaugccccaaaccagcagaauacagaaauuggucaaaaccgcaaugugacauuacaggauuugcaccuuuuucuaaggacaauucgauuaggcuuuccgcugguggggacaucugggugacaagagaaccuuaugugucaugcgauccugacaaguguuaucaauuugcccuuggacagggaacaacacuaaacaaugugcauucaaauaacacaguacgugauaggaccccuuaucggacuuuauugaugaaugaguuagguguuccuuuucaucuggggaccaagcaagugugcauagcaugguccagcucaaguugucacgauggaaaagcauggcugcauguuuguauaacgggggaugauaaaaaugcaacugcuagcuucauuuacaaugggaggcuuguagauaguguuguuucaugguccaaagaaauucucaggacccaggagucagaaugcguuuguaucaauggaacuuguacaguaguaaugacugauggaagugcuucaggaaaagcugauacuaaaauacuauucauugaggaggggaaaaucguucauacuagcacauugucaggaagugcucagcaugucgaggagugcucuugcuauccucgauauccuggugucagaugugucugcagagacaacuggaaaggcuccaauaggcccaucguagauauaaacauaaaggaucauagcauugucuccaguuauguguguucaggacuuguuggagacacacccagaaaaaacgacagcuccagcaguagccauuguuuggauccaaacaaugaagaagguggucauggagugaaaggcugggccuuugaugauggaaaugacguguggaugggaagaacaaucaacgagacgucacgcuuaggguaugaaaccuucaaagucauugaaggcugguccaacccuaaguccaaauugcagauaaauaggcaagucauaguuggcagaggugauagguccgguuauucugguauuuucucuguugaaggcaaaagcugcaucaaucggugcuuuuauguggaguugauuaggggaagaaaagaggaaacugaagucuuguggaccucaaacaguauuguuguguuuuguggcaccucagguacauauggaacaggcucauggccugauggggcggaccucaaucucaugccuauauaa

SEQ ID NO: 56308 - RNA, 1410 nt, Artificial Sequence; identical to SEQ ID NO: 56060
  derived and/or modified CDS sequence (wt) from neuraminidase__InfluenzaA__AHC62269

SEQ ID NO: 56309 - RNA, 1410 nt, Artificial Sequence; identical to SEQ ID NO: 56093
  derived and/or modified CDS sequence (wt) from neuraminidase__InfluenzaA__AHC62281

SEQ ID NO: 56310 - RNA, 1410 nt, Artificial Sequence; identical to SEQ ID NO: 55987
  derived and/or modified CDS sequence (wt) from neuraminidase__InfluenzaA__AHC62293

SEQ ID NO: 56311 - RNA, 1410 nt, Artificial Sequence; identical to SEQ ID NO: 56305
  derived and/or modified CDS sequence (wt) from neuraminidase__InfluenzaA__AHC62305

SEQ ID NO: 56312 - RNA, 1410 nt, Artificial Sequence; identical to SEQ ID NO: 55983
  derived and/or modified CDS sequence (wt) from neuraminidase__InfluenzaA__AHC62317

SEQ ID NO: 56313 - RNA, 1410 nt, Artificial Sequence
  derived and/or modified CDS sequence (wt) from neuraminidase__InfluenzaA__AHC62329
augaauccaaaucaaaagauaauaacgauuggcucuguuucucucaccauuuccacaauaugcuucuucaugcaaauugccaucuugauaacuacuguaacauugcauuucaagcaauaugaauucaacucccccccaaacaaccaagugaugcugugugaaccaacaauaauagaaagaaacaucacagagauaguguaucugaccaauaccaccauagagaaggaaauaugccccaaaccagcagaauacagaaauuggucaaaaccgcaaugugacauuacaggauuugcaccuuuuucuaaggacaauucgauuaggcuuuccgcugguggggacaucugggugacaagagaaccuuaugugucaugcgauccugacaaguguuaucaauuugcccuuggacagggaacaacacuaaacaaugugcauucaaauaacacaguacgugauaggaccccuuaucggacuuuauugaugaaugaguuagguguuccuuuucaucuggggaccaagcaagugugcauagcaugguccagcucaaguugucacgauggaaaagcauggcugcauguuuguauaacgggggaugauaaaaaugcaacugcuagcuucauuuacaaugggaggcuuguagauaguguuguuucaugguccaaagaaauucucaggacccaggagucagaaugcguuuguaucaauggaacuuguacaguaguaaugacugauggaagugcuucaggaaaagcugauacuaaaauacuauucauugaagaggggaagaucguucauacuagcacauugucaggaagugcucagcaugucgaggagugcucuugcuauccucgauauccuggugucagaugugucugcagagacaacuggaaaggcuccaauaggcccaucguagauauaaacauaaaggaucauagcauugucuccaguuauguguguucaggacuuguuggagacacacccagaaaaaacgacagcuccagcaguagccauuguuuggauccuaacaaugaagaagguggucauggagugaaaggcugggccuuugaugauggaaaugacguguggaugggaagaacaaucaacgagacgucacgcuuaggguaugaaaccuucaaagucauugaaggcugguccaacccuaaauccaaauugcagauaaauaggcaagucauagcugacagaggugauagguccgguuauucugguauuuucucuguugaaggcaaaagcugcaucaaucggugcuuuuauguggaguugauuaggggaagaaaagaggaaacugaagucuuguggaccucaaacaguauuguuguguuuuguggcaccucagguacauauggaacaggcucauggccugauggggcggaccucaaucucaugccuauauaa

SEQ ID NO: 56314 - RNA, 1410 nt, Artificial Sequence; identical to SEQ ID NO: 55983
  derived and/or modified CDS sequence (wt) from neuraminidase__InfluenzaA__AHC62341

SEQ ID NO: 56315 - RNA, 1410 nt, Artificial Sequence
  derived and/or modified CDS sequence (wt) from neuraminidase__InfluenzaA__AHC62353
augaauccaaaucaaaagauaauaacgauuggcucuguuucucucaccauuuccacaauaugcuucuucaugcaaauugccaucuugauaacuacuguaacauugcauuucaagcaauaugaauucaacucccccccaaacaaccaagugaugcugugugaaccaacaauaauagaaagaaacauaacagagauaguguaucugaccaacaccaccauagagaaggaaauaugccccaaacuagcagaauacagaaauuggucaaagccgcaaugugacauuacaggauuugcaccuuuuucuaaggacaauucgauuaggcuuuccgcugguggggacaucugggugacaagagaaccuuaugugucaugcgauccugacaaguguuaucaauuugcccuuggacagggaacaacacuaaacaacgugcauucaaauaacacaguacgugauaggaccccuuaucggacccuauugaugaaugaguuagguguuccuuuucaucuggggaccaagcaagugugcauagcaugguccagcucaaguugucacgauggaaaagcauggcugcauguuuguauaacgggggaugauaaaaaugcaacugcuagcuucauuuacaaugggaggcuuguagauaguguuguuucaugguccaaagaaauccucaggacccaggagucagaaugcguuuguaucaauggaacuuguacaguaguaaugacugaugggagugcuucaggaaaagcugauacuaaaauacuauucauugaggaggggaaaaucguucauacuagcacauugucaggaagugcucagcaugucgaggagugcucuugcuauccucgauauccuggugucagaugugucugcagagacaacuggaaaggcuccaauaggcccaucguagauauaaacauaaaggaucauagcauuguuuccaguuauguguguucaggacuuguuggagacacacccagaaaaaccgacagcuccagcaguagccauuguuuggauccuaacaaugaagaagguggucauggagugaaaggcugggccuuugaugauggaaaugacguguggaugggaagaacgaucaacgagacgucacguuuaggguaugaaaccuucaaagucauugaaggcugguccaacccuaaguccaaauugcagauaaauaggcaagucauaguugacagagguaauagguccgguuauucugguauuuucucuguugaaggcaaaagcugcaucaaucggugcuuuuauguggaguugauuaggggaagaaaagaggaaacugaagucuuguggaccucaaacaguauuguuguguuuuguggcaccucagguacauauggaacaggcucauggccugauggggcggaccucaaucucaugccuauauaa

SEQ ID NO: 56316 - RNA, 1410 nt, Artificial Sequence; identical to SEQ ID NO: 55983
  derived and/or modified CDS sequence (wt) from neuraminidase__InfluenzaA__AHC62365

SEQ ID NO: 56317 - RNA, 1410 nt, Artificial Sequence; identical to SEQ ID NO: 56200
  derived and/or modified CDS sequence (wt) from neuraminidase__InfluenzaA__AHC62377

SEQ ID NO: 56318 - RNA, 1410 nt, Artificial Sequence; identical to SEQ ID NO: 56093
  derived and/or modified CDS sequence (wt) from neuraminidase__InfluenzaA__AHC62389

SEQ ID NO: 56319 - RNA, 1410 nt, Artificial Sequence; identical to SEQ ID NO: 56032
  derived and/or modified CDS sequence (wt) from neuraminidase__InfluenzaA__AHC62401

SEQ ID NO: 56320 - RNA, 1410 nt, Artificial Sequence; identical to SEQ ID NO: 56060
  derived and/or modified CDS sequence (wt) from neuraminidase__InfluenzaA__AHC62413

SEQ ID NO: 56321 - RNA, 1410 nt, Artificial Sequence; identical to SEQ ID NO: 56118
  derived and/or modified CDS sequence (wt) from neuraminidase__InfluenzaA__AHC62425

SEQ ID NO: 56322 - RNA, 1410 nt, Artificial Sequence; identical to SEQ ID NO: 52717
  derived and/or modified CDS sequence (wt) from neuraminidase__InfluenzaA__AHC62437

SEQ ID NO: 56323 - RNA, 1410 nt, Artificial Sequence; identical to SEQ ID NO: 56032
  derived and/or modified CDS sequence (wt) from neuraminidase__InfluenzaA__AHC62449

SEQ ID NO: 56324 - RNA, 1410 nt, Artificial Sequence; identical to SEQ ID NO: 55987
  derived and/or modified CDS sequence (wt) from neuraminidase__InfluenzaA__AHC62461

SEQ ID NO: 56325 - RNA, 1410 nt, Artificial Sequence; identical to SEQ ID NO: 55983
  derived and/or modified CDS sequence (wt) from neuraminidase__InfluenzaA__AHC62473

SEQ ID NO: 56326 - RNA, 1410 nt, Artificial Sequence
  derived and/or modified CDS sequence (wt) from neuraminidase__InfluenzaA__AHC62485
augaauccaaaucaaaagauaauaacgauuggcucuguuucucucaccauuuccacaauaugcuucuucaugcaaauugccaucuugauaacuacuguaacauugcauuucaagcaauaugaauucaacuccccuccaaacaaccaagugaugcugugugaaccaacaauaauagaaagaaacauaacagagauaguguaucugaccaacaccaccauagagaaggaaauaugccccaaaccagcagaauacagaaauuggucaaaaccgcaauguggcauuacaggauuugcaccuuucucuaaggacaauucgauuaggcuuuccgcugguggggacaucugggugacaagagaaccuuaugugucaugcgauccugacaaguguuaucaauuugcccuuggacagggaacaacccuaaacaacgugcauucaaauaacacaguacgugauaggaccccuuaucggacucuauugaugaaugaguuggguguuccuuuucaucuggggaccaagcaagugugcauagcaugguccagcucaaguugucacgauggaaaagcauggcugcauguuuguauaacgggggaugauaaaaaugcaacugcuagcuucauuuacaaugggaggcuuguagauaguguuguuucaugguccaaagaaauucucaggacccaggagucagaaugcguuuguaucaauggaacuuguacaguaguaaugacugauggaagugcuucaggaaaagcugauacuaaaauacuauucauugaggaggggaaaaucguucauacuagcacauugucaggaagugcucagcaugucgaagagugcucuugcuauccucgauauccuggugucagaugugucugcagagacaacuggaaaggcuccaauaggcccaucguagauauaaacauaaaggaucauagcauuguuuccaguuauguguguucaggacuuguuggagacacacccagaaaaaacgacagcuccagcaguagccauuguuuggauccuaacaaugaagaagguggucauggagugaaaggcugggccuuugaugauggaaaugacguguggaugggaagaacaaucaaugagacgucacgcuuaggguaugaaaccuucaaagucauugaaggcugguccaacccuaaguccaaauugcagauaaauaggcaagucauaguugacagaggugauagguccgguuauucugguauuuucucuguugaaggcaaaagcugcaucaaucggugcuuuuauguggaguugauuaggggaagaaaagaggaaacugaagucuuguggaccucaaacaguauuguuguguuuuguggcaccucagguacauauggaacaggcucauggccugauggggcggaccucaaucucaugccuauauaa

SEQ ID NO: 56327 - RNA, 1410 nt, Artificial Sequence; identical to SEQ ID NO: 56032
  derived and/or modified CDS sequence (wt) from neuraminidase__InfluenzaA__AHC62509

SEQ ID NO: 56328 - RNA, 1410 nt, Artificial Sequence
  derived and/or modified CDS sequence (wt) from neuraminidase__InfluenzaA__AHC62521
augaauccaaaucaaaagauaauaacgauuggcucuguuucucucaccauuuccacaauaugcuucuucaugcaaauugccaucuugauaacuacuguaacauugcauuucaagcaauaugaauucaacucccccccaaacaaccaagugaugcugugugaaccaacaauaauagaaagaaacauaacagagauaguguaucugaccaacaccaccauagagaaggagauaugccccaaacuagcagaauacagaaauuggucaaagccgcaaugugacauuacaggauuugcaccuuuuucuaaggacaauucgauuaggcuuuccgcugguggggacaucugggugacaagagaaccuuaugugucaugcgauccuaacaaguguuaucaauuugcccuuggacagggaacaacacuaaacaacgugcauucaaauaacacaguacgugauaggaccccuuaucggacccuauugaugaaugaguuagguguuccuuuucaucuggggaccaagcaagugugcauagcaugguccagcucaaguugucacgauggaaaagcauggcugcauguuuguauaacgggggaugauaaaaaugcaacugcuagcuucauuuacaaugggaagcuuguagauaguguuguuucaugguccaaagaaauccucaggacccaggagucagaaugcguuuguaucaauggaacuuguacaguaguaaugacugaugggagugcuucaggaaaagcugauacuaaaauacuauucauugaggaggggaaaaucguucauacuagcacauugucaggaagugcucagcaugucgaggagugcucuugcuauccucgauauccuggugucagaugugucugcagagacaacuggaaaggcuccaauaggcccaucguagauauaaacauaaaggaucauagcauuguuuccaguuauguguguucaggacuuguuggagacacacccagaaaaaacgacagcuccagcaguagccauuguuuggauccuaacaaugaagaagguggucauggagugaaaggcugggccuuugaugauggaaaugacguguggaugggaagaacgaucaacgagacuucacguuuaggguaugaaaccuucaaagucauugaaggcugguccaacccuaaguccaaauugcagauaaauaggcaagucauaguugacagagguaauagguccgguuauucugguauuuucucuguugaaggcaaaagcugcaucaaucggugcuuuuauguggaguugauuaggggaagaaaagaggaaacugaagucuuguggaccucaaacaguauuauuguguuuuguggcaccucagguacauauggaacaggcucauggccugauggggcggaccucaaucucaugccuauauaa

SEQ ID NO: 56329 - RNA, 1410 nt, Artificial Sequence
  derived and/or modified CDS sequence (wt) from neuraminidase__InfluenzaA__AHC62533
augaacccaaaucaaaagauaauaacgauuggcucuguuucucucaccauuuccacaauaugcuucuucaugcaaguugccaucuugauaacuacuguaacauugcauuucaagcaauaugaauucaacucccccccaaacaaccaagugaugcugugugaaccaacaauaauagaaagaaacauaacagagauauuguaucugaccaacaccaccauagagaaggaaauaugccccaaacuagcagaauacagaaauuggucaaagccgcaaugugacauuacaggauuugcaccuuuuucuaaggacaauucgauuaggcuuuccgcugguggggacaucugggugacaagagaaccuuaugugucaugcgauccugacaaguguuaucaauuugcccuuggacagggaacaacacuaaacaacgugcauucaaauaacacaguacgugauaggaccccuuaucggacccuauugaugaaugaguuagguguuccuuuucaucuggggaccaagcaagugugcauagcaugguccagcucaaguugucacgauggaaaagcauggcugcauguuuguauaacgggggaugauaaaaaugcaacugcuagcuucauuuacaaugggaagcuuguagauaguguuguuucaugguccaaagaaauccucaggacccaggagucagaaugcguuuguaucaauggaacuuguacaguaguaaugacugaugggagugcuucaggaaaagcugauacuaaaauacuauucauugaggaggggaaaaucguucauacuagcacauugucaggaagugcucagcauguagaggagugcucuugcuauccucgauauccuggugucagaugugucugcagagacaacuggaaaggcuccaauaggcccaucguagauauaaacauaaaggaucauagcauuguuuccaguuauguguguucaggacuuguuggagacacacccagaaaaaacgacagcuccagcaguagccauuguuuggauccuaacaaugaagaaggugguaauggagugaaaggcugggccuuugaugauggaaaugacguguggaugggaagaacgaucaacgagacgucacguuuaggguaugaaaccuucaaagucauugaaggcugguccaacccuaaguccaaauugcagauaaauaggcaagucauaguugacagagguaauagguccgguuauucugguauuuucucuguugaaggcaaaagcugcaucaaucggugcuuuuauguggaguugauuaggggaagaaaagaggaaacugaagucuuguggaccucaaacaguauuguuguguuuuguggcaccucagguacauauggaacaggcucauggccugauggggcggaccucaaucucaugccuauauaa

SEQ ID NO: 56330 - RNA, 1410 nt, Artificial Sequence; identical to SEQ ID NO: 56187
  derived and/or modified CDS sequence (wt) from neuraminidase__InfluenzaA__AHC62545

SEQ ID NO: 56331 - RNA, 1410 nt, Artificial Sequence; identical to SEQ ID NO: 56042
  derived and/or modified CDS sequence (wt) from neuraminidase__InfluenzaA__AHC62557

SEQ ID NO: 56332 - RNA, 1410 nt, Artificial Sequence; identical to SEQ ID NO: 55983
  derived and/or modified CDS sequence (wt) from neuraminidase__InfluenzaA__AHC62569

SEQ ID NO: 56333 - RNA, 1410 nt, Artificial Sequence; identical to SEQ ID NO: 56032
  derived and/or modified CDS sequence (wt) from neuraminidase__InfluenzaA__AHC62581

SEQ ID NO: 56334 - RNA, 1410 nt, Artificial Sequence
  derived and/or modified CDS sequence (wt) from neuraminidase__InfluenzaA__AHC62593
augaauccaaaucaaaagauaauaacgauuggcucuguuucucucaccauuuccacaauaugcuucuucaugcaaauugccaucuugauaacuacuguaacauugcauuucaagcaauaugaauucaacucccccccaaacaaccaagugaugcugugugaaccaacaauaauagaaagaaacauaacagagauaguguaucugaccaacaccaccauagagaaggaaauaugccccaaacuagcagaauacagaaauuggucaaagccgcaaugugacauuacaggauuugcaccuuuuucuaaggacaauucgauuaggcuuuccgcuggugggaacaucugggugacaagagaaccuuaugugucaugcgauccugacaaguguuaucaauuugcccuuggacagggaacaacacuaaacaacgugcauucaaauaacacaguacgugauaggaccccuuaucggacccuauugaugaaugaguuagguguuccuuuucaucuggggaccaagcaagugugcauagcaugguccagcucaaguugucacgauggaaaagcauggcugcauguuuguauaacgggggaugauaaaaaugcaacugcuagcuucauuuacaaugggaggcuuguagauaguguuguuucaugguccaaagaaauccucaggacccaggagucagaaugcguuuguaucaauggaacuuguacaguaguaaugacugaugggagugcuucaggaaaagcugauacuaaaauacuauucauugaggaggggaaaaucguucauacuagcacauugucaggaagugcucagcaugucgaggagugcucuugcuauccucgauauccuggugucagaugugucugcagagacaacuggaaaggcuccaauaggcccaucguagauauaaacauaaaggaucauagcauuguuuccaguuauguguguucaggacuuguuggagacacacccagaaaaaacgacagcuccagcaguagccauuguuuggauccuaacaaugaagaagguggucauggagugaaaggcugggccuuugaugauggaaaugacguguggaugggaagaacgaucaacgagacgucacguuuaggguaugaaaccuucaaagucauugaaggcugguccaacccuaaguccaaauugcagauaaauaggcaagucauaguugacagagguaauagguccgguuauucugguauuuucucuguugaaggcaaaagcugcaucaaucggugcuuuuauguggaguugauuaggggaagaaaagaggaaacugaagucuuguggaccucaaacaguauuguuguguuuuguggcaccucagguacauauggaacaggcucauggccugauggggcggaccucaaucucaugccuauauaa

SEQ ID NO: 56335 - RNA, 1410 nt, Artificial Sequence; identical to SEQ ID NO: 56105
  derived and/or modified CDS sequence (wt) from neuraminidase__InfluenzaA__AHC62605

SEQ ID NO: 56336 - RNA, 1410 nt, Artificial Sequence
  derived and/or modified CDS sequence (wt) from neuraminidase__InfluenzaA__AHC62617
augaauccaaaucaaaagauaauaacgauuggcucuguuucucucaccauuuccacaauaugcuucuucaugcaaauugccaucuugauaacuacuguaacauuacauuucaagcaauaugaauucaacucccccccaaacaaccaagugaugcggugugaaccaacaauaauagaaagaaacauaacagagauaguguaucugaccaacaccaccauagagaaggaaauaugccccaaacuagcagaauacagaaauuggucaaagccgcaaugugacauuacaggauuugcaccuuuuucuaaggacaauucgauuaggcuuuccgcugguggggacaucugggugacaagagaaccuuaugugucaugcgauccuaacaaguguuaucaauuugcccuuggacagggaacaacacuaaacaacgugcauucaaauaacacaguacgugauaggaccccuuaucggacccuauugaugaaugaguuagguguuccuuuucaucuggggaccaagcaagugugcauagcaugguccagcucaaguugucacgauggaaaagcauggcugcauguuuguauaacgggggaugauaaaaaugcaacugcuagcuucauuuacaaugggaagcuuguagauaguguuguuucauggucuaaagaaauccucaggacccaggagucagaaugcguuuguaucaauggaacuuguacaguaguaaugacugaugggagugcuucaggaaaagcugauacuaaaauacuauucauugaggaggggaaaaucguucauacuagcacauugucaggaagugcucagcaugucgaggagugcucuugcuauccucgauauccuggugucagaugugucugcagagacaacuggaaaggcuccaauaggcccaucguagauauaaacauaaaggaucauagcauuguuuccaguuauguguguucaggacuuguuggagacacacccagaaaaaacgacagcuccagcaguagccauuguuuggauccuaacaaugaagaagguggucauggagugaaaggcugggccuuugaugauggaaaugacguguggaugggaagaacgaucaacgagacuucacguuuaggguaugaaaccuucaaagucauugaaggcugguccaacccuaaguccaaauugcagauaaauaggcaagucauaguugacagagguaauagguccgguuauucugguauuuucucuguugaaggcaaaagcugcaucaaucggugcuuuuauguggaguugauuaggggaagaaaagaggaaacugaagucuuguggaccucaaacaguauuguuguguuuuguggcaccucagguacauauggaacaggcucauggccugauggggcggaccucaaucucaugccuauauaa

SEQ ID NO: 56337 - RNA, 1410 nt, Artificial Sequence
  derived and/or modified CDS sequence (wt) from neuraminidase__InfluenzaA__AHC62629
augaauccaaaucaaaagauaauaacgauuggcucuguuucucucaccauuuccacaauaugcuucuucaugcagauugccaucuugauaacuacuguaacauuacauuucaagcaauaugaauucaacucccccccaaacaaccaagugaugcugugugaaccaacaauaauagaaagaaacauaacagagauaguguaucugaccaacaccaccauagagaaggaaauaugccccaaacuagcagaauacagaaauuggucaaagccgcaaugugacauuacaggguuugcaccuuuuucuaaggacaauucgauuaggcuuuccgcugguggggacaucugggugacaagagaaccuuaugugucaugcgauccuaacaaguguuaucaauuugcccuuggacagggaacaacacuaaacaacgugcauucaaauaacacaguacgugauaggaccccuuaucggacccuauugaugaaugaguuagguguuccuuuucaucuggggaccaagcaagugugcauagcaugguccagcucaaguugucacgauggaaaagcauggcugcauguuuguauaacgggggaugauaaaaaugcaacugcuagcuucauuuacaaugggaagcuuguagauaguguuguuucaugguccaaagaaauccucaggacccaggagucagaaugcguuuguaucaauggaacuuguacaguaguaaugacugaugggagugcuucaggaaaagcugauacuaaaauacuauucauugaggaggggaaaaucguucauacuagcacauugucaggaagugcucagcaugucgaggagugcucuugcuauccucgauauccuggugucagaugugucugcagagacaacuggaaaggcuccaauaggcccaucguagauauaaacauaaaggaucauagcauuguuuccaguuauguguguucaggacuuguuggagacacacccagaaaaaacgacagcuccagcaguagccauuguuuggauccuaacaaugaagaagguggucauggagugaaaggcugggccuuugaugauggaaaugacguguggaugggaagaacgaucaacgagacuucacguuuaggguaugaaaccuucaaagucauugaaggcugguccaacccuaaguccaaauugcagauaaauaggcaagucauaguugacagagguaauagguccgguuauucugguauuuucucuguugaaggcaaaagcugcaucaaucggugcuuuuauguggaguugauuaggggaagaaaagaggaaacugaagucuuguggaccucaaacaguauuguuguguuuuguggcaccucagguacauauggaacaggcucauggccugauggggcggaccucaaucucaugccuauauaa

SEQ ID NO: 56338 - RNA, 1410 nt, Artificial Sequence
  derived and/or modified CDS sequence (wt) from neuraminidase__InfluenzaA__AHC62641
augaacccaaaucaaaagauaauaacgauuggcucuguuucucucaccauuuccacaguaugcuucuucaugcaaguugccaucuugauaacuacuguaacauugcauuucaagcaauaugaauucaacucccccccaaacaaccaagugaugcugugugaaccaacaauaauagaaagaaacauaacagagauauuguaucugaccaacaccaccauagagaaggaaauaugccccaaacuagcagaauacagaaauuggucaaagccgcaaugugacauuacaggauuugcaccuuuuucuaaggacaauucgauuaggcuuuccgcugguggggacaucugggugacaagagaaccuuaugugucaugcgauccugacaaguguuaucaauuugcccuuggacagggaacaacacuaaacaacgugcauucaaauaacacaguacgugauaggaccccuuaucggacccuauugaugaaugaguuagguguuccuuuucaucuggggaccaagcaagugugcauagcaugguccagcucaaguugucacgauggaaaagcauggcugcauguuuguauaacgggggaugauaaaaaugcaacugcuagcuucauuuacaaugggaagcuuguagauaguguuguuucaugguccaaagaaauccucaggacccaggagucagaaugcguuuguaucaauggaacuuguacaguaguaaugacugaugggagugcuucaggaaaagcugauacuaaaauacuauucauugaggaggggaaaaucguucauacuagcacauugucaggaagugcucagcauguagaggagugcucuugcuauccucgauauccuggugucagaugugucugcagagacaacuggaaaggcuccaauaggcccaucguagauauaaacauaaaggaucauagcauuguuuccaguuauguguguucaggacuuguuggagacacacccagaaaaaacgacagcuccagcaguagccauuguuuggauccuaacaaugaagaagguggucauggagugaaaggcugggccuuugaugauggaaaugacguguggaugggaagaacgaucaacgagacgucacguuuaggguaugaaaccuucaaagucauugaaggcugguccaacccuaaguccaaauugcagauaaauaggcaagucauaguugacagagguaauagguccgguuauucugguauuuucucuguugaaggcaaaagcugcaucaaucggugcuuuuauguggaguugauuaggggaagaaaagaggaaacugaagucuuguggaccucaaacaguauuguuguguuuuguggcaccucagguacauauggaacaggcucauggccugauggggcggaccucaaucucaugccuauauaa

SEQ ID NO: 56339 - RNA, 1410 nt, Artificial Sequence; identical to SEQ ID NO: 56011
  derived and/or modified CDS sequence (wt) from neuraminidase__InfluenzaA__AHC62653

SEQ ID NO: 56340 - RNA, 1410 nt, Artificial Sequence
  derived and/or modified CDS sequence (wt) from neuraminidase__InfluenzaA__AHC62665
augaauccaaaucaaaagauaauaacgauuggcucuguuucucucaccauuuccacaauaugcuucuucaugcaaauugccaucuugauaacuacuguaacauuacauuucaagcaauaugaauucaacucccccccaaacaaccaagugaugcugugugaaccaacaauaauagaaagaaacauaacagagauaguguaucugaccaacaccaccauagagaaggaaauaugucccaaacuagcagaauacagaaauuggucaaagccgcaaugugacauuacaggauuugcaccuuuuucuaaggacaauucgauuaggcuuuccgcugguggggacaucugggugacaagagaaccuuaugugucaugcgauccuaacaaguguuaucaauuugcccuuggacaggggacaacacuaaacaacgugcauucaaauaacacaguacgugauaggaccccuuaucggacccuauugaugaaugaguuagguguuccuuuucaucuggggaccaagcaagugugcauagcaugguccagcucaaguugucacgauggaaaagcauggcugcauguuuguauaacgggggaugauaaaaaugcaacugcuagcuucauuuacaaugggaagcuuguagauaguguuguuucaugguccaaagagauccucaggacccaggagucagaaugcguuuguaucaauggaacuuguacaguaguaaugacugaugggagugcuucaggaaaagcugauacuaaaauacuauucauugaggaggggaaaaucguucauacuagcacauugucaggaagugcucagcaugucgaggagugcucuugcuauccucgauauccuggugucagaugugucugcagagacaacuggaaaggcuccaauaggcccaucguagauauaaacauaaaggaucauagcauuguuuccaguuauguguguucaggacuuguuggagacacacccagaaaaaacgacagcuccagcaguagccauuguuuggauccuaacaaugaagaagguggucauggagugaaaggcugggccuuugaugauggaaaugacguguggaugggaagaacgaucaacgagacuucacguuuaggguaugaaaccuucaaagucauugaaggcugguccaacccuaaguccaaauugcagauaaauaggcaagucauaguugacagagguaauagguccgguuauucugguauuuucucuguugaaggcaaaagcugcaucaaucggugcuuuuauguggaguugauuaggggaagaaaagaggaaacugaagucuuguggaccucaaacaguauuguuguguuuuguggcaccucagguacauauggaacaggcucauggccugauggggcggaccucaaucucaugccuauauaa

SEQ ID NO: 56341 - RNA, 1410 nt, Artificial Sequence
  derived and/or modified CDS sequence (wt) from neuraminidase__InfluenzaA__AHC62677
augaauccaaaucaaaagauaauaacgauuggcucuguuucucucaccauuuccacaauaugcuucuucaugcaaauugccaucuugauaacuacuguaacauuacauuucaagcaauaugaauucaacucccccccaaacaaccaagugaugcugugugaaccaacaauaauagaaagaaacauaacagagauaguguaucugaccaacaccaccauagagaaggaaauaugucccaaacuagcagaauacagaaauuggucaaagccgcaaugugacauuacaggauuugcaccuuuuucuaaggacaauucgauuaggcuuuccgcugguggggacaucugggugacaagagaaccuuaugugucaugcgauccuaacaaguguuaucaauuugcccuuggacagggaacaacacuaaacaacgugcauucaaauaacacaguacgugauaggaccccuuaucggacccuauugaugaaugaguuagguguuccuuuucaucuggggaccaagcaagugugcauagcaugguccagcucaaguugucacgaugggaaagcauggcugcauguuuguauaacgggggaugauaaaaaugcaacugcuagcuucauuuacaaugggaagcuuguagauaguguuguuucaugguccaaagaaauacucaggacccaggagucagaaugcguuuguaucaauggaacuuguacaguaguaaugacugaugggagugcuucaggaaaagcugauacuaaaauacuauucauugaggaggggaaaaucguucauacuagcacauugucaggaagugcucagcaugucgaggagugcucuugcuauccucgauauccuggugucagaugugucugcagagacaacuggaaagguuccaauaggcccaucguagauauaaacauaaaggaucauagcauuguuuccaguuauguguguucaggacuuguuggagacacacccagaaaaaacgacaucuccagcaguagccauuguuuggauccuaacaaugaagaagguggucauggagugaaaggcugggccuuugaugauggaaaugacguguggaugggaagaacgaucaacgagacuucacguuuaggguaugaaaccuucaaagucauugaaggcugguccaacccuaaguccaaauugcagauaaauaggcaagucauaguugacagagguaauagguccgguuauucugguauuuucucuguugaaggcaaaagcugcaucaaucggugcuuuuauguggaguugauuaggggaagaaaagaggaaacugaagucuuguggaccucaaacaguauuguuguguuuuguggcaccucagguacauauggaacaggcucauggccugauggggcggaccucaaucucaugccuauauaa

SEQ ID NO: 56342 - RNA, 1398 nt, Artificial Sequence
  derived and/or modified CDS sequence (wt) from neuraminidase__InfluenzaA__AHF20560
augaauccaaaucagaagauucuaugcacuucagccacugcuaucauaauaggcgcaaucacaguacucauuggaauagcaaaccuaggauugaacauaggacugcaucuaaaaccgggcugcaauugcucacacucacaaccugaaacaaccaacacaagccaaacaauaauaaacaacuauuauaaugaaacaaacaccaccaacauccaaauggaagagagaacaagcaggaauuucaauaacuuaacuaaagggcucuguacuauaaauucauggcacauauaugggaaagacaaugcaguaagaauuggagagagcucggauguuuuggucacaagagaacccuauguuucaugcgacccagaugaaugcagguucuaugcucucagccaaggaacaacaaucagagggaaacacucaaacggaacaauacacgauaggucccaguaucgcgcccugauaagcuggccacuaucaucaccgcccacaguguacaacagcaggguggaaugcauuggguggucaaguacuaguugccaugauggcaaauccaggaugucaauauguauaucaggaccaaacaacaaugcaucugcaguaguaugguacaacagaaggccuguugcagaaauuaacacaugggcccgaaacauacuaagaacacaggaaucugaauguguaugccacaacggcguaugcccaguaguguucaccgaugggucugccacuggaccugcagacacaagaauauacuauuuuaaagaggggaaaauauugaaaugggagucucugacuggaacugcuaagcauauugaagaaugcucauguuacggggaacgaacaggaauuaccugcacaugcagggacaauuggcagggcucaaauagaccagugauucagauagacccaguagcaaugacacacacuagucaauauauaugcaguccuguucuuacagacaauccccgaccgaaugacccaaauauagguaaguguaaugacccuuauccagguaauaauaacaauggagucaagggauucucauaccuggauggggcuaacacuuggcuagggaggacaauaagcacagccucgaggucuggauacgagauguuaaaagugccaaaugcauugacagaugauagaucaaagcccauucaaggucagacaauuguauuaaacgcugacuggagugguuacaguggaucuuucauggacuauugggcugaaggggacugcuaucgagcguguuuuuauguggaguugauacguggaagacccaaggaggauaaagugugguggaccagcaauaguauaguaucgauguguuccaguacagaauuccuggaacaauggaacuggccugauggggcuaaaauagaguacuuccucuaa

SEQ ID NO: 56343 - RNA, 1398 nt, Artificial Sequence; identical to SEQ ID NO: 55466
  derived and/or modified CDS sequence (wt) from neuraminidase__InfluenzaA__AHF20570

SEQ ID NO: 56344 - RNA, 1413 nt, Artificial Sequence; identical to SEQ ID NO: 49227
  derived and/or modified CDS sequence (wt) from neuraminidase__InfluenzaA__AHG96111

SEQ ID NO: 56345 - RNA, 1413 nt, Artificial Sequence; identical to SEQ ID NO: 49227
  derived and/or modified CDS sequence (wt) from neuraminidase__InfluenzaA__AHG96123

SEQ ID NO: 56346 - RNA, 1413 nt, Artificial Sequence; identical to SEQ ID NO: 49227
  derived and/or modified CDS sequence (wt) from neuraminidase__InfluenzaA__AHG96135

SEQ ID NO: 56347 - RNA, 1413 nt, Artificial Sequence; identical to SEQ ID NO: 49227
  derived and/or modified CDS sequence (wt) from neuraminidase__InfluenzaA__AHG96147

SEQ ID NO: 56348 - RNA, 1413 nt, Artificial Sequence; identical to SEQ ID NO: 49227
  derived and/or modified CDS sequence (wt) from neuraminidase__InfluenzaA__AHG96159

SEQ ID NO: 56349 - RNA, 1413 nt, Artificial Sequence; identical to SEQ ID NO: 49227
  derived and/or modified CDS sequence (wt) from neuraminidase__InfluenzaA__AHG96171

SEQ ID NO: 56350 - RNA, 1413 nt, Artificial Sequence; identical to SEQ ID NO: 49227
  derived and/or modified CDS sequence (wt) from neuraminidase__InfluenzaA__AHG96183

SEQ ID NO: 56351 - RNA, 1413 nt, Artificial Sequence; identical to SEQ ID NO: 49227
  derived and/or modified CDS sequence (wt) from neuraminidase__InfluenzaA__AHG96195

SEQ ID NO: 56352 - RNA, 1413 nt, Artificial Sequence; identical to SEQ ID NO: 49227
  derived and/or modified CDS sequence (wt) from neuraminidase__InfluenzaA__AHG96207

SEQ ID NO: 56353 - RNA, 1413 nt, Artificial Sequence; identical to SEQ ID NO: 49227
  derived and/or modified CDS sequence (wt) from neuraminidase__InfluenzaA__AHG96219

SEQ ID NO: 56354 - RNA, 1413 nt, Artificial Sequence; identical to SEQ ID NO: 49227
  derived and/or modified CDS sequence (wt) from neuraminidase__InfluenzaA__AHG96231

SEQ ID NO: 56355 - RNA, 1413 nt, Artificial Sequence; identical to SEQ ID NO: 49227
  derived and/or modified CDS sequence (wt) from neuraminidase__InfluenzaA__AHG96243

SEQ ID NO: 56356 - RNA, 1413 nt, Artificial Sequence
  derived and/or modified CDS sequence (wt) from neuraminidase__InfluenzaA__AHG96255
augaacccaaaucaaaagauaauaaccauuggaucaaucaguauagcaaucggaauaauuagucuaauguugcaaauaggaaauauuauuucaauaugggcuagucacucaauccaaacuggaagucaaaacaacacuggaauaugcaaccaaagaaucaucacauaugaaaacagcaccugggugaaucacacauauguuaauauuaacaacacuaauguuguugcuggagaggacaaaacuucagugacauuggcuggcaauucaucucuuuguucuaucaguggaugggcuauauacacaaaagacaacagcauaagaauuggcuccaaaggagauguuuuugucauaagagaaccuuucauaucauguucucacuuggaaugcagaaccuuuuuucugacccaaggcgcucuauuaaaugacaaacauucaaaugggaccguaaaggacagaaguccuuauagggccuuaaugagcuguccucuaggugaagcuccguccccauacaauucaaaguucgaaucaguugcauggucagcaagcgcaugccaugauggcaugggcugguuaacaaucggaauuucugguccagacaauggagcuguggcuguacuaaaauacaacggaauaaucacuggaaccauaaaaaguuggaaaaagcaaauauuaagaacacaagagucugaaugugucuguaugaacgggucauguuucaccauaaugaccgauggcccgaguaauaaggccgccucguacaaaauuuucaagaucgaaaaggggaagguuacuaaaucaauagaguugaaugcacccaauuuucauuaugaggaauguuccuguuacccagacacuggcauagugauguguguaugcagggacaacuggcaugguucaaaucgaccuugggugucuuuuaaucaaaacuuggauuaucaaauaggauacaucugcaguggaguguucggugacaauccgcgucccgaagauggagagggcagcugcaauccagugacuguugauggagcaaacggaguaaaaggguuuucauacaaauaugauaaugguguuuggauaggaaggaccaaaaguaacagacuuagaaagggguuugagaugauuugggauccuaauggauggacaaauaccgacagugauuucucagugaaacaggauguuguagcaauaacugauuggucaggguacagcggaaguuucguccaacauccugaguuaacaggauuggacuguauaagaccuugcuucuggguugaguuagucagagggcugccuagagaaaauacaacaaucuggacuagugggagcagcauuucuuuuuguggcguuaauagugauacugcaaacuggucuuggccagacggugcugaguugccguucaccauugacaaguag

SEQ ID NO: 56357 - RNA, 1413 nt, Artificial Sequence; identical to SEQ ID NO: 49227
  derived and/or modified CDS sequence (wt) from neuraminidase__InfluenzaA__AHG96267

SEQ ID NO: 56358 - RNA, 1413 nt, Artificial Sequence; identical to SEQ ID NO: 49227
  derived and/or modified CDS sequence (wt) from neuraminidase__InfluenzaA__AHG96279

SEQ ID NO: 56359 - RNA, 1413 nt, Artificial Sequence; identical to SEQ ID NO: 49227
  derived and/or modified CDS sequence (wt) from neuraminidase__InfluenzaA__AHG96291

SEQ ID NO: 56360 - RNA, 1413 nt, Artificial Sequence; identical to SEQ ID NO: 49227
  derived and/or modified CDS sequence (wt) from neuraminidase__InfluenzaA__AHG96303

SEQ ID NO: 56361 - RNA, 1410 nt, Artificial Sequence; identical to SEQ ID NO: 48468
  derived and/or modified CDS sequence (wt) from neuraminidase__InfluenzaA__AHG96362

SEQ ID NO: 56362 - RNA, 1410 nt, Artificial Sequence; identical to SEQ ID NO: 48468
  derived and/or modified CDS sequence (wt) from neuraminidase__InfluenzaA__AHG96374

SEQ ID NO: 56363 - RNA, 1410 nt, Artificial Sequence; identical to SEQ ID NO: 48468
  derived and/or modified CDS sequence (wt) from neuraminidase__InfluenzaA__AHG96386

SEQ ID NO: 56364 - RNA, 1413 nt, Artificial Sequence; identical to SEQ ID NO: 49227
  derived and/or modified CDS sequence (wt) from neuraminidase__InfluenzaA__AHG96398

SEQ ID NO: 56365 - RNA, 1410 nt, Artificial Sequence; identical to SEQ ID NO: 48468
  derived and/or modified CDS sequence (wt) from neuraminidase__InfluenzaA__AHG96410

SEQ ID NO: 56366 - RNA, 1410 nt, Artificial Sequence; identical to SEQ ID NO: 48468
  derived and/or modified CDS sequence (wt) from neuraminidase__InfluenzaA__AHG96422

SEQ ID NO: 56367 - RNA, 1410 nt, Artificial Sequence; identical to SEQ ID NO: 48468
  derived and/or modified CDS sequence (wt) from neuraminidase__InfluenzaA__AHG96434

SEQ ID NO: 56368 - RNA, 1410 nt, Artificial Sequence; identical to SEQ ID NO: 48468
  derived and/or modified CDS sequence (wt) from neuraminidase__InfluenzaA__AHG96446

SEQ ID NO: 56369 - RNA, 1410 nt, Artificial Sequence; identical to SEQ ID NO: 48468
  derived and/or modified CDS sequence (wt) from neuraminidase__InfluenzaA__AHG96458

SEQ ID NO: 56370 - RNA, 1410 nt, Artificial Sequence; identical to SEQ ID NO: 48468
  derived and/or modified CDS sequence (wt) from neuraminidase__InfluenzaA__AHG96470

SEQ ID NO: 56371 - RNA, 1410 nt, Artificial Sequence; identical to SEQ ID NO: 48468
  derived and/or modified CDS sequence (wt) from neuraminidase__InfluenzaA__AHG96482

SEQ ID NO: 56372 - RNA, 1410 nt, Artificial Sequence; identical to SEQ ID NO: 48468
  derived and/or modified CDS sequence (wt) from neuraminidase__InfluenzaA__AHG96494

SEQ ID NO: 56373 - RNA, 1410 nt, Artificial Sequence; identical to SEQ ID NO: 48468
  derived and/or modified CDS sequence (wt) from neuraminidase__InfluenzaA__AHG96506

SEQ ID NO: 56374 - RNA, 1413 nt, Artificial Sequence; identical to SEQ ID NO: 49227
  derived and/or modified CDS sequence (wt) from neuraminidase__InfluenzaA__AHG96518

SEQ ID NO: 56375 - RNA, 1413 nt, Artificial Sequence; identical to SEQ ID NO: 49227
  derived and/or modified CDS sequence (wt) from neuraminidase__InfluenzaA__AHG96530

SEQ ID NO: 56376 - RNA, 1413 nt, Artificial Sequence; identical to SEQ ID NO: 49227
  derived and/or modified CDS sequence (wt) from neuraminidase__InfluenzaA__AHG96542

SEQ ID NO: 56377 - RNA, 1413 nt, Artificial Sequence; identical to SEQ ID NO: 49227
  derived and/or modified CDS sequence (wt) from neuraminidase__InfluenzaA__AHG96554

SEQ ID NO: 56378 - RNA, 1413 nt, Artificial Sequence; identical to SEQ ID NO: 49227
  derived and/or modified CDS sequence (wt) from neuraminidase__InfluenzaA__AHG96566

SEQ ID NO: 56379 - RNA, 1413 nt, Artificial Sequence; identical to SEQ ID NO: 49227
  derived and/or modified CDS sequence (wt) from neuraminidase__InfluenzaA__AHG96578

SEQ ID NO: 56380 - RNA, 1413 nt, Artificial Sequence; identical to SEQ ID NO: 49227
  derived and/or modified CDS sequence (wt) from neuraminidase__InfluenzaA__AHG96590

SEQ ID NO: 56381 - RNA, 1413 nt, Artificial Sequence; identical to SEQ ID NO: 49227
  derived and/or modified CDS sequence (wt) from neuraminidase__InfluenzaA__AHG96602

SEQ ID NO: 56382 - RNA, 1413 nt, Artificial Sequence; identical to SEQ ID NO: 49227
  derived and/or modified CDS sequence (wt) from neuraminidase__InfluenzaA__AHG96614

SEQ ID NO: 56383 - RNA, 1413 nt, Artificial Sequence; identical to SEQ ID NO: 49227
  derived and/or modified CDS sequence (wt) from neuraminidase__InfluenzaA__AHG96626

SEQ ID NO: 56384 - RNA, 1413 nt, Artificial Sequence; identical to SEQ ID NO: 49227
  derived and/or modified CDS sequence (wt) from neuraminidase__InfluenzaA__AHG96638

SEQ ID NO: 56385 - RNA, 1413 nt, Artificial Sequence; identical to SEQ ID NO: 49227
  derived and/or modified CDS sequence (wt) from neuraminidase__InfluenzaA__AHG96650

SEQ ID NO: 56386 - RNA, 1413 nt, Artificial Sequence; identical to SEQ ID NO: 49227
  derived and/or modified CDS sequence (wt) from neuraminidase__InfluenzaA__AHG96662

SEQ ID NO: 56387 - RNA, 1413 nt, Artificial Sequence; identical to SEQ ID NO: 49227
  derived and/or modified CDS sequence (wt) from neuraminidase__InfluenzaA__AHG96674

SEQ ID NO: 56388 - RNA, 1413 nt, Artificial Sequence; identical to SEQ ID NO: 49227
  derived and/or modified CDS sequence (wt) from neuraminidase__InfluenzaA__AHG96686

SEQ ID NO: 56389 - RNA, 1410 nt, Artificial Sequence; identical to SEQ ID NO: 48468
  derived and/or modified CDS sequence (wt) from neuraminidase__InfluenzaA__AHG96698

SEQ ID NO: 56390 - RNA, 1410 nt, Artificial Sequence; identical to SEQ ID NO: 48468
  derived and/or modified CDS sequence (wt) from neuraminidase__InfluenzaA__AHG96710

SEQ ID NO: 56391 - RNA, 1410 nt, Artificial Sequence; identical to SEQ ID NO: 48468
  derived and/or modified CDS sequence (wt) from neuraminidase__InfluenzaA__AHG96722

SEQ ID NO: 56392 - RNA, 1410 nt, Artificial Sequence; identical to SEQ ID NO: 48468
  derived and/or modified CDS sequence (wt) from neuraminidase__InfluenzaA__AHG96734

SEQ ID NO: 56393 - RNA, 1410 nt, Artificial Sequence; identical to SEQ ID NO: 48468
  derived and/or modified CDS sequence (wt) from neuraminidase__InfluenzaA__AHG96746

SEQ ID NO: 56394 - RNA, 1410 nt, Artificial Sequence; identical to SEQ ID NO: 48468
  derived and/or modified CDS sequence (wt) from neuraminidase__InfluenzaA__AHG96758

SEQ ID NO: 56395 - RNA, 1410 nt, Artificial Sequence; identical to SEQ ID NO: 48468
  derived and/or modified CDS sequence (wt) from neuraminidase__InfluenzaA__AHG96770

SEQ ID NO: 56396 - RNA, 1410 nt, Artificial Sequence; identical to SEQ ID NO: 48468
  derived and/or modified CDS sequence (wt) from neuraminidase__InfluenzaA__AHG96782

SEQ ID NO: 56397 - RNA, 1410 nt, Artificial Sequence; identical to SEQ ID NO: 48468
  derived and/or modified CDS sequence (wt) from neuraminidase__InfluenzaA__AHG96794

SEQ ID NO: 56398 - RNA, 1410 nt, Artificial Sequence; identical to SEQ ID NO: 48468
  derived and/or modified CDS sequence (wt) from neuraminidase__InfluenzaA__AHG96806

SEQ ID NO: 56399 - RNA, 1410 nt, Artificial Sequence; identical to SEQ ID NO: 48468
  derived and/or modified CDS sequence (wt) from neuraminidase__InfluenzaA__AHG96818

SEQ ID NO: 56400 - RNA, 1410 nt, Artificial Sequence; identical to SEQ ID NO: 48468
  derived and/or modified CDS sequence (wt) from neuraminidase__InfluenzaA__AHG96830

SEQ ID NO: 56401 - RNA, 1410 nt, Artificial Sequence; identical to SEQ ID NO: 48468
  derived and/or modified CDS sequence (wt) from neuraminidase__InfluenzaA__AHG96842

SEQ ID NO: 56402 - RNA, 1410 nt, Artificial Sequence; identical to SEQ ID NO: 48468
  derived and/or modified CDS sequence (wt) from neuraminidase__InfluenzaA__AHG96854

SEQ ID NO: 56403 - RNA, 1410 nt, Artificial Sequence; identical to SEQ ID NO: 48468
  derived and/or modified CDS sequence (wt) from neuraminidase__InfluenzaA__AHG96866

SEQ ID NO: 56404 - RNA, 1410 nt, Artificial Sequence; identical to SEQ ID NO: 48468
  derived and/or modified CDS sequence (wt) from neuraminidase__InfluenzaA__AHG96878

SEQ ID NO: 56405 - RNA, 1410 nt, Artificial Sequence; identical to SEQ ID NO: 48468
  derived and/or modified CDS sequence (wt) from neuraminidase__InfluenzaA__AHG96890

SEQ ID NO: 56406 - RNA, 1410 nt, Artificial Sequence; identical to SEQ ID NO: 48468
  derived and/or modified CDS sequence (wt) from neuraminidase__InfluenzaA__AHG96902

SEQ ID NO: 56407 - RNA, 1410 nt, Artificial Sequence; identical to SEQ ID NO: 48468
  derived and/or modified CDS sequence (wt) from neuraminidase__InfluenzaA__AHG96914

SEQ ID NO: 56408 - RNA, 1410 nt, Artificial Sequence; identical to SEQ ID NO: 48468
  derived and/or modified CDS sequence (wt) from neuraminidase__InfluenzaA__AHG96926

SEQ ID NO: 56409 - RNA, 1410 nt, Artificial Sequence; identical to SEQ ID NO: 48468
  derived and/or modified CDS sequence (wt) from neuraminidase__InfluenzaA__AHG96938

SEQ ID NO: 56410 - RNA, 1410 nt, Artificial Sequence; identical to SEQ ID NO: 48468
  derived and/or modified CDS sequence (wt) from neuraminidase__InfluenzaA__AHG96950

SEQ ID NO: 56411 - RNA, 1410 nt, Artificial Sequence; identical to SEQ ID NO: 48468
  derived and/or modified CDS sequence (wt) from neuraminidase__InfluenzaA__AHG96962

SEQ ID NO: 56412 - RNA, 1410 nt, Artificial Sequence; identical to SEQ ID NO: 48468
  derived and/or modified CDS sequence (wt) from neuraminidase__InfluenzaA__AHG96974

SEQ ID NO: 56413 - RNA, 1410 nt, Artificial Sequence; identical to SEQ ID NO: 48468
  derived and/or modified CDS sequence (wt) from neuraminidase__InfluenzaA__AHG96986

SEQ ID NO: 56414 - RNA, 1410 nt, Artificial Sequence; identical to SEQ ID NO: 48468
  derived and/or modified CDS sequence (wt) from neuraminidase__InfluenzaA__AHG96998

SEQ ID NO: 56415 - RNA, 1410 nt, Artificial Sequence; identical to SEQ ID NO: 48468
  derived and/or modified CDS sequence (wt) from neuraminidase__InfluenzaA__AHG97010

SEQ ID NO: 56416 - RNA, 1410 nt, Artificial Sequence; identical to SEQ ID NO: 48468
  derived and/or modified CDS sequence (wt) from neuraminidase__InfluenzaA__AHG97022

SEQ ID NO: 56417 - RNA, 1410 nt, Artificial Sequence; identical to SEQ ID NO: 48468
  derived and/or modified CDS sequence (wt) from neuraminidase__InfluenzaA__AHG97034

SEQ ID NO: 56418 - RNA, 1410 nt, Artificial Sequence; identical to SEQ ID NO: 48468
  derived and/or modified CDS sequence (wt) from neuraminidase__InfluenzaA__AHG97046

SEQ ID NO: 56419 - RNA, 1410 nt, Artificial Sequence
  derived and/or modified CDS sequence (wt) from neuraminidase__InfluenzaA__AHH00872
augaauccaaaucaaaagauaauaacgauuggcucuguuucucucaccauugccacaauaugcuuccuuaugcaaauugccauccugguaacuacuguaacauugcauuucaagcaauaugaaugcaacccccccccaaacaaccaagugaugcugugugaaccaacaauaauagaaagaaacauaacagagauaguguaucugaccaacaccaccauagagaaggaaauaugccccaaacuagcagaauacagaaauuggucaaagccgcaauguaacauuacaggauuugcaccuuuuucuaaggacaauucgauucggcuuuccgcugguggggacaucugggugacaagagaaccuuacgugucaugcgauccugacaaguguuaucaauuugcccuuggacagggaacaacacuaaacaacgggcauucaaaugacacaguacaugauaggaccccuuaucggacccuauugaugaaugaguuggguguuccauuucauuugggaaccaagcaagugugcauagcaugguccagcucaaguugucacgauggaaaagcauggcugcauguuuguguaacgggggaugaugaaaaugcaacugcuagcuucauuuacaaugggaggcuuguagauaguauugguucaugguccaaaaaaauccucaggacccaggagucggaaugcguuuguaucaauggaacuuguacaguaauaaugacugaugggagugcuucaggaaaagcugauacuaaaauacuauucauugaggaggggaaaaucguucauacuagcccauugucaggaagugcucagcaugucgaggagugcuccuguuauccucgauauccuggugucagaugugucugcagagacaacuggaaaggcuccaauaggcccaucguagauauaaauguaaaggauuauagcauuguuuccaguuaugugugcucaggacuuguuggagacacacccagaaaaaacgacagcuccagcaguagccauugcuuggauccuaacaaugaggaagguggucauggggugaaaggcugggccuuugaugauggaaaugacguguggaugggaagaacgaucagcgagaagucacgcucaggauaugaaaccuucaaagucauugaaggcugguccaaaccuaacuccaaauugcagauaaauaggcaagucauaauugacagagguaauagguccgguuauucugguauuuucucuguugaaggcaaaagcugcaucaaucggugcuuuuauguggaguugauaaggggaaggaaacaggaaacugaagucuuguggaccucaaacaguauuguuguguuuuguggcaccucagguacauauggaacaggcucauggccugauggggcggaccucaaucucaugccuauauaa

SEQ ID NO: 56420 - RNA, 1416 nt, Artificial Sequence
  derived and/or modified CDS sequence (wt) from neuraminidase__InfluenzaA__AHI43497
augaauccaaaucagaaacuauuugcacuauccggaguggcaauagcgcuuaguauacugaacuuauuaauagggaucucaaaugucggauugaacauuucccuacaucugaaaggaaaagggcccaaacaagaggagaauuuaacaugcacgaccauuaaucaaaacaacacuacuguaguagaaaacacauauguaaauaauacaacaauaauuacuaaggagacugacuggaauacaccaagcuaucugcuguugaacaagagccuaugcaauguugaaggcuggguagugauagcaaaagacaacgcaauaagauuuggggaaagugaacaaaucauuguuaccagggagccauauguaucaugcgacccaacaggaugcaagauguaugccuugcaccaggggaccaccauuagaaacaaacauucaaauggaacgauucaugacagaacagcuuucagaggucucaucuccacuccauugggcacuccaccgaccguaaguaacaguggcuuuauguguguuggguggucaagcacgacuugccaugaugggauuggcagaaugacuauuuguauacaaggaaauaaugacaacgccacagcaacgguuuauuauaacggaagacugaccaccaccauuaagaccugggcaagaaacauucugaggacucaagaaucagaaugugugugccacaauggcacaugcgcaguugugaugaccgacggaucggcuaguagucaagccuauacaaaaguaauguauuuccacaagggauuaguaauuaaggaagaggcauuaaggggaucagccaggcacauugaggaaugcuccuguuauggacacagucaaagagugaccuguguguguagagauaacuggcagggagcaaacaggccuauuauagagaucgacaugaacacauuggaacacacaaguagauacguaugcacuggaauccucacagacaccagcagaccuggugacaaaucuaguggugacuguuccaauccaauaacugggagucccggcgcucagggggugaagggauucggguuucuaaauggggauaacacauggcuugguagaaccaucagucccaggucaagaaguggauucgaaauguugaaaauacccaaugcagguacagaucccaauucuagaauagcagaaagacaggaaauugucgacaauaacaauuggucaggcuauucaggaagcuucauugacuauuggaauaauaacagugagugcuacaauccaugcuuuuacguagaguuaauuagaggaagacccgaagaggccaaauacguaugguggacgaguaauagucuaauugcccuauguggaagcccauucccaguuggguccgguuccuuccccgauggggcacaaauccaauacuuuucguaa

SEQ ID NO: 56421 - RNA, 1410 nt, Artificial Sequence
  derived and/or modified CDS sequence (wt) from neuraminidase__InfluenzaA__AHJ57439
augaauccaaaucaaaagauaauaacuauuggcucuguuucucucaucauuuccacaauaugcuucuuuaugcaaguugccaucuuguuaacuacuguaacauugcauuucaagcaauaugaauucaacucccccccaaacaaccaagugaugcugugugaaccaacaauaauagaaagaaacauaacagagauaguguaucugaccaacaccaccauagagaaggaaauaugccccaaaccagcagaauacagaaauuggucaaaaccgcaaugugacauuacaggauuugcaccuuucucuaaggacaauucgauuaggcuuuccgcugguggggacaucugggugacaagagaaccuuaugugucaugcgauccugacaaguguuaucaauuugcccuuggacagggaacaacacuaaacaacgugcauucaaauaacacaguacgugauaggaccccuuaucggacccuauugaugaaugaguuggguguuccuuuucaucuggggaccaagcaagugugcauagcaugguccagcucaaguugucacgauggaaaagcauggcugcauguuuguauaacgggggaugauaaaaaugcaacugcuagcuucauuuacaauggaaggcuuguagauaguguuguuucaugguccaaagauauucucaggacccaggagucagaaugcguuuguaucaauggaacuuguacaguaguaaugacugauggaagugcuucaggaaaagcugauacuaaaauacuauucauugaggaggggaaaaucguucauacuagcacauugucaggaagugcucagcaugucgaggagugcucuugcuauccucgauauccuggugucagaugugucugcagagacaacuggaaaggcuccaauaggcccaucguagauauaaacauaaaggaucauagcauuguuuccaguuauguguguucaggacuuguuggagacacacccagaaaaaacgacagcuccagcaguagccauuguuuggauccuaacaaugaagaagguggucauggagugaaaggcugggccuuugaugauggaaaugacguguggaugggaagaacaaucaacgagacgucacgcuuaggguaugaaaccuucaaagucauugaaggcugguccaacccuaaguccaaauugcagauaaauaggcaaguuauaguugacagagguaauagguccgguuauucugguauuuucucuguugaaggcaaaagcugcaucaaucggugcuuuuauguggaguugauuaggggaagaaaagaggaaacugaagucuuguggaccucaaacaguauuguuguguuuuguggcaccucagguacauauggaacaggcucauggccugauggggcggacaucaaucucaugccuauauaa

SEQ ID NO: 56422 - RNA, 1410 nt, Artificial Sequence
  derived and/or modified CDS sequence (wt) from neuraminidase__InfluenzaA__AHJ57440
augaauccaaaucaaaagauaauaacuauuggcucuguuucucucaucauuuccacaauaugcuucuuuaugcaaauugccaucuugauaacuacuguaacauugcauuucaagcaauaugaauucaacucccccccaaacaaccaaaugaugcugugugaaccaacaauaauagaaagaaacauaacagagauaguguaucugaccaacaccaccauagagaaggaaauaugccccaaaccagcagaauacagaaauuggucaaagccgcaaugugacauuacaggauuugcaccuuucucuaaggacaauucgauuaggcucuccgcugguggggacaucugggugacaagagaaccuuaugugucaugcgauccugauaaguguuaucaauuugcccuuggacagggaacaacacuaaacaacgggcauucaaauaacacaguacgugauaggaccccuuaucggacccuauugaugaaugaguuggguguuccuuuucaucuggggaccaagcaagugugcauagcaugguccagcucaaguugucacgauggaaaagcauggcugcauguuuguauaacgggggaugauaaaaaugcaacugcuagcuucauuuacaaugggaggcuuguagauaguguuguuucaugguccaaagaaauucucaggacccaggagucagaaugcguuuguaucaauggaacuuguacaguaguaaugacugauggaagugcuucaggaaaagcugauacuaaaauauuauucauugaggaggggaaaaucguucauacuagcacauugucaggaagugcucagcaugucgaggagugcucuugcuauccucgauauccuggugucagaugugucugcagagacaacuggaaaggcuccaauaggcccaucguagauauaaacauaaaggaucauagcauuguuuccaguuauguguguucaggacuuguuggagacacacccagaaaaaacgacagcuccagcaguagccauuguuuggauccuaacaaugaagaagguggucauggagugaaaggcugggccuuugaugaugggaaugacguguggaugggaagaacaaucaacgagacgucacgcuuaggguaugaaaccuucaaagucauugaaggcugguccaacccuaaguccaaauugcagauaaauaggcaagucauaguugacagaggugauagguccgguuauucugguauuuucucuguugaaggcaaaagcugcaucaaucggugcuuuuauguggaguugauaaggggaagaaaagaggaaacugaagucuuguggaccucaaacaguauuguuguguuuuguggcaccucagguacauauggaacaggcucauggccugauggggcggacaucaaucucaugccuauauaa

SEQ ID NO: 56423 - RNA, 1410 nt, Artificial Sequence
  derived and/or modified CDS sequence (wt) from neuraminidase__InfluenzaA__AHJ57441
augaauccaaaucaaaagauaauaacuauuggcucuguuucucucaucauuuccacaauaugcuucuuuaugcaaauugccaucuugauaacuacuguaacauugcauuucaagcaauaugaauucaacucccccccaaacaaccaagugaugcugugugaaccaacaauaauagaaagaaacaaaacagagauaguguaucugaccaacaccaccauagagaaggaaauaugccccaaaccagcagaauacagaaauuggucaaagccgcaaugugacauuacaggauuugcaccuuuuucuaaggacaauucgauuaggcuuuccgcugguggggacaucugggugacaagagaacccuaugugucaugcgauccugacaaguguuaucaauuugcccuuggacagggaacaacacuaaacaacgugcauucaaauaacacaguacaugauaggaccccuuaucggacccuauugaugaaugaguuagguguuccuuuucaucuggggaccaagcaagugugcauagcaugguccagcucaaguugucacgauggaaaagcauggcugcauguuuguauaacgggggaugauaaaaaugcaacugcuagcuucauuuacaaugggaggcuuguagauaguguuguuucaugguccaaagaaauucucaggacccaggagucagaaugcguuuguaucaauggaacuuguacaguaguaaugacugauggaagugcuucaggaaaagcugauacuaaaauacuauucauugaggaggggaaaaucguucauacuagcacauugucaggaagugcucagcaugucgaggagugcucuugcuauccucgauauccuggugucagaugugucugcagagacaacuggaaaggauccaaucggcccaucguagauauaaacauaaaggaucauagcauuguuuccaguuauguguguucaggacuuguuggagacacacccagaaaaaacgacagcuccagcaguagccauuguuuggauccuaacaaugaggaagguggucauggggugaaaggcugggccuuugaugauggaaaugacguguggaugggaagaacaaucaacgagacgucacgcuuaggguaugaaaccuucaaagucauugaaggcugguccaacccuaaguccaaauugcagauaaauaggcaagucauaguugacagagguaauagguccgguuauucugguauuuucucuguugaaggcaaaagcugcaucaaucggugcuuuuauguggaguugauaaggggaagaaaagaggaaacugaagucuuguggaccucaaacaguauuguuguguuuuguggcaccucagguacauauggaacaggcucauggccugauggggcggacaucaaucucaugccuauauaa

SEQ ID NO: 56424 - RNA, 1413 nt, Artificial Sequence
  derived and/or modified CDS sequence (wt) from neuraminidase__InfluenzaA__AHJ57654
augaauccaaaucaaaagauaacaugcauuucagcaacaggaaugacacuaucgguaguaagucugcuaauaggaauugccaauuugggccuaaauaucggacuccacuauaaggugagugauucaacaaauauaaacauuccaaacaugaaugagaccagcccaacaacaacaauaauaaacaaucacccucagaauaauuucacaaacaucacuaacauuauaaugaauaagaacgaggaaggaaauuuucucaaccugaccaagccgcuaugugaagucaacucauggcauauucuaucgaaagacaaugcaauaagaauaggugagaacgcucauauacuagucacaagggaaccuuacuuguccugcgacccacaaggaugcaggauguuugcucugagucaaggcacaacacucagagggcgacaugcgaauggaaccauacaugauaggagcccauuccgagcucuuauaaguugggaaaugggucaggcgcccaguccauauaaugcuagggucgagugcauaggauggucaagcacgucaugccacgauggcauaucaaggaugucaauaugcauaucaggaccgaacaacaaugcaucggcaguagugugguacggggggagaccaguaacagagaucccaucaugggcagggaacauucuuaggacucaagaaucggagugcgugugccauggagggauauguccgguggucaugacagaugguccggcaaacaauagggcagaaacuaagauaaucuauuucaaagagggaaagguacagaaaaucgaagaacugaaggggaacgcucaacacaucgaagaguguucauguuauggagcaucagggaugaucaaguguauaugcagggacaauuggaagggggcaaacagaccaguaauaacuauagauccagagaugaugacccacacaagcaaguacuuguguucaaaaaucuuaacugauacaagccgccccaaugaccccaccaaugggaacugcgaugcgccaauaacaggagggagcccagacccugggguaaaaggguuugcauuccuagacggugagaacucauggcuuggaaggacuauuagcaaagacuccagaucaggcuaugaaauguuaaaaauuccaaaugcagagaccgacacucaaucgggggcaaucucacaccagauaauugucaacaaucagaauuggucaggguacucuggggcauucauugacuacugggcaaacaaggaaugcuucaauccuuguuuuuauguggaacuaaucagagggagacccaaagagaguaguguacuguggacuucaaauagcauuguagcucucuguggauccagggagcgauugggaucaugguccuggcaugauggugcugaaaucaucuacuuuaaguag

SEQ ID NO: 56425 - RNA, 1410 nt, Artificial Sequence
  derived and/or modified CDS sequence (wt) from neuraminidase__InfluenzaA__AHJ57666
augaauccaaaucaaaagauaauaacaauuggcucugucucucuaaccauugcgacaguaaguuuccucaugcagauugccauccuaacaacgacugugacacugcauuucaagcacaaugaaugcaauaugcccccgaaaaaccagguaaugucaugugaaccaauuauaauagaaaggaacauaacagagauaguguauuugaauaauacuacuguugaaaaagaaauuuguccaaaaguuguagaauacagaaauuggucgaaaccacaaugcaaaaucacaggguuugcuccuuucuccaaggacaacucaauucgacuuucugcggguggggacauuugggugacaagagaaccuuaugugucaugcggccucgguaaauguuaucaauuugcacuuggacagggaacuacauuggacaacagccauucaaauggcacaauacaugauaggaucccucaucggacucuuuuaaugaaugaguuggguguuccauuucauuugggaaccaaacaaguauguauagcaugguccagcucaaguugucaugaugggagagcaugguuacauauauguaucacaggggaugacagaaaugcgacugcuagcuucauuuaugaugggaugcucguagacagcauugguucuuggucuaaaaacauacucagaacccaggaaucugaauguguuugcaucaaugggacuugugcgguaguaaugacggauggaagugcuucaggaguugcugacacuagaauauuauucaucagagagggaaagauuguccauauaagcccauugucagggagugcucagcacauagaagaauguuccuguuauccccgauauccagacguuagauguguuugcagagacaauuggaagggcucuaauaggccaguuauagauauaaauauggcugauuauagcauugauuccaauuaugugugcucaggacuuguuggcgacacaccaagaaacgaugauaacucuagcagcagcaauugcagggacccuaauaaugagagaggaaauccaggagugaaagggugggcuuucgacgauggaaaugauguuuggaugggaaggacaaucaacagggauucacguucagguuaugagaccuucagagucauuggugguuggaccacugcuaauuccaaaucacagauaaacagacaagucauaguugacaauaacaacugguccgguuauucggguguuuucucugucgaaggcaaaagcugcaucaauagguguuuuuauguggaguuaauaaaaggaaggccgcaggaaccuagaguaugguggacuucaaacaguauuguuguauucugugguacuucagguaccuauggaacaggcucauggccugauggggcgaauaucaauuucaugccgauauaa

SEQ ID NO: 56426 - RNA, 1413 nt, Artificial Sequence
  derived and/or modified CDS sequence (wt) from neuraminidase__InfluenzaA__AHJ57677
augaauccaaaucaaaagauaacaugcauuucagcaacaggaaugacacuaucgguaguaaguaugcuaauaggaauugccaauuugggccuaaauaucggacuccacuauaaggugagugauucaacaaauauaaacauuccaaacaugaaugagaccagcccaacaacaacaguaauaaacaaucacccucagaauaauuucacaaacaucacuaacauuauagugaauaagaacgaggaagaaaauuuucucaaccugaccaagccgcuaugugaagucaacucauggcauauucuaucgaaagacaaugcaauaagaauaggugagaacgcucauauacuagucacaagggaaccuuacuugucaugcgauccacagggcugcaggauguuugcucugagucaaggcacaacacucagagggcaacaugcgaauggaaccauacaugacaggagcccauuccgagcucuuauaaguugggaaaugggucaggcgcccaguccauauaaugcuagggucgagugcauaggauggucaagcacgucaugccacgauggcauaucaaggaugucaauaugcauaucaggaccgaauaacaaugcaucggcaguagugugguacggggggagaccaguaacagagauccccucaugggcagggaacauucuuagaacucaagaaucggagugugugugccauggaggaauauguccaguggucaugacagaugguccggcaaacaauagggcagaaacuaaaauaaucuauuucaaagaaggaaagauacagaaagucgaagaacugaaggggaacgcucaacacaucgaagaguguucauguuauggagcaucagggaugaucaaguguauaugcagggacaauuggaaaggggcaaacagaccagugauaacuauagaucccgagaugaugacccacacaagcaaguacuuguguucaaaaaucuuaaccgauacaagccgccccaaugaccccaccaaugggaacugcgaugcgccaauaacaggagggagcccagacccugggguaaaaggguuugcauuccuagacggugagaacucauggcuuggaaggacuauuagcaaagacuccaggucaggcuaugaaauguuaaaaguuccaaaugcagagaccgacacucaaucgggggcaaucucacaccagaugauugucaacaaccagaauuggucaggguacucuggggcauucauugacuacugggcaaaaaaggaaugcuucaauccuuguuuuuauguggaacuaaucagagggagacccaaagagaguaguguacuguggacuucaaauagcauuguagcucucuguggauccagggagcgauugggaucaugguccuggcaugauggugcugaaaucaucuacuuuaaguag

SEQ ID NO: 56427 - RNA, 1413 nt, Artificial Sequence
  derived and/or modified CDS sequence (wt) from neuraminidase__InfluenzaA__AHJ57689
augaauccaaaucaaaagauaacaugcauuucagcaacaggaaugacacuaucgguaguaaguaugcuaauaggaauugccaauuuaggccuaaauaucggacuccacuauaagguuagugauucaacaaauauaaacauuccaaaaaugaaugagaccagcccaacaacaacaauaauaaacaaucacccucagaauaauuucacaaacaucacuaacauuauaguuaauaaaaacgaggaagaaaauuuucucaaccugaccaagccacuaugugaagucaacucauggcauauucuaucgaaagacaaugcaauaagaauaggugagaacgcucauauacuagucacaagggaaccuuacuuguccugcgauccacagggcugcaggauguuugcucugagucaaggcacaacacucagagggcaacaugcgaauggaaccauacaugacaggagcccauuccgagcucuuauaaguugggaaaugggucaggcgcccaguccguauaaugcuagggucgagugcauaggauggucaagcacgucaugccacgauggcauaucaaggaugucaauaugcauaucaggaccgaauaacaaugcaucggcaguagugugguacggggggagaccaguaacagagauccccucaugggcagggaacauucuuaggacucaagaaucggagugugugugccauggaggaauauguccaguggucaugacagaugguccggcaaacaauagggcagaaacuaagauaaucuauuuuaaagaaggaaagauacagaaaaucgaagaacugaaggggaacgcucaacacaucgaagaguguucauguuauggagcaucagggaugaucaaguguauaugcagggacaauuggaaaggggcaaacagaccaguaauaacuauagauccugagaugaugacccacacaagcaaguacuuguguucaaaaaucuuaaccgauacaagccgccccaaugaccccaccaaugggaacugcgaugcgccaauaacaggagggaguccagacccugggguaaaaggguuugcauuccuagacggugagaacucauggcuuggaaggacuauuagcaaagacuccagaucaggcuaugaaauguuaaaaguuccaaaugcagagaccgacacucaaucgggggcaaucucacaccagauaauugucaacaaccagaauuggucaggguacucuggggcauucauugacuacugggcaaacaaggaaugcuucaauccuuguuuuuauguggaacuaaucagagggagacccaaagagaguaguguacuguggacuucaaauagcauuguagcucucuguggauccagggagcgauugggaucaugguccuggcaugauggugcugagaucaucuacuuuaaguag

SEQ ID NO: 56428 - RNA, 1413 nt, Artificial Sequence
  derived and/or modified CDS sequence (wt) from neuraminidase__InfluenzaA__AHJ57700
augaauccaaaucaaaagauaacaugcauuucagcaacaggaaugacacuaucgguaguaagucugcuaauaggaauugccaauuugggccuaaauaucggacuccacuauaaggugagugauucaacaaauauaaacauuccaaacaugaaugagaccaguccaacaacaacaauaauaaacaaucacccucagaauaauuucacaaauaucacuaacauuauaaugaauaagaacgaggaaggaaauuuucucaaccugaccaagccgcuaugugaagucaacucauggcauauucuaucgaaagacaaugcaauaagaauaggugagaacgcucauauacuagucacaagggaaccuuacuuguccugcgacccacaaggcugcaggauguuugcucugagucaaggcacaacacucagagggcgacaugcgaauggaaccauacaugauaggagcccauuccgagcucuuauaaguugggaaaugggucaggcgcccaguccauauaaugcuagggucgagugcauaggauggucaagcacgucaugccacgauggcauaucaaggaugucaauaugcauaucaggaccgaacaacaaugcaucggcaguagugugguacggggggagaccaguaacagagaucccaucaugggcagggaacauucuuagaacucaagaaucggagugcgugugccauggaggaauauguccgguggucaugacagaugguccggcaaacaauagggcagaaacuaagauaaucuauuucaaagagggaaagguacagaaaaucgaagaacugaaggggaaugcucaacacaucgaagaguguucauguuauggagcaucagggaugaucaaguguauaugcagggacaauuggaagggggcaaacagaccaguaauaacuauagauccagagaugaugacccacacaagcaaguacuuguguucaaaaaucuuaacugauacaagccgccccaaugaccccaccaaugggaacugcgaugcgccaauaacaggagggagcccagacccugggguaaaaggguuugcauuccuagauggugagaacucauggcuuggaaggacuauuagcaaagacuccagaucaggcuaugaaauguuaaaaguuccaaaugcagagaccgacacucaaucgggggcaaucucacaccagauaauugucaacaaucagaauuggucaggguacucuggggcauucauugacuacugggcaaacaaggaaugcuucaauccuuguuuuuauguggaacuaaucagagggagacccaaagagaguaguguacuguggacuucaaauagcauuguagcucucuguggauccagggagcgauugggaucaugguccuggcaugauggugcugaaaucaucuacuuuaaguaa

SEQ ID NO: 56429 - RNA, 1410 nt, Artificial Sequence
  derived and/or modified CDS sequence (wt) from neuraminidase__InfluenzaA__AHJ57710
augaauccaaaucaaaagauaauaacaauuggcucugucucucuaaccauugcgacaguaaguuuccucaugcagauugccauccuaacaacgacugugacacugcauuucaagcacaaugaaugcaauaugcccccgaaaaaccagguaaugucaugugaaccaauuauaauagaaaggaacauaacagagauaguguauuugaauaauacuacuguugaaaaagaaauuuguccaaaaguuguagaauacagaaauuggucgaaaccacaaugcaaaaucacaggguuugcuccuuucuccaaggacaacucaauucgacuuucugcggguggggacauuugggugacaagagaaccuuaugugucaugcggccucgguaaauguuaucaauuugcacuuggacagggaacuacauuggacaacagccauucaaauggcacaauacaugauaggaucccucaucggacucuuuuaaugaaugaguuggguguuccauuucauuugggaaccaaacaaguauguauagcaugguccagcucaaguugucaugaugggagagcaugguuacauauauguaucacaggggaugacagaaaugcgacugcuagcuucauuuaugaugggaugcucguagacagcauuaguucuuggucuaaaaacauacucagaacccaggaaucugaauguguuugcaucaaugggacuugugcgguaguaaugacggauggaagugcuucaggaguugcugacacuagaauauuauucaucagagagggaaagauuguccauauaagcccauugucagggagugcucagcacauagaagaauguucuuguuauccccgauauccagacguuagauguguuugcagagacaauuggaagggcucuaauaggccaguuauaaauauaaauauggcugauuauagcauugauuccaauuaugugugcucaggacuuguuggcgacacaccaagaaacgaugauaacucuagcagcagcaauugcagggacccuaauaaugagagaggaaacccaggagugaaagggugggccuucgacgauggaaaugauguuuggaugggaaggacaaucaacagggauucacguucagguuaugagaccuucagagucauuggugguuggaccacugcuaauuccaaaucacagauaaacaggcaagucauaguugacaauaacaacugguccgguuauucggguguuuucucuguagaaggcaaaagcugcaucaauagguguuuuuauguggaguuaauaagaggaaggccgcaggaaccuagaguaugguggacuucaaacaguauuguuguauucugugguacuucagguaccuauggaacaggcucauggccugauggggcgaauaucaauuucaugccgauauaa

SEQ ID NO: 56430 - RNA, 1410 nt, Artificial Sequence
  derived and/or modified CDS sequence (wt) from neuraminidase__InfluenzaA__AHJ57734
augaauccaaaucaaaagauaauaacaauuggcucugucucucuaaccauugcaacaguaaguuuccucaugcagauugccauccuaacaacgacugugacacugcauuucaagcacaaugaaugcaauaugcccccgaaaaaccagguaaugucaugugaaccaauuauaauagaaaggaacauaacagagauaguguauuugaauaauacuacuguugaaaaagaaauuuguccaaaaguugcagaauacagaaauuggucgaaaccacaaugcaaaaucacaggguuugcuccuuucuccaaggacaacucaauucgacuuucugcggguggggacauuugggugacaagagaaccuuaugugucaugcggccucgguaagugcuaucaauuugcacuuggacagggaacuacauuggacaacagccauucaaauggcacaauacaugauaggaucccucaucggacucuuuuaaugaaugaguuggguguuccauuucauuugggaaccaaacaaguauguauagcaugguccagcucaaguugucaugaugggagagcaugguuacauauauguaucacaggggaugacagaaaugcgacugcuagcuucauuuaugaugggaugcucguagacagcauugguucuuggucuaaaaacauacucagaacccaggaaucugaauguguuugcaucaaugggacuugugcgguaguaaugacggauggaagugcuucaggaguugcugacacuagaauauuauucaucagagagggaaagauuguccauauaagcccauugucagggagugcucagcacauagaagaauguucuuguuauccccgauauccagacguuagauguguuugcagagacaauuggaagggcucuaauaggccaguuauaaauauaaauauggcugauuauagcauugauuccaauuaugugugcucaggacuuguuggcgacacaccaagaaacgaugauaacucuagcagcagcaauugcagggacccuaauaaugagagaggaaacccaggagugaaagggugggccuucgacgauggaaaugauguuuggaugggaaggacaaucaacagggauucacguucagguuaugagaccuucagagucauuggugguuggaccacugcuaauuccaaaucacagauaaacaggcaagucauaguugacaauaacaacugguccgguuauucggguguuuucucuguagaaggcaaaagcugcaucaauagguguuuuuauguggaguuaauaagaggaaggccgcaggaaccuagaguaugguggacuucaaacaguauuguuguauucugugguacuucagguaccuauggaacaggcucauggccugauggggccaauaucaauuucaugccgauauaa

SEQ ID NO: 56431 - RNA, 1380 nt, Artificial Sequence
  derived and/or modified CDS sequence (wt) from neuraminidase__InfluenzaA__AHJ57746
augaauccaaaucagaagauaauaacaauuggcucugucucuauaaccauugcagcaguauguuuccucaugcagauugccauucuggcaacgacugugacacugcacuucaagcaaaaugaaugcaacauacccucgaaaaaccauguaauuccaugugagccaaucauaauagaaaggaacauaacagagguagaaauucguccuaagguagcagaauacagagauuggucgaaaccccaaugccaaauuacagguuuugcuccuuucuccaaagacaacucaauucggcucucugcuggugggaacauuugggugacaagagaaccuuaugugucaugcggcccugauaaauguuaucaauuugcacuugggcagggaacuacauugggcaacggccauucaaauggcacaauacaugauaagaucccucaucgaacccuuuuaaugaaugaauuggguguuccauuucauuugggaaccaaacaaguaugcauagcgugguccagcucaagcugucaugaugggagagcaugguugcauguaugugucacgggggaugacaggaaugcgacagcuagcuucauuuaugaugggaugcucguugacaguauugcuucuuggucccaaaacauucucagaacucaggaaucugaaugcguuugcaucaaugggacguguacaguaguaaugacagaugggagugcuucaggaguugcugauacuagaauacuauucaucagagaaggaaaaauuguacauauaagcccguugucagggagugcccagcacauagaggaguguuccuguuauccccgccauucagacguuagguguguuugcagggacaauuggaaaggcucuaauaggccaguuguagauauaaauaugacagacuauagcauugauuccaguuaugugugcucagggcuuguuggcgacacaccaagaaaugaugauagcucuagcagcagcaauugcagggacccuaauaaugagagagggaauccaggagugaaagggugggccuuugacgauggagaugauguuuggaugggaagaacaaucaguagggauucacguucagguuaugagaccuucagagucauuggcgguuggacuacagccaauuccaaaucacagauaaauaggcaagucauaguugacaauaacaacuggucugguuauucggguguuuucucugucgaaggcaaaagcugcaucaauagguguuuuuauguggaguuaauaagaggaaggccgcaggaaacuagaguaugguggaccucaaacaguauuguuguauucugugguacuucagguaccuauggaacaggcucauggccugauggggcgaauaucaauuucaugccgauauaa

SEQ ID NO: 56432 - RNA, 1410 nt, Artificial Sequence
  derived and/or modified CDS sequence (wt) from neuraminidase__InfluenzaA__AHJ57758
augaauccaaaucaaaagauaauaacaguuggcucugucucucuggccauugcaacaauauguuuacuaaugcagauugccauucuggcaacgacugugacacugcacuucaagcaaaaugaaugcaauauacccucgaaaaaccagguaaugccaugugaaccaaucauaauagagaggaacauaacagagguaguauauuugaauaauacuaucauugaaaaagaaauuuguccuaaaguaguagaauacaggaauuggucgaaaccacaaugccaaaucacaggguucgcuccuuucuccaaagacaacucaauucgacuuucugcugguggggacauuuggguaacaagagaaccuuaugugucaugcagccccaguaaauguuaucaauuugcacuugggcagggaacuacauuggacaacagccauucaaauggcacaauacaugauaggaucccucaucguacccuuuugaugaaugaauuggguguuccauuucauuugggaaccaaacaaguaugcauagcaugguccagcucaagcugucaugaugggagagcaugguuacauguauguaucacgggagaugacagaaaugcgacugccagcuucauuuauaauggaaugcucguugacagcaucaguucuuggucucgaaauauccucagaacccaggaaucugaauguguuugcaucaauggaacuuguacaguaauaaugacagaugggagugcuucaggaguugcugauacuagaauacuauucaucagagaaggaaauauuguccauguaagcccauugucagggagugcucaacacauagaggaauguuccuguuauccccgauauccagacguuagauguguuugcagggacaauuggaaaggcucaaauaggccaguuguagauauaaauauggcagacuauagcauugauucccacuaugugugcucagggcuuguuggugacacgccaagaaaugaugauagcuccagcaguagcaauugcaaggauccuaacaaugagagagggaauccaggagugaaagggugggccuucgaugauggaaaugauguuuggaugggaaggacaaucagcagggauucacguucagguuaugagaccuucagggucauuggugguuggaccacugccaauuccaaaucacagauaaauaggcaagucauaguugacaauaacaacuggucugguuauucggguguuuucucuguugaaggcaagagcugcaucaauaggugcuuuuauguggaguuaauaagaggacggccgcaggaaacuagaguaugguggacuucaaacaguauugucguauucugugguacuucagguaccuauggaacaggcucauggccugauggggcgaauaucaauuucaugccgauauaa

SEQ ID NO: 56433 - RNA, 1401 nt, Artificial Sequence
  derived and/or modified CDS sequence (wt) from neuraminidase__InfluenzaA__AHJ57770
augaauccaaaucagaagauaauagcaauuggcucuguuucucuaaccauugcgauaauaugcuuccucaugcagauugccaucuuaacaacgacuaugacacuacauuucaagcagaaugaaugcagcaacccaucaaauaaucaaguggugccaugugaaccgaucauaauagagaggaacacagugcauuugaauaguacuaccauagagaaggaaaucuguccuaaagugguagaauacaagaauuggucaaaaccacaaugucaaauuacaggguucgcuccuuucucaaaggacaacucaauuaggcuuucugcagguggggauaucuggguaacaagagaaccuuauguuucaugcagucuuggcaaauguuaucaauuugcacuugggcagggaaccacccugaaaaacaagcacucaaauggcaccacacaugauagaauuccucacagaacucuuuuaaugaaugaauuaggugucccauuucauuugggaaccaaacaagugugcauagcauggucuagcucaagcugcuaugauggaaaagcaugguuacauauuuguguuacuggggaugauaaaaaugcuacugcuaguaucauuuaugaugggaugcuuguugacaguauugguucaugguccaaaaacauccucagaacucaggagucagaaugcguuugcaucaauggaacuugugcaguaguaaugacugauggaagugcaucaggaaaggcugacacuagaauauuauucauaagagaggggaaaauuauaaauauuagcccauugucagggagugcucagcacguugaggaaugcuccuguuacccccgguauccugaaguuagguguguuugcagagacaacuggaaggguuccaauaggcccguucuauauauaaauauggcagauuauaguguugaguccaguuaugugugcucaggacuuguuggcgacacaccaagaaaugaugauagcuccagcagcagcaacugcagagacccuaauaacgaaagaggggccccaggagugaaagggugggccuuugacgaugguaaugaugucuggaugggacgaacaaucaaaaaugauucacgcucagguuaugagacuuuuaggguagucaaugguuggaccacggcuaauucaaagucacagauaaauaggcaagucauaguugacagugaaaacuggucuggguauucugguaucuucucuguugaaggcaaaaacugcaucaacagguguuuuuauguggaguugauaagagggagaccacaggagcccagagugugguggacuucaaauagcaucauuguauucuguggaaccucagguacauauggaacaggcucauggccugauggagcgaauaucaacuucuugccuauauaa

SEQ ID NO: 56434 - RNA, 1410 nt, Artificial Sequence
  derived and/or modified CDS sequence (wt) from neuraminidase__InfluenzaA__AHJ57782
augaauccaaaucagaagauaauaauaauuggcucugucucucuaaccauugcaacaguaugcuuccucaugcagauugccauacuggcaacaacugugacacugcacuucaagcaaaacgaaugcaacauacccucgaaaaaccaaguagugccaugugaaccaaucauaauagaaaggaacauaacagagguaguguauuugaauaauacuaccauugaaaaagaaauuuguccugcagugguagaauacagaaauuggucgaaaccacaaugucagaucaaaggguuugcuccuuucucaaaggacaacucaauccggcuuucugcugguggggacaugugggugacaagagaaccuuaugugucaugcagucccaguaaauguuaucaauuugcacuugggcagggaacuacauuggacaacaaucauucaaauggcacaauacaugauagaaucccucaucgaacccuuuuaaugaaugaauuggguguuccauuccacuugggaaccaaacaagugugcauagccugguccagcucgagcugucaugaugggaaggcaugguugcauguguguguaacuggggaugacagaaaugcgacugcuagcuucauuuaugaugggaugcucguugacaguauugguucuuggucccaaaauauccucagaacucaagaaucugagugcguuugcaucaauggaacuuguacaguaguaaugacagaugggagugcuucaggaauugcugauacuagaauauuauuugucagagagggaaagauuguccauauaagcccauugucagggagugcucagcacauagaggaauguuccuguuauccccgcuauccagacguuagauguguuugcagggacaauuggaaaggcucuaauaggccaauuguagauaucaacauggcagacuauagcauugguuccaguuaugugugcucagggcuuguuggcgacacaccaaggaacgaugauagauuuagcagcagcaacugcagggacccuaacagcgagagagggaauccaggagugaaagggugggccuucgacgauggugaugauguuuggaugggaaggacaaucagcagggauucacguucagguuaugagacauucagaguuauuggugguuggacuacugcuaauuccaaaucacagauaaacagacaggucauaguugacaauaauaacuggucugguuauucggguguuuucucugucgaagguaagagcugcauuaauagguguuuuuauguggaguuaauaagaggaaggccacaggagacuagaguaugguggacuucaaacaguauuguaguauucugugguacuucagguaccuauggaacaggcucauggccugauggggcgaauaucaauuucaugccgauauaa

SEQ ID NO: 56435 - RNA, 1410 nt, Artificial Sequence
  derived and/or modified CDS sequence (wt) from neuraminidase__InfluenzaA__AHJ57794
augaauccaaaucaaaagauaauaacaguuggcucugucucucuggccauugcaacaauauguuuccuaaugcagauugccauucuggcaacgacugugacacugcacuucaagcaaaaugaaugcaauauacccucgaaaaaccagguaaugccaugugaaccaaucauaauagagaggaacauaacagagguaguauauuugaauaauacuaucauugaaaaagaaauuuguccuaaaguaguagaauacaggaauuggucgaaaccacaaugccaaaucacaggguucgcuccuuucuccaaagacaacucaauucgacuuucugcugguggggacauuuggguaacaagagaaccuuaugugucaugcagccccaguaaauguuaucaauuugcacuugggcagggaacuacauuggacaacagccauucaaauggcacaauacaugauaggaucccucaucguacccuuuugaugaaugaauuggguguuccauuucauuugggaaccaaacaaguaugcauagcaugguccagcucaagcugucaugaugggagagcaugguuacauguauguaucacgggagaugacagaaaugcgacugccagcuucauuuauaauggaaugcucguugacagcaucaguucuuggucucgaaauauccucagaacccaggaaucugaauguguuugcaucaauggaacuuguacaguaauaaugacagaugggagugcuucaggaguugcugauacuagaauacuauucaucagagaaggaaauauuguccauguaagcccauugucagggagugcucaacacauagaggaauguuccuguuauccccgauauccagacguuagauguguuugcagggacaauuggaaaggcucaaauaggccaguuguagauauaaauauggcagacuauagcauugauucccacuaugugugcucagggcuuguuggugacacgccaagaaaugaugauagcuccagcaguagcaauugcaaggauccuaacaaugagagagggaauccaggagugaaagggugggccuccgaugauggacaugauguuuggaugggaaggacaaucggcagggauucacguucagguuaugagaccuucagggucauuggcgguuggaccacugccaauuccaaaucacagauaaauaggcaagucauaguugacaauaacaacuggucugguuauucggguguuuucucuguugaaggcaagagcugcaucaauaggugcuuuuacguggaguuaauaagaggacggccgcaggaaacuagaguaugguggacuucaaacaguauugucguauucugugguacuucagguaccuauggaacaggcucauggccugauggggcgaauaucaauuucaugccgauauaa

SEQ ID NO: 56436 - RNA, 1413 nt, Artificial Sequence
  derived and/or modified CDS sequence (wt) from neuraminidase__InfluenzaA__AHJ57806
augaauccaaaucaaaagauaacaugcauuucagcaacaggaaugacacuaucgguaguaagucugcuaacaggaauugccaauuugggccuaaauaucggacuacacuauaaggugagugauucaacaaacauaagcauuccaaacaugaaugaggccagcccaacaacaacaauaauaaacaaucacccucagaauaauuucacaaacaucacuaacauuauaaugaauaagaacgaggaaggaaauuuucucaaccugaccaagccgcuaugugaagucaacucauggcauauucuaucgaaagacaaugcaauaagaauaggugagaacgcucauauacuagucacaagggaaccuuacuuguccugcgacccacaaggcugcaggauguuugcucugagucaaggcacaacacucagagggcgacaugcgaauggaaccauacaugauaggagcccauuccgagcucuuauaaguugggaaaugggucaggcgcccaguccauauaaugcuagggucgagugcauaggauggucaagcacgucaugccacgauggcauaucaaggaugucaauaugcauaucaggaccgaacaacaaugcaucggcaguagugugguacggggggagaccaguaacagagaucccaucaugggcagggaacauucuuaggacucaagaaucggagugcgugugccauggaggaauauguccgguggucaugacagaugguccggcgaacaauagggcagaaacuaagauaaucuauuucaaagagggaaagauacagaaaaucgaagaacugaaggggaacgcucaacacaucgaagaguguuccuguuauggagcaucagggaugaucaaguguauaugcagggacaauuggaagggggcaaacagaccaguaauaacuauagauccagagaugaugacccacacaagcaaguauuuguguucaaaaaucuuaacugauacaagccgccccaaugaccccaccaaugggaacugcgaugcgccaauaacaggagggagcccagacccugggguaaaaggguuugcauuccuugacgguaagaacucauggcuuggaaggacuauuagcaaagacuccagaucaggcuaugaaauguuaaaaguuccaaaugcagagaccgacacucaaucgggggcaaucucacaccagauaauugucaacaaucagaauuggucaggguacucuggggcauucauugacuacugggcaaacaaggaaugcuucaauccuuguuuuuauguggaacuaaucagagggagacccaaagagaguaguguacuguggacuucaaauagcauuguagcucucuguggauccagggagcgauugggaucaugguccuggcaugauggugcugaaaucaucuacuuuaaguag

SEQ ID NO: 56437 - RNA, 1380 nt, Artificial Sequence
  derived and/or modified CDS sequence (wt) from neuraminidase__InfluenzaA__AHJ57818
augaauccaaaucaaaagauaacaugcauuucagcaacaggaguaacacuaucgguaguaagccugcuaauaggaaucgccaauuugggccuaaauaucggacuacacuauaaagugagcgauucaccaacuauaaacauuccaaacaugaaugagaccaacccaauaacaacaaacaucacuaacauuauagugaauaagaacgaggaaggaacauuucucaacuugaccaagccgcuaugugaagucaacucauggcacauucuaucgaaagacaaugcaauaagaauaggugaggaugcucauauacuagucacaagggaaccuuacuuguccugugauccacaaggcugcaggauguuugcucugagucaaggcacaacacucagagggcgacaugcgaauggaaccauacaugauaggagcccauuucgagcucuuauaaguugggaaaugggucaggcacccaguccauauaauacuagggucgaaugcauaggauggucaagcacgucaugccaugauggcauaucaaggaugucaauaugcauaucaggaccgaauaacaaugcaucggcaguggugugguacagggggagaccaguaacagaaauuccaucaugggcagggaacauucuuaggacucaagaaucagaaugugugugccauaaaggaaucugcccaguggucaugacagaugguccagcaaacaacaaggcagcaacuaagauaaucuauuucaaagaggggaagauacagaaaauugaagaacugcaggggaacgcucaacacaucgaagaauguucaugcuauggagcagcagggaugaucaaauguguaugcagggacaauuggaagggagcaaauagaccaauaaucacuauagaucccgaaaugaugacccacacaagcaaguacuuguguucaaaaaucuuaaccgacacaagucgucccaaugaccccaccgaugggaacugcgaugcgccaauaacaggagggagcccagacccugggguaaaaggguuugcauuccuagaaggggagaauucauggcuuggaaggacuauuagcaaagacuccaggucaggcuaugaaauguuaaaaguuccaaaugcagagaccgacacucaaucgggggcaaucucacaccagaugauugucaacaaccagaauuggucaggguacucuggggcauucauugacuacugggcaaacaaggaaugcuucaauccuuguuuuuauguggaacuaaucagagggagacccaaagagaguaguguacuguggacuucaaauagcauuguagcucucuguggauccagggagcgauugggaucaugguccuggcaugauggugcugaaaucaucuacuuuaaguag

SEQ ID NO: 56438 - RNA, 1410 nt, Artificial Sequence
  derived and/or modified CDS sequence (wt) from neuraminidase__InfluenzaA__AHJ57830
augaauccaaaucaaaagauaauaacaauuggcucugucucucuaaccauugcaacaguaaguuuccucaugcagauugccauccuaacaacgacugugacacugcauuucaagcacaaugaaugcaauaugcccccgaaaaaccagguaaugucaugugaaccaauuauaauagaaaggaacauaacagagauaguguauuugaauaauacuacuauugaaaaagaaauuuguccaaaaguuguagaauacagaaauuggucgaaaccacaaugcaaaaucacaggguuugcuccuuucuccaaggacaacucaauucgacuuucugcggguggggacauuugggugacaagagaaccuuaugugucaugcggccucggcaaauguuaucaauuugcacuuggacagggaacuacauuggacaacagccauucaaauggcacaauacaugauaggaucccucaucggacucuuuuaaugaaugaguuggguguuccauuucauuugggaaccaaacaaguauguauagcaugguccagcucaagcugucaugaugggagagcaugguuacauauauguaucacaggggaugacagaaaugcgacugccaguuucauuuaugaugggaugcucguagacagcauugguucuuggucuaaaaacauacucagaacccaggaaucugaauguguuugcaucaaugggacuugugcgguaguaaugacggauggaagugcuucaggaguugcugauacuagaauacuauucaucagagagggaaagauuguccauauaagcccauugucagggagugcucagcacauagaagaauguuccuguuauccccgauauccagacguuagauguguuugcagagacaauuggaagggcucuaauaggccaguuauagauauaaauauggcugauuauagcauugauuccaauuaugugugcucaggacuuguuggcgacacaccaagaaacgaugauaacucuagcagcagcaauugcagggacccuaauaaugagagaggaaauccaggagugaaagggugggccuuugacgauggaaaugauguuuggaugggaaggacaaucaacagagauucacguucagguuaugagaccuucagagucauuggugguuggaccacugcuaauuccaaaucacagauaaacaggcaagucauaguugacaauaacaacugguccgguuauucggguguuuucucugucgaaggcaaaagcugcaucaauagguguuuuuauguggaguuaauaagaggaaggccgcaggaaccuagaguaugguggacuucaaacaguauuguuguauucugugguacuucagguaccuauggaacaggcucauggccugauggggcgaauaucaauuucaugccgauauaa

SEQ ID NO: 56439 - RNA, 1413 nt, Artificial Sequence
  derived and/or modified CDS sequence (wt) from neuraminidase__InfluenzaA__AHJ57842
augaauccaaaucaaaagauaacaugcauuucagcaacaggaaugacacuaucgguaguaaguaugcuaauaggaauugccaauuuaggccuaaauaucggacuccacuauaaggugagugauucaacaaauauaaacauuccaaaaaugaaugagaccaacccaacaacaacaauaauaaacaaucacccucagaauaauuucacaaacaucacuaacauuauaguuaauaaaaacgaggaagaaaauuuucucaaccugaccaagccacuaugugaagucaacucauggcauauucuaucgaaagacaaugcaauaagaauaggugagaacgcucauauacuagucacaagggaaccuuacuuguccugcgauccacagggcugcaggauguuugcucugagucaaggcacaacaaucagagggcaacaugcgaauggaaccauacaugacaggagcccauuccgagcucuuauaaguugggaaaugggucaggcgcccaguccauauaaugcuagggucgagugcauaggauggucaagcacgucaugccacgauggcauaucaaggaugucaauaugcauaucaggaccgaauaacaaugcaucggcaguagugugguacggggggagaccaguaacagagauccccucaugggcagggaacauucuuaggacucaagaaucggagugugugugccauggaggaauauguccaguggucaugacagaugguccggcaaacaauagggcagaaacuaagauaaucuauuuuaaagaaggaaagauacagaaaaucgaagaacugaaggggaacgcucaacacaucgaagaguguucauguuauggagcaucagggaugaucaaguguauaugcagggacaauuggaaaggggcaaacagaccaguaauaacuauagauccugagaugaugacccacacaagcaaguacuuguguucaaaaauuuuaaccgauacaagccgccccaaugaccccaccaaugggaacugcgaugcgccaauaacaggagggaguucagacccugggguaaaaggguuugcauuccuagacggugagaacucauggcuuggaaggacuauuagcaaagacuccaggucaggcuaugaaauguuaaaaguuccaaaugcagagaccgacacucaaucgggggcaaucucacaccagauaauugucaacaaccagaauuggucaggguacucuggggcauucauugacuacugggcaaacaaggaaugcuucaauccuuguuuuuauguggaacuaaucagagggagacccaaagagaguaguguacuguggacuucaaauagcauuguagcucucuguggauccagggagcgauugggaucaugguccuggcaugauggugcugagaucaucuacuuuaaguag

SEQ ID NO: 56440 - RNA, 1413 nt, Artificial Sequence
  derived and/or modified CDS sequence (wt) from neuraminidase__InfluenzaA__AHJ57853
augaauccaaaucaaaagauaacaugcauuucagcaacaggaaugacacuaucgguaguaagucugcuaauaggaauugccaauuugggccuaaaugucggacuccacuauaaggugaaugauccaacaaauauaaacauuccaaacaugaaugagaccagcccaacaacaacaauaauaaacaaucacccucagaauaauuucacaaacaucacuaacauuauagugaauaagaacgaggaagaaaauuuucucaaccugaccaagccgcuaugugaagucaacucauggcauauucuaucgaaagacaaugcaauaagaauaggugagaacgcucauauacuagucacaagggaaccuuacuuguccugcgauccacagggcugcaggauguuugcucugagucaaggcacaacacucagagggcaacaugcgaauggaaccauacaugacaggagcccauuccgagcucuuauaaguugggaaaugggucaggcgcccaguccauauaaugcuagggucgagugcauaggauggucaagcacgucaugccacgauggcauaucaaggaugucaauaugcauaucaggaccgaauaacaaugcaucggcaguggugugguacggggggagaccaguaacagagauccccucaugggcagggaacauucuuaggacucaagaaucggagugugugugccauggaggaauauguccaguggucaugacagaugguccggcaaacaauagggcagaaacuaagauaaucuauuucaaagaaggaaagauacagaaaaucgaagaacugaaggggaacgcucaacacaucgaagaguguucauguuauggagcaucagggaugaucaaguguauaugcagggacaauuggaaaggggcaaacaggccaguaauaacuauagaucccgagaugaugacccacacaagcaaguauuuguguucaaaaaucuuaaccgauacaagccgccccaaugaccccaccaaugggaacugcgaugcgccaauaacaggagggagcccagacccugggguaaaaggguuugcauuccuagacggugagaacucauggcuuggaaggacuauuagcaaagacuccagaucaggcuaugaaauguuaaaaguuccaaaugcagagaccgacacucaaucgggggcaaucucacaccagaugauugucaacaaccagaauuggucaggguacucuggggcauucauugacuacugggcaaacaaggaaugcuucaauccuuguuuuuauguggaacuaaucagagggagacccaaagagaguaguguacuguggacuucaaauagcauuguagcucucuguggauccagggagcgauugggaucaugguccuggcaugauggugcugaaaucaucuacuuuaaguag

SEQ ID NO: 56441 - RNA, 1413 nt, Artificial Sequence
  derived and/or modified CDS sequence (wt) from neuraminidase__InfluenzaA__AHJ57865
augaauccaaaucaaaagauaacaugcauuucagcaacaggaaugacacuaucgguaguaaguaugcuaauaggaauugccaauuuaggccuaaauaucggacuccacuauaaggugagugauucaacaaauauaaacauuccaaaaaugaaugagaccaacccaacaacaacaauaauaaacaaucacccucagaauaauuucacaaacaucacuaacauuauaguuaauaaaaacgaggaagaaaauuuucucaaccugaccaagccacuaugugaagucaacucauggcauauucuaucgaaagacaaugcaauaagaauaggugagaacgcucauauacuagucacaagggaaccuuacuuguccugcgauccacagggcugcaggauguuugcucugagucaaggcacaacacucagagggcgacaugcgaauggaaccauacaugacaggagcccauuccgagcucuuauaaguugggaaaugggucaggcgcccaguccauauaaugcuagggucgagugcauaggauggucaagcacgucaugccacgauggcauaucaaggaugucaauaugcauaucaggaccgaauaacaaugcaucggcaguagugugguacggggggagaccaguaacagagauccccucaugggcagggaacauucuuaggacucaagaaucggagugugugugccauggaggaauauguccaguggucaugacagaugguccggcaaacaauagggcagaaacuaagauaaucuauuucaaagaaggaaagauacagaaaaucgaagaacugaaggggaacgcucaacacaucgaagaguguucauguuauggagcaucagggaugaucaaguguauaugcagggacaauuggaaaggggcaaacagaccaguaauaacuauagauccugagaugaugacccacacaagcaaguacuuguguucaaaaaucuuaaccgauacaagccgccccaaugaccccaccaaugggaacugcgaugcgccaauaacaggagggaguccagacccugggguaaaaggguuugcauuccuagacggugagaacucauggcuuggaaggacuauuagcaaagacuccagaucaggcuaugaaauguuaaaaguuccaaaugcagagaccgacacucaaucgggggcaaucucacaccagaugauugucaacaaccagaauuggucaggguacucuggggcauucauugacuacugggcaaacaaggaaugcuucaauccuuguuuuuauguggaacuaaucagagggagacccaaagagaguaguguacuguggacuucaaauagcauuguagcucucuguggauccagggagcgauugggaucaugguccuggcaugauggugcugagaucaucuacuuuaaguag

SEQ ID NO: 56442 - RNA, 1413 nt, Artificial Sequence
  derived and/or modified CDS sequence (wt) from neuraminidase__InfluenzaA__AHJ57876
augaauccaaaucaaaagauaacaugcauuucagcaacaggaaugacacuaucgguaguaagucugcuaauaggaauugccaauuugggccuaaauaucggacuccacuauaaggugagugauucaacaaauauaaacauuccaaacaugaaugagaccaguccaacaacaacaauaauaaacaaucacccucagaauaauuucacaaacaucacuaacauuauaaugaauaagaacgaggaaggaaauuuucucaaccugaccaagccgcuaugugaagucaacucauggcauauucuaucgaaagacaaugcaauaagaauaggugagaacgcucauauacuagucacaagggaaccuuacuuguccugcgacccacaaggcugcaggauguuugcucugagucaaggcacaacacucagagggcgacaugcaaauggaaccauacaugauaggagcccauuccgagcucuuauaaguugggaaaugggucaggcgcccaguccauauaaugcuagggucgagugcauaggauggucaagcacgucaugccacgauggaaaaucaaggaugucaauaugcauaucaggaccgaacaacaaugcaucggcaguagugugguacggggggagaccaauaacagagaucccaucaugggcagggaacauucuuagaacucaagaaucggagugcgugugccauggaggaauauguccgguggucaugacagaugguccggcaaacaauagggcagaaacuaagauaaucuauuucaaagagggaaagguacagaaaaucgaagaacugaaggggaacgcucaacacaucgaagaguguucauguuauggagcaucagggaugaucaaguguauaugcagggacaauuggaagggagcaaacagaccaguaauaacuauagauccagagaugaugacccacacaagcaaguacuuguguucaaaaaucuuaacugauacaagccgccccaaugaccccaccaaugggaacugcgaugcgccaauaacaggagggagcccagacccugggguaaaaggguuugcauuccuagacggugagaacucauggcuuggaaggacuauuagcaaagacuccagaucaggcuaugaaauguuaaaaguuccaaaugcagagaccgacacucaaucgggggcaaucucacaccagauaauugucaauaaucagaauuggucaggguacucuggggcauucauugacuacugggcaaacaaggaaugcuucaauccuuguuuuuauguggaacuaaucagagggagacccaaagagaguaguguacuguggacuucaaauagcauuguagcucucuguggauccagggagcgauugggaucaugguccuggcaugauggugcugaaaucaucuacuuuaaguaa

SEQ ID NO: 56443 - RNA, 1413 nt, Artificial Sequence
  derived and/or modified CDS sequence (wt) from neuraminidase__InfluenzaA__AHJ57888
augaauccaaaucaaaagauaacaugcauuucagcaacaggaaugacacuaucgguaguaaguaugcuaauaggaauugccaauuugggccuaaauaucggacuccacuauaaggugagugauucaacaaauauaaacauuccaaacaugaaugagaccagcccaacaacaacaauaacaaacaaucacccucagaauaauuucacaaacaucacuaacauuauagugaguaagaacgaggaagaaaauuuucucaaccugaccaagccgcuaugugaagucaacucauggcauauucuaucgaaagacaaugcaauaagaauaggugagaaugcucauauacuagucacaagggaaccuuacuuguccugcgauccacagggcugcaggauguuugcucugagucaaggcacaacacucagagggcaacaugcgaauggaaccauacaugacaggagcccauuccgagcucuuauaaguugggaaaugggucaggcgcccaguccauauaaugcuagggucgagugcauaggauggucaagcacgucaugccaugauggcauaucaaggaugucaauaugcauaucaggaccgaauaacaaugcaucggcaguagugugguauggggggagaccaguaacagagauccccucaugggcagggaacauucuuaggacucaagaaucggagugugugugccauggaggaauauguccaguggucaugacagaugguccggcaaacaauagggcagaaacuaaaauaaucuauuucaaagaaggaaagauacagaaaaucgaagaacugaaggggaacgcucaacacaucgaagaguguucauguuauggagcaucagggaugaucaaguguauaugcagggacaauuggaaaggggcaaacagaccaguaauaacuauagaucccgagaugaugacccacacaagcaaguacuuguguucaaaaaucuuaaccgauacaagccgccccaaugaccccaccaaugggaacugcgaugcgccaauaacaggagggagcccagacccugggguaaaaggguuugcauuccuagacggugagaacucauggcuuggaaggacuauuagcaaagacuccaggucaggcuaugaaauguuaaaaguuccaaaugcagagaccgacacucaaucgggggcaaucucacaccagaugauugucaacaaccagaauuggucaggguacucuggggcauucauugacuacugggcaaacaaggaaugcuucaauccuuguuuuuauguggaacuaaucagagggagacccaaagagaguaguguacuguggacuucaaauagcauuguagcucucuguggauccagggagcgauugggaucaugguccuggcaugauggugcugaaaucaucuacuuuaaguag

SEQ ID NO: 56444 - RNA, 1413 nt, Artificial Sequence
  derived and/or modified CDS sequence (wt) from neuraminidase__InfluenzaA__AHJ57900
augaauccaaaucaaaagauaacaugcauuucagcaacuggaaugacacuaucgguaguaagucugcuaauaggaauugccaauuugggccuaaauaucggacuccacuauaaggugagugauucaacaaauauaaacauuccaaacaugaaugagaccagcccaacagcaacaauaauaaacaaucacccucagaauaauuucacaaacaucacuaacauuauagugaauaagaacgaggaagaaaauuucuucaaccuggccaagccgcuaugugaagucaacucauggcauauucuaucgaaagacaaugcaauaagaauaggugagaacgcucauauacuagucacaagggaaccuuacuuguccugcgauccacagggcugcaggauguuugcucugagucaaggcacaacacucagagggcaacaugcgaauggaaccauacaugacaggagcccauuccgagcccuuauaaguugggaaaugggucaggcgcccaguccauauaaugcuagggucgagugcauaggauggucaagcacgucaugccacgauggcauaucaaggaugucaauaugcauaucaggaccgaauaacaaugcaucggcaguagugugguacggggggagaccaguaacagagauacccucaugggcagggaacauucuuaggacucaagaaucggagugugugugccauggaggaauauguccaguggucaugacagaugguccagcaaacaauagggcagaaacuaagauaaucuauuucaaagaaggaaagauacagaaaaucgaagaccugaaggggaacgcucaacacaucgaagaguguucauguuauggagcaucagggaugaucaaguguauaugcagggacaauuggaaaggggcaaacagaccaguaauaacuauagaucccgagaugaugacccacacaagcaaguacuuguguucaaaaaucuuaaccgauacaagccgccccaaugaccccaccaaugggaacugcgaugcgccaauaacaggagggagcccagacccugggguaaaaggguuugcauuccuagacggugagaacucauggcuuggaaggacuauuagcaaagacuccaggucaggcuaugaaauguuaaaaguuccaaaugcagagaccgacacucaaucgggggcaaucucacaccagaugauugucaacaaccagaauuggucaggguacucuggggcauucauugacuacugggcaaacaaggaaugcuucaauccuuguuuuuauguggaacuaaucagagggagacccaaagagaguaguguacuguggacuucaaauagcauuguagcucucuguggauccagggagcgauugggaucaugguccuggcaugauggugcugaaaucaucuacuuuaaguag

SEQ ID NO: 56445 - RNA, 1413 nt, Artificial Sequence
  derived and/or modified CDS sequence (wt) from neuraminidase__InfluenzaA__AHJ57911
augaauccaaaucaaaagauaacaugcauuucagcaacaggagugacacuaucgguaguaagccugcuaauaggaauugccaauuugggccuaaauaucggacuccacuauaaggugagugauucaucaaauauaaacauuccaaacaugaaugagacaaacccaacaacaacuauaauaaacaaucauacucagaauaauuucaaaaacaucacuaacauuauagugaauaagaacgaggaaggaauauuucucaaccugaccaagccgcuaugugaagucaacucauggcauauucuaucgaaagacaaugcaauaagaauaggugaggaugcucauauacuagucacaagggaaccuuacuuauccugugauccgcaaggcugcaggauguuugcucugagucaaggcacaacacucagagggcgacaugcgaauggaaccauacaugauaggagcccauuccgagcucuuauaaguugggagaugggucaggcacccaguccauacaaugcuagggucgaaugcauaggauggucaagcacgucaugccacgaugguauaucaaggaugucaauauguauaucaggaccaaauaacaaugcaucagcaguggugugguacagggggagaccaguaacagaaauuccaucaugggcagggaacauccuuaggacucaagaaucggaaugugugugccauaaaggaaucugcccaguagucaugacagaugguccagcaaacaauagggcagcaacuaagauaaucuauuucaaagagggaaagauacagaaaaucgaagaacugaaagggaaugcucagcacaucgaagaauguuccugcuauggcgcagcagggaugaucaaauguauaugcagggacaauuggagaggggcaaauagaccaguaaucacuauagauccugagaugaugacccacacaagcaaguacuuguguucaaaaaucuuaacagauacaagucgccccaaugaccccaccaacgggaacugcgaugcgccaauaacaggagggagcccagacccugggguaaaaggguuugcauuccuagacggggagaacucauggcuuggaaggacaauuagcaaagacuccaggucaggcuacgaaauguuaaaagucccaaaugcagagaccgacacucaaucggggucaaccucauaccagauaauugucaacaaccaaaauuggucaggguacucaggggcauucauagacuacugggcaaacaaggaaugcuucaauccuuguuuuuauguggaacuaaucagagggagacccaaagagaguaguguacuguggacuucaaauagcauuguggcucucuguggauccagggagcgauugggaucaugguccuggcaugauggugcugaaaucaucuacuuuaaguag

SEQ ID NO: 56446 - RNA, 1410 nt, Artificial Sequence
  derived and/or modified CDS sequence (wt) from neuraminidase__InfluenzaA__AHJ57923
augaauccaaaucaaaagauaauaacaguuggcucugucucucuggccauugcaacaauauguuuccuaaugcagauugccauucuggcaacgacugugacacugcacuucaagcaaaaugaaugcaauauacccucgaaaaaccagguaaugccaugugaaccaaucauaauagagaggaacauaacagagguaguauauuugaauaauacuaucauugaaaaagaaauuuguccuaaaguaguagaauacaggaauuggucgaaaccacaaugccaaaucacaggguucgcuccuuucuccaaagacaacucaauucgacuuucugcugguggggacauuuggguaacaagagaaccuuaugugucaugcagccccaguaaauguuaucaauuugcacuugggcagggaacuacauuggacaacagccauucaaauggcacaauacaugauaggaucccucaucguacccuuuugaugaaugaauuggguguuccauuucauuugggaaccaaacaaguaugcauagcaugguccagcucaagcugucaugaugggagagcaugguuacauguauguaucacgggagaugacagaaaugcgacugccagcuucauuuauaauggaaugcucguugacagcaucaguucuuggucucgaaauauccucagaacccaggaaucugaauguguuugcaucaauggaacuuguacaguaauaaugacagaugggagugcuucaggaguugcugauacuagaauacuauucaucagagaaggaaagauuguccauguaagcccauugucagggagugcucaacacauagaggaauguuccuguuauccccgauauccagacguuagauguguuugcagggacaauuggaaaggcucaaauaggccaguuguagauauaaauauggcagacuauagcauugauucccacuaugugugcucagggcuuguuggugacacgccaagaaaugaugauagcuccagcaguagcaauugcaaggauccuaacaaugagagagggaauccaggagugaaagggugggccuucgaugauggaaaugauguuuggaugggaaggacaaucagcagggauucacguucagguuaugagaccuucagggucauuggugguuggaccacugccaauuccaaaucacagauaaauaggcaagucauaguugacaauaacaacuggucugguuauucggguguuuucucuguugaaggcaagagcugcaucaauaggugcuuuuacguggaguuaauaagaggacggccgcaggaaacuagaguaugguggacuucaaacaguauugucguauucugugguacuucagguaccuauggaacaggcucauggccugauggggcgaauaucaauuucaugccgauauaa

SEQ ID NO: 56447 - RNA, 1380 nt, Artificial Sequence
  derived and/or modified CDS sequence (wt) from neuraminidase__InfluenzaA__AHJ57935
augaauccaaaucaaaagauaacaugcauuucagcaacaggaguaacacuaucgguaguaagccugcuaauaggaaucgccaauuugggccuaaauaucggacuacacuauaaagugagugauucaccaacuauaaacauuccaaacaugaaugagaccaacccaacaacaacaaacaucacuaacauuauagugaauaagaacgaggaaggaacauuucucaacuugaccaagccgcuaugugaagucaacucauggcacauucuaucgaaagacaaugcaauaagaauaggugaggaugcucauauacuagucacaagggaaccuuacuuguccugugauccacaaggcugcaggauguuugcucugagucaaggcacaacacucagagggcgacaugcgaauggaaccauacaugauaggagcccauuucgagcucuuauaaguugggaaaugggucaggcacccaguccauauaauacuagggucgaaugcauaggauggucaagcacgucaugccaugauggcauaucaaggaugucaauaugcauaucaggaccgaauaacaaugcaucggcaguggugugguacagggggagaccaguaacagaaauuccaucaugggcagggaacauucuuaggacucaagaaucagaaugugugugccauaaaggaaucugcccaguggucaugacagaugguccagcaaacaacaaggcagcaacuaagauaaucuauuucaaagaggggaagauacagaaaauugaagaacugcaggggaacgcucaacacaucgaagaauguucaugcuauggagcagcagggaugaucaaauguguaugcagggacaauuggaagggagcaaauagaccaauaaucacuauagaucccgaaaugaugacccacacaagcaaguacuuguguucaaaaaucuuaaccgacacaagucgucccaaugaccccaccaaugggaacugcgaugcgccaauaacaggagggagcccagacccugggguaaaaggguuugcauuccuagacggggagaauucauggcuuggaaggacaauuagcaaagacuccagaucaggcuacgaaauguuaaaagucccaaaugcacagaccgacacucaaucagggccaaccucauaccagcuaauugucaacaaccaaaauuggucaggguacucaggggcauucauagacuacugggcaaacaaggaaugcuucaauccuuguuuuuauguggaacuaaucagagggagacccaaagagaguaauguacuguggacuucaaauagcaugguagcucucuguggauccagggagcgauugggaucaugguccuggcaugaugaugcagaaaucaucuacuuuaaguag

SEQ ID NO: 56448 - RNA, 1410 nt, Artificial Sequence
  derived and/or modified CDS sequence (wt) from neuraminidase__InfluenzaA__AHJ57946
augaauccaaaucaaaagauaauaacaauuggcucugucucucuaaccauugcaacaguaaguuuccucaugcagauugccauccuaacaacgacugugacacugcauuucaagcacaaugaaugcaauaugcccccgaaaaaccagguaaugucaugugaaccaauuauaauagaaaggaacauaacagagauaguguauuugaauaauacuacuguugaaaaagaaauuuguccaaaaguuguagaauacagaaauuggucgaaaccacaaugcaaaaucacaggguuugcuccuuucuccaaggacaacucaauucgacuuucugcggguggggacauuugggugacaagagaaccuuaugugucaugcggccucgguaaauguuaucaauuugcacuuggacagggaacuacauuggacaacagccauucaaauggcacaauacaugauaggaucccucaucggacucuuuuaaugaaugaguuggguguuccauuucauuugggaaccaaacaaguauguauagcaugguccagcucaaguugucaugaugggagagcaugguuacauauauguaucacaggggaugacagaaaugcgacugcuagcuucauuuaugaugggaugcucguagacagcauugguucuuggucuaaaaacauacucagaacccaggaaucugaauguguuugcaucaaugggacuugugcgguaguaaugacggauggaagugcuucaggaguugcugacacuagaauauuauucaucagagagggaaagauuguccauauaagcccauugucagggagugcucagcacauagaagaauguuccuguuauccccgauauccagacguuagauguguuugcagagacaauuggaagggcucuaauaggccaguuauagauauaaauauggcugauuauagcauugauucccauuaugugugcucagggcuuguuggcgacacaccaagaaacgaugauaacucuagcagcagcaauugcagggacccuaauaaugagagagggaauccaggagugaaagggugggccuucgacgauggaaaugauguuuggaugggaaggacaaucaacagggauucacguucagguuaugagaccuucagagucauuggugguuggaccacugcuaauuccaaaucacagauaaacagacaagucauaguugacaauaacaacugguccgguuauucggguguuuucucugucgaaggcaaaagcugcaucaauagguguuuuuauguggaguuaauaagaggaaggccgcaggaaccuagaguaugguggacuucaaacaguauuguuguauucugugguacuucagguaccuauggaacaggcucauggccugauggggcgaauaucaauuucaugccgauauaa

SEQ ID NO: 56449 - RNA, 1410 nt, Artificial Sequence
  derived and/or modified CDS sequence (wt) from neuraminidase__InfluenzaA__AHJ57957
augaauccaaaucaaaagauaauaacaauuggcucugucucucuaaccauugcgacaguaaguuuccucaugcagauugccauccuaacaacgacugugacacugcauuucaagcaaaaugaaugcaauaugcccccgaaaaaccagguaaugucaugugaaccaauuauaauagaaaggaacauaacagagauaguauauuugaauaauacuacuguugaaaaagaaauuuguccaaaaguuguagaauacagaaauuggucgaaaccacaaugcaaaaucacaggguuugcuccuuucuccaaggacaacucaauucgacuuucugcggguggggacauuugggugacaagagaaccuuaugugucaugcggccucgguaaauguuaucaauuugcacuuggacagggaacuacauuggacaacagccauucaaauggcacaauacaugauaggaucccucaucggacucuuuuaaugaaugaguuggguguuccauuucauuugggaaccaaacaaguauguauagcaugguccagcucaagcugucaugaugggagagcaugguuacauauauguaucacaggggaugacagaaaugcgacugcuagcuucauuuaugaugggaugcucguagacagcauugguucuuggucuaaaaauauacucagaacccaggaaucugaaugugucugcaucaauggaacuugugcgguaguaaugacggauggaagugcuucaggaguugcugacacuagaauauuauucaucagagagggaaagauuguccauauaagcccauugucagggagugcucagcacauagaagaauguuccuguuauccccgauauccagacguuagauguguuugcagagacaauuggaagggcucuaauaggccaguuauagauauaaauauggcugauuauagcauugauuccaauuaugugugcucaggacuuguuggcgacacaccaagaaacgaugauaacucuagcagcagcaauugcagggacccuaauaaugagagaggaaauccaggagugaaagggugggcuuucgacuauggaaaugauguuuggaugggaaggacaaucaacagggauucacguucagguuaugagaccuucagagucauuggugguuggaccacugcuaauuccaaaucacagauaaacagacaagucauaguugacaauaacaacugguccgguuauucggguguuuucucugucgaaggcaaaagcugcaucaauagguguuuuuauguggaguuaauaagaggaaggccgcaggaaccuagaguaugguggacuucaaacaguauuguuguauucugugguacuucagguaccuauggaacaggcucauggccugauggggcgaauaucaauuucaugccgauauaa

SEQ ID NO: 56450 - RNA, 1410 nt, Artificial Sequence
  derived and/or modified CDS sequence (wt) from neuraminidase__InfluenzaA__AHJ57968
augaauccaaaucaaaagauaauaacaguuggcucugucucucuggccauugcaacaauauguuuacuaaugcagauugccauucuggcaacgacugugacacugcacuucaagcaaaaugaaugcaauauacccucgaaaaaccagguaaugccaugugaaccaaucauaauagagaggaacauaacagagguaguauauuugaauaauacuaucauugaaaaagaaauuuguccuaaaguaguagaauacaggaauuggucgaaaccacaaugccaaaucacaggguucgcuccuuucuccaaagacaacucaauucgacuuucugcugguggggacauuuggguaacaagagaaccuuaugugucaugcagccccaguaaauguuaucaauuugcacuugggcagggaacuacauuggacaacagccauucaaauggcacaauacaugauaggaucccucaucguacccuuuugaugaaugaauuggguguuccauuucauuugggaaccaaacaaguaugcauagcaugguccagcucaagcugucaugaugggagagcaugguuacauguauguaucacgggagaugacagaaaugcgacugccagcuucauuuauaauggaaugcucguugacagcaucaguucuuggucucgaaauauccucagaacccaggaaucugaauguguuugcaucaauggaacuuguacaguaauaaugacagaugggagugcuucaggaguugcugauacuagaauacuauucaucagagagggaaagauuguccauauaagcccauugucagggagugcucagcacauagaagaauguuccuguuauccccgauauccagacguuagauguguuugcagagacaauuggaagggcucuaauaggccaguuauagauauaaauauggcugauuauagcauugauuccaauuaugugugcucaggacuuguuggcgacacaccaagaaacgaugauaacucuagcagcagcaauugcagggacccuaauaaugagagaggaaauccaggagugaaagggugggccuucgacgauggaaaugauguuuggaugggaaggacaaucaacagggauucacguucagguuaugagaccuucagggucauuggugguuggaccacugccaauuccaaaucacagauaaauaggcaagucauaguugacaauaacaacuggucugguuauucggguguuuucucuguugaaggcaagagcugcaucaauaggugcuuuuacguggaguuaauaagaggacggccgcaggaaacuagaguaugguggacuucaaacaguauugucguauucugugguacuucauguaccuauggaacaggcucauggccugauggggcgaauaucaauuucaugccgauauaa

SEQ ID NO: 56451 - RNA, 1413 nt, Artificial Sequence
  derived and/or modified CDS sequence (wt) from neuraminidase__InfluenzaA__AHJ57980
augaauccaaaucaaaagaauacaugcauuucagcaauaggaaugacacuaucgguaguaagccugcuaauaggaguugccgauuugggccuaaauaucggacuccacuauaaggugagugauucaucaaauauaaacauuccaaacaugaaugagaccaacccaacaacaacaauaauaaacaauaacccucagaauaauuucacaaacaucacuaacaucauagugaauaagaacgaggaagaaaaguuucucaaccugaccaagccgcuaugugaggucaacucauggcauauucuaucgaaagacaaugcaauaagaauaggugaggacgcucauauacuagucacaagggaaccuuacuuguccugcgauccacaaggcugcaggauguuugcucugagucaaggcacaacacucagagggagacaugcgaauggaaccauacaugauaggagcccauuccgagcucuuauaaguugggaaaugggucaggcgcccaguccauauaaugcuagggucgaaugcauaggauggucaagcacgucaugccacgauggcauaucaaggaugucaauaugcauaucaggaccgaauaacaaugcaucggcaguggugugguacggggggagaccaguaacagaaaucccaucaugggcagggaacauucuuaggacucaagaaucagaaugugugugccauaaaggaaucugcccaguggucaugacagauggcccagcaaacaauagggcagcaacuaagauaauuuauuucaaagagggaaagauacagaaaaucgaagaacugaaggggaacgcucaacacaucgaggaguguucguguuauggagcagcagggaugaucaaauguauaugcagggacaauuggaagggggcaaacagaccaguaaucacuauagauccugagaugaugacccacacaagcaaguacuuguguucaaaaaucuuaaccgacacaagucgccccaaugaccccaccagugggaacugcgaugcgccaauaacaggagggagcccagacccugggguaaaaggguuugcauuccuagacggugagaacucauggcuuggaaggacuauuagcaaagacuccaggucaggcuaugaaauguuaaaaguuccaaaugcagagaccgacacucaaucggggccaaucucauaccagacgauugucaacaaccagaauuggucaggguacucaggggcauucauugacuacugggcaaacaaggaaugcuucaauccuuguuuuuauguggaacuaaucagagggagacccaaagagaguaguguacuguggacuucaaauagcauuguagcucucuguggauccagggagcgauugggaucaugguccuggcaugauggugcugagaucaucuacuuuaaguag

SEQ ID NO: 56452 - RNA, 1410 nt, Artificial Sequence
  derived and/or modified CDS sequence (wt) from neuraminidase__InfluenzaA__AHJ57992
augaauccaaaucaaaagauaauaacaauuggcucugucucucuaaccauugcgacaguaaguuuccucaugcagauugccauccuaacaacgacugugacacugcauuucaagcacaaugaaugcaauaugcccccgaaaaaccagguaaugucaugugaaccaauuauaauagaaaggaacauaacagagauaguguauuugaauaauacuacuguugaaaaagaaauuuguccaaaaguuguagaauacagaaauuggucgaaaccacaaugcaaaaucacaggguuugcuccuuucuccaaggacaacucaauucgacuuucugcggguggggacauuugggugacaagagaaccuuaugugucaugcggccucgguaaauguuaucaauuugcacuuggacagggaacuacauuggacaacagccauucaaauggcacaauacaugauaggaucccucaucggacucuuuuaaugaaugaguuggguguuccauuucauuugggaaccaaacaaguauguauagcaugguccagcucaaguugucaugaugggagagcaugguuacauauauguaucacaggagaugacagaaaugcgacugcuagcuucauuuaugaugggaugcucguagacagcauugguucuuggucuaaaaacauacucagaacccaggaaucugaauguguuugcaucaaugggacuugugcgguaguaaugacggauggaagugcuucaggaguugcugacacuagaauauuauucaucagagagggaaagauuguccauauaagcccauugucagggagugcucagcacauagaagaauguucuuguuauccccgauauccagacguuagauguguuugcagagacaauuggaagggcucuaauaggccaguuauaaauauaaauauggcugauuauagcauugauuccaauuaugugugcucaggacuuguuggcgacacaccaagaaacgaugauaacucuagcagcagcaauugcagggacccuaauaaugagagaggaaacccaggagugaaagggugggccuucgacgauggaaaugauguuuggaugggaaggacaaucaacagggauucacguucagguuaugagaccuucagagucauuggugguuggaccacugcuaauuccaaaucacagauaaacaggcaagucauaguugacaauaacaacugguccgguuauucggguguuuucucuguagaaggcaaaagcugcaucaauagguguuuuuauguggaguuaauaagaggaaggccgcaggaaccuagaguaugguggacuucaaacaguauuguuguauucugugguacuucagguaccuauggaacaggcucauggccugauggggcgaauaucaauuucaugccgauauaa

SEQ ID NO: 56453 - RNA, 1413 nt, Artificial Sequence
  derived and/or modified CDS sequence (wt) from neuraminidase__InfluenzaA__AHJ58004
augaauccaaaucaaaagauaacaugcauuucagcaacaggagugacacuaucgguaguaagccugcuaauaggaauugccaauuugggccuaaauaucggacuccacuauaaggugagugauucaucaaauauaaacauuccaaacaugaaugagacaaacccaacaacaacuauaauaaacaaucauacucagaauaauuucaaaaacaucacuaacauuauaguaaauaagaacgaggaaggaacauuucucaaccugaccaagccucuaugugaagucaacucauggcauauucuaucgaaagacaaugcaauaaggauaggugaggaugcucauauacuagucacaagggaaccuuacuuguccugugauccgcaaggcugcaggauguuugcucugagucaaggcacaacacucagagggcgacaugcgaauggaaccauacaugauagaagcccauuccgagcucuuauaaguugggaaaugggucaggcacccaguccauauaaugcuaggguugaaugcauaggauggucaagcacaucaugccacgauggcauaucaaggaugucaauauguauaucaggaccaaauaacaaugcaucagcaguggugugguacagggggagaccaguaacagaaauuccaucaugggcagggaacauucuuaggacucaagaaucggaaugugugugccauaaaggaaucugcccaguagucaugacagaugguccggcaaacaauagagcagcaacuaagauaaucuauuucaaagagggaaagauacagaaaaucgaagaacugaaggggaacgcucagcacaucgaagaauguuccugcuauggagcagcagggaugaucaaauguauaugcagggacaauuggaggggggcaaauagaccaguaaucacuauagauccugagaugaugacccacacaagcaaguacuuguguucaaaaaucuuaaccgauacaagucgccccaaugaccccaccaaugggaacugcgaugagccaauaacaggagggagcccagacccugggguaaaaggguuugcauuccuagacggggagaacucauggcuuggaaggacaauuagcaaagacuccaggucaggauacgaaauguuaaaagucccaaaugcagagaccgacacucaaucggggcccaccucauaccagauaauuguaaacaaccaaaauuggucaggguacucaggggcauucauagacuacugggcaaacaaggaauguuucaauccuuguuuuuauguggaacuaaucagagggagacccaaagaaaguaguguacuguggaccucaaauagcauuguagcucucuguggauccagggagcgauugggaucaugguccuggcaugauggugcugaaaucaucuacuuuaaguag

SEQ ID NO: 56454 - RNA, 1413 nt, Artificial Sequence
  derived and/or modified CDS sequence (wt) from neuraminidase__InfluenzaA__AHJ58016
augaauccaaaucaaaagauaacaugcauuucagcaacaggaaugacacuaucgguaguaaguaugcuaauaggaauugccaauuuaggccuaaauaucggacuccacuauaaggugagugauucaacaaauauaaacauuccaaaaaugaaugagaccaacccaacaacaacaauaauaaacaaucacccucagaauaauuucacaaacaucacuaacauuauaguuaauaaaaacgaggaagaaaauuuucucaaccugaccaagccacuaugugaagucaacucauggcauauucuaucgaaagacaaugcaauaagaauaggugagaacgcucauauacuagucacaagggaaccuuacuuguccugcgacccacaaggcugcaggauguuugcucugagucaaggcacaacacucagagggcgacaugcgaauggaaccauacaugauaggagcccauuccgagcucuuauaaguugggaaaugggucaggcgcccaguccauauaaugcuagggucgagugcauaggauggucaagcacgucaugccacgauggcauaucaaggaugucaauaugcauaucaggaccgaacaacaaugcaucggcaguagugugguacggggggagaccaguaacagagaucccaucaugggcagggaacauucuuaggacucaagaaucggagugcgugugccauggaggaauauguccgguggucaugacagaugguccggcgaacaauagggcagaaacuaagauaaucuauuucaaagagggaaagauacagaagaucgaagaacugaaggggaacgcucaacacaucgaagaguguuccuguuauggagcaucagggaugaucaaguguauaugcagggacaauuggaagggggcaaacagaccaguaauaacuauagauccagagaugaugacccacacaagcaaguauuuguguucaaaaaucuuaacugauacaagccgccccaaugaccccaccaaugggaacugcgaugcgccaauaacaggagggagcccagacccugggguaaaaggguuugcauuccuugacgguaagaacucauggcuuggaaggacuauuagcaaagacuccagaucaggcuaugaaauguuaaaaguuccaaaugcagagaccgacacucaaucgggggcaaucucacaccagauaauugucaacaaucagaauuggucaggguacucuggggcauucauugacuacugggcaaacaaggaaugcuucaauccuuguuuuuauguggaacuaaucagagggagacccaaagagaguaguguacuguggacuucaaauagcauuguagcucucuguggauccagggagcgauugggaucaugguccuggcaugauggugcugaaaucaucuaccuuaaguag

SEQ ID NO: 56455 - RNA, 1413 nt, Artificial Sequence
  derived and/or modified CDS sequence (wt) from neuraminidase__InfluenzaA__AHJ58028
augaauccaaaucaaaagauaacaugcauuucagcaacaggaaugacacuaucgguaguaaguaugcuaauaggaauugccaauuuaggccuaaauaucggacuccacuauaaggugagugauucaacaaauauaaacauuccaaaaaugaaugagaccaacccaacaacaacaauaauaaacaaucacccucagaauaauuucacaaacaucacuaacauuauaguuaauaaaaacgaggaagaaaauuuucucaaccugaccaagccacuaugugaagucaacucauggcauauucuaucgaaagacaaugcaguaaggauaggugaggaugcucauauacuagucacaagggaaccauacuuguccugugauccacaaggcugcaggauguuugcucugagucaaggcacaacgcucagagggcgacaugcgaauggaaccauacaugauagaagcccauuccgagcucuuauaagcugggaaaugggucaggcacccaguccauacaauacuaggguugaaugcauaggauggucaagcacgucgugccacgaugguauaucaaggaugucaauauguauaucaggaccaaauaacaaugcaucagcaguggugugguacagagggagaccaguaacagaaauuccaucaugggcaggaaacauucuuaggacucaagaaucggaaugugugugccauaaagggaucugcccaguagucaugacagaugguccagcaaacaauagggcagaaacuaagauaauuuauuucaaagagggaaagauacagaaaaucgaagaacuggagggaaaugcucagcacaucgaagaauguucaugcuaugguacagcagggaugaucaaauguauaugcagggacaauuggaggggagcaaauagaccaguaaucacuauagauccugagaugaugacccacacaagcagguacuuguguucaaaaaucuuaaccgauacaagucgccccaaugaccccaccaaugggaacugcgaugcgccaauaacaggagggagcccagacccuggaguaaaaggguuugcauuccuagacgggaagaacucauggcuuggaaggacaauuagcaaagacuccaggucaggcuacgaaauguuaaaagucccaaaugcagagaccgacauucaaucggggccaaccucaaaucaaauaauugucaacaaccaaaauuggucaggguacucaggggcauucauagacuacugggcaaacaaggaaugcuucaauccuuguuuuuauguggaacuaaucagagggagacccaaagaaaguaauguacuguggacuucaaauagcauuguagcucucuguggauccagggagcgauugggaucaugguccuggcaugauggugcugaaaucaucuacuuuaaguag

SEQ ID NO: 56456 - RNA, 1410 nt, Artificial Sequence
  derived and/or modified CDS sequence (wt) from neuraminidase__InfluenzaA__AHJ58040
augaauccaaaucaaaagauaauaacaguuggcucugucucucuggccauugcaacaauauguuuacuaaugcagauugccauucuggcaacgacugugacacugcacuucaagcaaaaugaaugcaauauacccucgaaaaaccagguaaugccaugugaaccaaucauaauagagaggaacauaacagagguaguauauuugaauaauacuaucauugaaaaagaaauuuguccuaaaguaguagaauacaggaauuggucgaaaccacaaugccaaaucacaggguucgcuccuuucuccaaagacaacucaauucgacuuucugcugguggggacauuuggguaacaagagaaccuuaugugucaugcagccccaguaaauguuaucaauuugcacuugggcagggaacuacauuggacaacagccauucaaauggcacaauacaugauaggaucccucaucguacccuuuugaugaaugaauuggguguuccauuucauuugggaaccaaacaaguaugcauagcaugguccagcucaagcugucaugaugggagagcaugguuacauguauguaucacgggagaugacaggaaugcgacugccagcuucauuuauaaugggaugcucguugacagcaucaguucuuggucucgaaauauccucagaacccaggaaucugaauguguuugcaucaauggaacuuguacaguaauaaugacagaugggagugcuucaggaguugcugauacuagaauacuauucaucagagaaggaaagauuguccauguaagcccauugucagggagugcucaacacauagaggaauguuccuguuauccccgauauccagacguuagauguguuugcagggacaauuggaaaggcucaaauaggccaguuguagauauaaauauggcagacuauagcauugauucccacuaugugugcucagggcuuguuggugacacgccaagaaaugaugauagcuccagcaguagcaauugcaaggauccuaacaaugagagagggaauccaggagugaaagggugggccuucgaugauggaaaugauguuuggaugggaaggacaaucagcagggauucacguucagguuaugagaccuucagggucauuggugguuggaccacugccaauuccaaaucacagauaaauaggcaagucauaguugacaauaacaacuggucugguuauucggguguuuucucuguugaaggcaagagcugcaucaauaggugcuuuuacguggaguuaauaagaggacggccgcaggaaacuagaguaugguggacuucaaacaguauugucguauucugugguacuucagguaccuauggaacaggcucguggccugauggggcgaauaucaauuucaugccgauauag

SEQ ID NO: 56457 - RNA, 1410 nt, Artificial Sequence
  derived and/or modified CDS sequence (wt) from neuraminidase__InfluenzaA__AHJ58052
augaauccaaaucaaaagauaauaacaauuggcucugucucucuaaccauugcaacaguaaguuuccucaugcagauugccauccuaacaacgacugugacacugcauuucaagcacaaugaaugcaauaugcccccgaaaaaccagguaaugucaugugaaccaauuauaauagaaaggaacauaacagagauaguguauuugaauaauacuacuguugaaaaagaaauuuguccaaaaguuguagaauacagaaauuggucgaaaccacaaugcaaaaucacaggguuugcuccuuucuccaaggacaacucaauucgacuuucugcggguggggacauuugggugacaagagaaccuuaugugucaugcggccucgguaaauguuaucaauuugcacuuggacagggaacuacauuggacaacagccauucaaauggcacaauacaugauaggaucccucaucggacucuuuuaaugaaugaguuggguguuccauuucauuugggaaccaaacaaguauguauagcaugguccagcucaaguugucaugaugggagagcaugguuacauauauguaucacaggggaugacagaaaugcgacugcuagcuucauuuaugaugggaugcucguagacagcauugguucuuggucuaaaaacauacucagaacccaggaaucugaauguguuugcaucaaugggacuugugcgguaguaaugacggauggaagugcuucaggaguugcugacacuagaauauuauucaucagagagggaaagauuguccauauaagcccauugucagggagugcucagcacauagaagaauguuccuguuauccccgauauccagacguuagauguguuugcagagacaauuggaaaggcucuaauaggccaguuauagauauaaauauggcugauuauagcauugauuccaauuaugugugcucaggacuuguuggcgacacaccaagaaacgaugauaacucuagcagcagcaauugcagggacccuaauaaugagagaggaaauccaggagugaaagggugggcuuucgacgauggaaaugauguuuggaugggaaggacaaucaacagggauucacguucagguuaugagaccuucagagucauuggugguuggaccacugcuaauuccaaaucacagauaaacagacaagucauaguugacaauaacaacugguccgguuauucggguguuuucucugucgaaggcaaaagcugcaucaauagguguuuuuauguggaguuaauaagaggaaggccgcaggaaccuagaguaugguggacuucaaacaguauuguuguauucugugguacuucagguaccuauggaacaggcucauggccugauggggcgaauaucaauuucaugccgauauaa

SEQ ID NO: 56458 - RNA, 1413 nt, Artificial Sequence
  derived and/or modified CDS sequence (wt) from neuraminidase__InfluenzaA__AHJ58064
augaauccaaaucaaaagauaacaugcauuucagcaacaggaaugacacuaucgguaguaagucugcuaauaggaauugccaauuugggccuaaauaucggacuccacuauaaggugagugauucaacaaauauaaacauuccaaacaugaaugagaccagcccaacaacaacaauaauaaacaaucacccucagaauaauuucacaaacaucacuaauauuauagugaauaagaacgaggaagaaaauuuucucaaucugaccaagccgcuaugugaagucaacucauggcauauucuaucgaaagacaaugcaauaagaauaggugagaacgcucauauacuagucacaagggaaccuuacuuguccugcgauccacagggcugcaggauguuugcucugagucaaggcacaacacucagagggcaacaugcgaauggaaccauacaugacaggagcccauuccgagcucuuauaaguugggaaaugggucaggcgcccaguccauauaaugcuagggucgagugcauaggauggucaagcacgucaugccacgauggcauaucaaggaugucaauaugcauaucaggaccaaauaacaaugcaucggcaguagugugguacggggggagaccaguaacagagauccccucaugggcagggaacauucuuaggacucaagaaucggagugugugugccauggaggaauauguccaguggucaugacagaugguccggcaaacaauagggcagaaacuaagauaaucuauuucaaagaaggaaaaauacagaaaaucgaagaacugaaggggaacgcucaacacaucgaagaguguucauguuauggagcaucagggaugaucaaguguauaugcagggacaauuggaaaggggcaaacagaccaguaauaacuauagaucccgagaugaugacccacacaagcaaguacuuguguucaaaaaucuuaaccgauacaagccgccccaaugaccccaucaaugggaacugcgaugcgccaauaacaggagggagcccagacccugggguaaaaggauuugcauuccuagacggugagaacucauggcuuggaaggacuauuagcaaagacuccaggucaggcuaugaaauguuaaaaguuccaaaugcagagaccgacacucaaucgggggcaaucucacaccagaugauugucaacaaccagaauuggucaggguacucuggggcauucauugacuacugggcaaacaaggaaugcuucaauccuuguuuuuauguggaacuaaucagagggagacccaaagagaguaguguacuguggacuucaaauagcauuguagcucucuguggauccagggagcgauugggaucaugguccuggcaugauggugcugaaaucaucuacuuuaaguag

SEQ ID NO: 56459 - RNA, 1401 nt, Artificial Sequence
  derived and/or modified CDS sequence (wt) from neuraminidase__InfluenzaA__AHJ58075
augaauccaaaucagaagauaauagcaauuggcucuguuucucuaaccauugcgauaauauguuuucuccugcagauugccaucuuaacaacgaccaugacacuacauuucaggcagaaugaaugcagcaauccaucgaauaaucaaguggugccaugugaaccuaucauaauagagaggaacacagugcauuugaauaguacuaccauagagaaggaaauuuguccuaaaguggcagaauacaagaauuggucaaaaccacaaugucaaauaacaggguuugcuccuuucucaaaggacaacucaauuaggcuuucugcagguggagauaucugggugacaagagaaccuuaugugucgugcagucuuggaaaauguuaucaguuugcacuugggcagggaaccacucugaaaaacaagcacucaaauggcacuacacaugauagaauuccucacagaacucuuuuaaugaaugaguuaggugucccauuucauuugggaaccaaacaagugugcauagcauggucuaguucaagcugccaugaugggaaagcaugguuacauauuugugugacuggggaugauaaaaaugcuacugcuaguaucauuuaugaugggaugcugguugacaguauugguucaugguccaaaaacauccuaagaacccaggagucagaaugcguuugcaucaauggaacuugugcaguaguaaugacugauggaagugcaucaggaaaggcugacacuagaauauuauucauaagagagggaaaaauuauaaauauuagcccauugucaggaagugcucagcacguggaggaaugcuccuguuacccccgguauccugaaguuagguguguuugcagagacaauuggaagggcuccaauaggcccguucuauauauaaauauggcagauuauaguauugaguccaguuauguaugcucaggacuuguuggcgacacaccaagagaugaugauagcuccaguagcagcaacuguagagacccuaauaacgaaagaggggccccaggaguaaaagggugggccuuugacgaugggaaugacauuuggaugggacgaacaaucaaaagugauucacgcucagguuaugagacuuuuagggucguuaaugguuggaccacagcuaauuccaagucacagauaaauaggcaagucauaguugacagugacagcuggucuggguauucugguaucuucucuguugaaggcaaaaacugcaucaacagguguuuuuauguggaguugauaagagggagaccacaggagaccagagugugguggacuucaaacagcaucauuguauucuguggaaccucagguacauauggaacaggcucauggccugauggagcgaauaucaacuucaugccuauauaa

SEQ ID NO: 56460 - RNA, 1413 nt, Artificial Sequence
  derived and/or modified CDS sequence (wt) from neuraminidase__InfluenzaA__AHJ58087
augaauccaaaucaaaagauaacaugcauuucagcaacaggaaugacacuaucgguaguaagucugcuaauaggaauugccaauuugggccuaaauaucggacuccacuauaaggugagugauucaacaaauauaaacauuccaaacaugaaugagaccagcccaacaacaacaauaauaaacaaucacccucagaauaauuucacaaacaucacuaauauuauagugaauaagaacgaggaagaaaauuuucucaaucugaccaagccgcuaugugaagucaacucauggcauauucuaucgaaagacaaugcaauaagaauaggugagaacgcucauauacuagucacaagggaaccuuacuuguccugcgauccacagggcugcaggauguuugcucugagucaaggcacaacacucagagggcaacaugcgaauggaaccauacaugacaggagcccauuccgagcucuuauaaguugggaaaugggucaggcgcccaguccauauaaugcuagggucgagugcauaggauggucaagcacgucaugccacgauggcauaucaaggaugucaauaugcauaucaggaccaaauaacaaugcaucggcaguagugugguacggggggagaccaguaacagagauccccucaugggcagggaacauucuuaggacucaagaaucggagugugugugccauggaggaauauguccaguggucaugacagaugguccggcaaacaauagggcagaaacuaagauaaucuauuucaaagaaggaaaaauacagaaaaucgaagaacugaaggggaacgcucaacacaucgaagaguguucauguuauggagcaucagggaugaucaaguguauaugcagggacaauuggaaaggggcaaacagaccaguaauaacuauagaucccgagaugaugacccacacaagcaaguacuuguguucaaaaaucuuaaccgauacaagccgccccaaugaccccaucaaugggaacugcgaugcgccaauaacaggagggagcccagacccugggguaaaaggguuugcauuccuagacggugauaacucauggcuuggaaggacuauuagcaaagacuccaggucaggcuaugaaauguuaaaaguuccaaaugcagagaccgacacucaaucgggggcaaucucacaccagaugauugucaacaaccagaauuggucaggguacucuggggcauucauugacuacugggcaaacaaggaaugcuucaauccuuguuuuuauguggaacuaaucagagggagacccaaagagaguaguguacuguggacuucaaauagcauuguagcucucuguggauccagggagcgauugggaucaugguccuggcaugauggugcugaaaucaucuacuuuaaguag

SEQ ID NO: 56461 - RNA, 1410 nt, Artificial Sequence
  derived and/or modified CDS sequence (wt) from neuraminidase__InfluenzaA__AHL80721
augaauccaaaccaaaagauaauaaccauugguucggucuguaugacaauuggaauggcuaacuuaauauuacaaauuggaaacauaaucucaauauggauuagccacucaauucaacuugggaaucaaaaucagauugaaacaugcaaucaaagcgucauuacuuaugaaaacaacacuuggguaaaucagacauauguuaacaucagcaacaccaacuuugcugcuggacagucaguggucuccgugaaauuagcgggcaauuccucucucugcccuguuaguggaugggcuauauacaguaaagacaacaguauaagaaucgguuccaagggggauguguuugucauaagggaaccauucauaucaugcucccccuuggaaugcagaaccuucuucuugacucaaggggccuugcuaaaugacaaacauuccaauggaaccauuaaagacaggagcccauaucgaacccuaaugagcuguccuauuggugaaguucccucuccauacaacucaagauuugagucagucgcuuggucagcaagugcuugucaugauggcaucaauuggcuaacaauuggaauuucuggcccagacaauggggcaguggcuguguuaaaguacaacggcauaauaacagacacuaucaagaguuggagaaacaauauauugagaacacaagagucugaaugugcauguguaaaugguucuugcuuuacuguaaugaccgauggaccaagugauggacaggccucauacaagaucuucagaauagaaaagggaaagauagucaaaucagucgaaaugaaugccccuaauuaucacuaugaggaaugcuccuguuauccugauucuagugaaaucacaugugugugcagggauaacuggcauggcucgaaucgaccgugggugucuuucaaccagaaucuggaauaucagauaggauacauaugcagugggauuuucggagacaauccacgcccuaaugauaagacaggcaguugugguccaguaucgucuaauggagcaaauggaguaaaaggauuuucauucaaauacggcaaugguguuuggauagggagaacuaaaagcauuaguucaagaaaagguuuugagaugauuugggauccaaacggauggacugggacagacaauaacuucucaauaaagcaagaugucguaggaauaaaugaguggucaggauauagcgggaguuuuguucagcauccagaacuaacagggcuggacuguauaagaccuugcuucuggguugaacuaaucagagggcgacccaaagagaacacaaucuggacuagcgggagcagcauauccuuuugugguguaaacagugacacuguggguuggucuuggccagacggugcugaguugccauuuaccauugacaaguaa

SEQ ID NO: 56462 - RNA, 1410 nt, Artificial Sequence
  derived and/or modified CDS sequence (wt) from neuraminidase__InfluenzaA__AHL80732
augaauccaaaccaaaagauaauaaccauugguucggucuguaugacaauuggaauggcuaacuuaauauuacaaauuggaaacauaaucucaauauggauuagccacucaauucaacuugggaaucaaaaucagauugaaacaugcaaucaaagcgucauuaccuaugaaaacaacacuuggguaaaucagacauauguuaacaucagcaacaccaacuuugcugcuggacagucagugguuuccgugaaauuagcgggcaauuccucucucugcccuguuaguggaugggcuauauacaguaaagacaacaguauaagaaucgguuccaagggggauguguuugucauaagggaaccauucauaucaugcucccccuuggaaugcagaaccuucuucuugacucaaggggccuugcuaaaugacaaacauuccaauggaaccauuaaagacaggagcccauaucgaacccuaaugagcuguccuauuggugaaguucccucuccauacaacucaagauuugagucagucgcuuggucagcaagugcuugucaugauggcaucaauuggcuaacaauuggaauuucuggcccagacaauggggcaguggcuguguuaaaguacaacggcauaauaacagauacuaucaagaguuggagaaacaauauauugagaacacaagagucugaaugugcauguguaaaugguucuugcuuuacuguaaugaccgauggaccaagugauggacaggccucauacaagaucuucagaauagaaaagggaaagauagucaaaucagucgaaaugaaugccccuaauuauuacuaugaggaaugcuccuguuauccugauucuagugaaaucacaugugugugcagggauaacuggcauggcucgaaucgaccgugggugucuuucaaccagaaucuggaauaucagauaggauacauaugcagugggauuuucggagacaauccacgcccuaaugauaagacaggcaguugugguccaguaucgucuaauggagcaaauggaguaaaaggauuuucauucaaauacggcaaugguguuuggauagggagaacuaaaagcauuaguucaagaaacgguuuugagaugauuugggauccgaacggauggacugggacagacaauaacuucucaauaaagcaagauaucguaggaauaaaugaguggucaggauauagcgggaguuuuguccagcauccagaacuaacagggcuggauuguauaagaccuugcuucuggguugaacuaaucagagggcgacccaaagagaacacaaucuggacuagcgggagcagcauauccuuuugugguguaaacagugacacuguggguuggucuuggccagacggugcugaguugccauuuaucauugacaaguaa

SEQ ID NO: 56463 - RNA, 1410 nt, Artificial Sequence; identical to SEQ ID NO: 48750
  derived and/or modified CDS sequence (wt) from neuraminidase__InfluenzaA__AHL80743

SEQ ID NO: 56464 - RNA, 1410 nt, Artificial Sequence
  derived and/or modified CDS sequence (wt) from neuraminidase__InfluenzaA__AHL80754
augaauccaaaccaaaagauaauaaccauugguucggucuguaugacaauuggaauggcuaacuuaauauuacaaauuggaaacauaaucucaauauggauuagccacucaauucaacuugggaaucaaaaucagauugaaacaugcaaucaaagcgucauuacuuaugaaaacaacacuuggguaaaucagacauauguuaacaucagcaacaccaacuuugcugcuggacagucagugguuuccgugaaauuagcgggcaauuccucucucugcccuguuaguggaugggcuauauacaguaaagacaacaguauaagaaucgguuccaagggggauguguuugucauaagggaaccauucauaucaugcucccccuuggaaugcagaaccuucuucuugacucaaggggccuugcuaaaugacaaacauuccaauggaaccauuaaagacaggagcccauaucgaacccuaaugagcuguccuauuggugaaguucccucuccauacaacucaagauuugagucagucgcuuggucagcaagugcuugucaugauggcaucaauuggcuaacaauuggaauuucuggcccagacaauggggcaguggcuguguuaaaguacaacggcauaauaacagacacuaucaagaguuggagaaacaauauauugagaacacaagagucugaauguguauguguaaaugguucuugcuuuacuguaaugaccgauggaccaagugauggacaggccucauacaagaucuucagaauagaaaagggaaagauagucaaaucagucgaaaugaaugccccuaauuaucacuaugaggaaugcuccuguuauccugauucuagugaaaucacaugugugugcagggauaacuggcauggcucgaaucgaccgugggugucuuucaaccagaaucuggaauaucagauaggguacauaugcagugggauuuucggagacaauccacgcccuaaugauaagacaggcaguugugguccaguaucgucuaauggagcaaauggaguaaaaggauuuucauucaaauacggcaaugguguuuggauagggagaacuaaaagcauuaguucaagaaacgguuuugagaugauuugggauccgaacggauggacugggacagacaauaacuucucaauaaagcaagauaucguaggaauaaaugaguggucaggauauagcgggaguuuuguccagcauccagaacuaacagggcuggauuguauaagaccuugcuucuggguugaacuaaucagagggcgacccaaagagaacacaaucuggacuagcgggagcagcauauccuuuugugguguaaacagugacacuguggguuggucuuggccagacggugcugaguugccauuuaccauugacaaguaa

SEQ ID NO: 56465 - RNA, 1410 nt, Artificial Sequence; identical to SEQ ID NO: 48750
  derived and/or modified CDS sequence (wt) from neuraminidase__InfluenzaA__AHL80765

SEQ ID NO: 56466 - RNA, 1410 nt, Artificial Sequence
  derived and/or modified CDS sequence (wt) from neuraminidase__InfluenzaA__AHL80776
augaauccaaaccaaaagauaauaaccauugguucggucuguaugacaauuggaauggcuaacuuaauauuacaaauuggaaacauaaucucaauauggauuagccacucaauucaacuugggaaucaaaaucagauugaaacaugcaaucaaagcgucauuacuuaugaaaacaacacuuggguaaaucagacauauguuaacaucagcaacaccaacuuugcugcuggacagucagugguuuccgugaaauuagcgggcaauuccucucucugcccuguuaguggaugggcuauauacaguaaagacaacaguauaagaaucgguuccaagggggauguguuugucauaagggaaccauucauaucaugcucccccuuggaaugcagaaccuucuucuugacucaaggggccuugcuaaaugacaaacauuccaauggaaccauuaaagacaggagcccauaucgaacccuaaugagcuguccuauuggugaaguucccucuccauacaacucaagauuugagucagucgcuuggucagcaagugcuugucaugauggcaucaauuggcuaacaauuggaauuucuggcccagacaauggggcaguggcuguguuaaaguacaacggcauaauaacagacacuaucaagaguuggagaaacaauauauugagaacacaagagucugaaugugcauguguaaaugguucuugcuuuacuguaaugaccgauggaccaagugauggacaggccucauacaagaucuucagaauagaaaagggaaagauagucaaaucagucgaaaugaaugccccuaauuaucacuaugaggaaugcuccuguuauccugauucuagugaaaucacaugugugugcagggauaacuggcauggcucgaaucgaccgugggugucuuucaaccagaaucuggaauaucagauaggauacauaugcagugggauuuucggagacaauccacgcccuaaugauaagacaggcaguugugguccaguaucgucuaauggagcaaauggaguaaaaggauuuuccuucaaauacggcaaugguguuuggauagggagaacuaaaagcauuaguucaagaaacgguuuugagaugauuugggauccgaacggauggacugggacagacaauaacuucucaauaaagcaagauaucguaggaauaaaugaauggucaggauauagcgggaguuuuguucagcauccagaacuaacagggcuggauuguauaagaccuugcuucuggguugaacuaaucagagggcgacccaaagagaacacaaucuggacuagugggagcagcauauccuuuugugguguaaacagugacacuguggguuggucuuggccagacggugcugaguugccauuuaccauugacaaguaa

SEQ ID NO: 56467 - RNA, 1410 nt, Artificial Sequence; identical to SEQ ID NO: 56466
  derived and/or modified CDS sequence (wt) from neuraminidase__InfluenzaA__AHL80787

SEQ ID NO: 56468 - RNA, 1410 nt, Artificial Sequence
  derived and/or modified CDS sequence (wt) from neuraminidase__InfluenzaA__AHL80798
augaauccaaaccaaaagauaauaaccauugguucggucuguaugacaauuggaauggcuaacuuaauauuacaaauuggaaacauaaucucaauauggauuagccacucaauucaacuugggaaucaaaaucagauugaaacaugcaaucaaagcgucauuacuuaugaaaacaacacuuggguaaaucagacauauguuaacaucagcaacaccaacuuugcugcuggacagucagugguuuccgugaaauuagcgggcaauuccucucucugcccuguuaguggaugggcuauauacaguaaagacaacaguauaagaaucgguuccaagggggauguguuugucauaagggaaccauucauaucaugcucccccuuggaaugcagaaccuucuucuugacucaaggggccuugcuaaaugacaaacauuccaauggaaccauuaaagacaggagcccauaucgaacccuaaugagcuguccuauuggugaaguucccucuccauacaacucaagauuugagucagucgcuuggucagcaagugcuugucaugauggcaucaauuggcuaacaauuggaauuucuggcccagacaauggggcaguggcuguguuaaaguacaacggcauaauaacagacacuaucaagaguuggagaaacaauauauugagaacacaagagucugaaugugcauguguaaaugguucuugcuuuacuguaaugaccgauggaccaagugauggacaggccucauacaagaucuucagaauagaaaagggaaagauagucaaaucagucgaaaugaaugccccuaauuaucacuaugaggaaugcuccuguuauccugauucuagugaaaucacaugugugugcagggauaacuggcauggcucgaaucgaccgugggugucuuucaaccagaaucuggaauaucagauaggauacauaugcagugggauuuucggagacaauccacgcccuaaugauaagaaaggcaguugugguccaguaucgucuaauggagcaaauggaguaaaaggauuuucauucaaauacggcaaugguguuuggauagggagaaccaaaagcauuaguucaagaaacgguuuugagaugauuugggauccgaacggauggacugggacagacaauaacuucucaguaaagcaagauaucguaggaauaaaugaauggucaggauauagcgggaguuuuguucagcauccagaacuaacagggcuggauuguauaagaccuugcuucuggguugaacuaaucagagggcgacccaaagagaacacaaucuggacuagcgggagcagcauauccuuuugugguguaaacagugacacuguggguuggucuuggccagacggugcugaguugccauuuaccauugacaaguaa

SEQ ID NO: 56469 - RNA, 1410 nt, Artificial Sequence
  derived and/or modified CDS sequence (wt) from neuraminidase__InfluenzaA__AHL80809
augaauccaaaccaaaagauaauaaccauugguucggucuguaugacaauuggaauggcuaacuuaauauuacaaauuggaaacauaaucucaauauggauuagccacucaauucaacuugggaaucaaaaucagauugaaacaugcaaucaaagcgucauuacuuaugaaaacaacacuuggguaaaucagacauauguuaacaucagcaacaccaacuuugcugcuggacagucagugguuuccgugaaauuagcgggcaauuccucucucugcccuguuaguggaugggcuauauacaguaaagacaacaguauaagaaucgguuccaagggggauguguuugucauaagggaaccauucauaucaugcucccccuuggaaugcagaaccuucuucuugacucaaggggccuugcuaaaugacaaacauuccaauggaaccauuaaagacaggagcccauaucgaacccuaaugagcuguccuauuggugaaguucccucuccguacaacucaagauuugagucagucgccuggucagcaagugcuugucaugauggcaucaauuggcuaacaauuggaauuucuggcccagacaauggggcaguggcuguguuaaaguacaacggcauaauaacagacacuaucaagaguuggagaaacaauauauugagaacacaagagucugaaugugcauguguaaaugguucuugcuuuacuguaaugaccgauggaccaagugauggacaggccucauacaagaucuucagaauagaaaagggaaagauagucaaaucagucgaaaugaaugccccuaauuaucacuaugaggaaugcuccuguuauccugauucuagugaaaucacaugugugugcagggauaacuggcauggcucgaaucgaccgugggugucuuucaaccagaaucuggaauaucagauaggauacauaugcagugggauuuucggagacaauccacgcccuaaugauaagacaggcaguugugguccaguaucgucuaauggagcaaauggaguaaaaggauuuucauucaaauacggcaaugguguuuggauagggagaacuaaaagcauuaguucaagaaacgguuuugagaugauuugggauccgaacggauggacugggacagacaauaacuucucaauaaagcaagauaucguaggaauaaaugaauggucaggauauagcgggaguuuuguucagcauccagaacuaacagggcuggauuguauaagaccuugcuucuggguugaacuaaucagagggcgacccaaagagaacacaaucuggacuagugggagcagcauauccuuuugugguguaaacagugacacuguggguuggucuuggccagacggugcugaguugccauuuaccauugacaaguaa

SEQ ID NO: 56470 - RNA, 1410 nt, Artificial Sequence; identical to SEQ ID NO: 56469
  derived and/or modified CDS sequence (wt) from neuraminidase__InfluenzaA__AHL80820

SEQ ID NO: 56471 - RNA, 1410 nt, Artificial Sequence; identical to SEQ ID NO: 50612
  derived and/or modified CDS sequence (wt) from neuraminidase__InfluenzaA__AHL80831

SEQ ID NO: 56472 - RNA, 1410 nt, Artificial Sequence
  derived and/or modified CDS sequence (wt) from neuraminidase__InfluenzaA__AHL80842
augaauccaaaccaaaagauaauaaccauugguucggucuguaugacaauuggaauggcuaacuuaauauuacaaauuggaaacauaaucucaauauggauuagccacucaauucaacuugggaaucaaaaucagauugaaacaugcaaucaaagcgucauuacuuaugaaaacaacacuuggguaaaucagacauauguuaacaucagcaacaccaacuuugcugcuggacagucagugguuuccgugaaauuagcgggcaauuccucucucugcccuguuaguggaugggcuauauacaguaaagacaacaguauaagaaucgguuccaagggggauguguuugucauaagggaaccauucauaucaugcucccccuuggaaugcagaaccuucuucuugacucaaggggccuugcuaaaugacaaacauuccaauggaaccauuaaagacaggagcccauaucgaacccuaaugagcuguccuauuggugaaguucccucuccauacaacucaagauuugagucagucgcuuggucagcaagugcuugucaugauggcaucaauuggcuaacaauuggaauuucuggcccagacaauggggcaguggcuguguuaaaguacaacggcauaauaacagacacuaucaagaguuggagaaacaauauauugagaacacaagagucugaaugugcauguguaaaugguucuugcuuuacuguaaugaccgauggaccaagugauggacaggccucauacaagaucuucagaauagaaaagggaaagauagucaaaucagucgaaaugaaugccccuaauuaucacuaugaggaaugcuccuguuauccugauucuagugaaaucacaugugugugcagggauaacuggcauggcucgaaucgaccgugggugucuuucaaccagaaucuggaauaucagauaggauacauaugcagugggauuuucggagacaauccacgcccuaaugauaagacaggcaguugugguccaguaucgucuaauggagcaaauggaguaaaaggauuuuccuucaaauacggcaaugguguuuggauagggagaacuaaaagcauuaguucaagaaaugguuuugagaugauuugggauccgaacggauggacugggacagacaauaacuucucaauaaagcaagauaucguaggaauaaaugaauggucaggauauagcgggaguuuuguucagcauccagaacuaacagggcuggauuguauaagaccuugcuucuggguugaacuaaucagaggacgacccaaagagaacacaaucuggacuagugggagcagcauauccuuuugugguguaaacagugacacuguggguuggucuuggccagacggugcugaguugccauuuaccauugacaaguaa

SEQ ID NO: 56473 - RNA, 1410 nt, Artificial Sequence; identical to SEQ ID NO: 50038
  derived and/or modified CDS sequence (wt) from neuraminidase__InfluenzaA__AHL80853

SEQ ID NO: 56474 - RNA, 1410 nt, Artificial Sequence
  derived and/or modified CDS sequence (wt) from neuraminidase__InfluenzaA__AHL80864
augaauccaaaccaaaagauaauaaccauugguucggucuguaugacaauuggaauggcuaacuuaauauuacaaauuggaaacauaaucucaauauggauuagccacucaauucaacuugggaaucaaaaucagauugaaacaugcaaucaaagcgucauuacuuaugaaaacaacacuuggguaaaucagacauauguuaacaucagcaacaccaacuuugcugcuggacagucagugguuuccgugaaauuagcgggcaauuccucucucugcccuguuaguggaugggcuauauacaguaaagacaacaguauaagaaucgguuccaagggggauguguuugucauaagggaaccauucauaucaugcucccccuuggaaugcagaaccuucuucuugacucaaggggccuugcuaaaugacaaacauuccaauggaaccauuaaagacaggagcccauaucgaacccuaaugagcuguccuauuggugaaguucccucuccauacaacucaagauuugagucagucgcuuggucagcaagugcuugucaugauggcaucaauuggcuaacaauuggaauuucuggcccagacaauggggcaguggcuguguuaaaguacaacggcauaauaacagacacuaucaagaguuggagaaacaauauauugagaacacaagagucugaaugugcauguguaaaugguucuugcuuuacuguaaugaccgauggaccaagugauggacaggccucauacaagaucuucagaauagaaaagggaaagauagucaaaucagucgaaaugaaugccccuaauuauuacuaugaggaaugcuccuguuauccugauucuagugaaaucacaugugugugcagggauaacuggcauggcucgaaucgaccgugggugucuuucaaccagaaucuggaauaucagauaggauacauaugcagugggauuuucggagacaauccacgcccuaaugauaagaaaggcaguugugguccaguaucgucuaauggagcaaauggaguaaaaggauuuucauucaaauacggcaaugguguuuggauagggagaacuaaaagcauuaguucaagaaacgguuuugagaugauuugggauccgaacggauggacugggacagacaauaacuucucaauaaagcaagauaucguaggaauaaaugaauggucaggauauagcgggaguuuuguucagcauccagaacuaacagggcuggauuguauaagaccuugcuucuggguugaacuaaucagagggcgacccaaagagaacacaaucuggacuagcgggagcagcauauccuuuugugguguaaacagugacacuguggguuggucuuggccagacggugcugaguugccauuuaccauugacaaguaa

SEQ ID NO: 56475 - RNA, 1410 nt, Artificial Sequence; identical to SEQ ID NO: 50038
  derived and/or modified CDS sequence (wt) from neuraminidase__InfluenzaA__AHL80875

SEQ ID NO: 56476 - RNA, 1410 nt, Artificial Sequence
  derived and/or modified CDS sequence (wt) from neuraminidase__InfluenzaA__AHL80886
augaauccaaaccaaaagauaauaaccauugguucggucuguaugacaauuggaauggcuaacuuaauauuacaaauuggaaacauaaucucaauauggauuagccacucaauucaacuugggaaucaaaaucagauugaaacaugcaaucaaagcgucauuacuuaugaaaacaacacuuggguaaaucagacauauguuaacaucagcaacaccaacuuugcugcuggacagucagugguuuccgugaaauuagcgggcaauuccucucucugcccuguuaguggaugggcuauauacaguaaagacaacaguauaagaaucgguuccaagggggauguguuugucauaagggaaccauucauaucaugcucccccuuggaaugcagaaccuucuucuugacucaaggggccuugcuaaaugacaaacauuccaauggaaccauuaaagacaggagcccauaucgaacccuaaugagcuguccuauuggugaaguucccucuccauacaacucaagauuugagucagucgcuuggucagcaagugcuugucaugauggcaucaauuggcuaacaauuggaauuucuggcccagacaauggggcaguggcuguguuaaaguacaacggcauaauaacagacacuaucaagaguuggagaaacaauauauugagaacacaagagucugaaugugcauguguaaaugguucuugcuuuacuguaaugaccgauggaccaagugauggacaggccucauacaagaucuucagaauagaaaagggaaagauagucaaaucagucgaaaugaaugccccuaauuaucacuaugaggaaugcuccuguuauccugauucuagugaaaucacaugugugugcagggauaacuggcauggcucgaaucgaccgugggugucuuucaaccagaaucuggaauaucagauaggauacauaugcagugggauuuucggagacaauccacgcccuaaugauaagaaaggcaguugugguccaguaucgucuaauggagcaaauggaguaaaaggauuuucauucaaauacggcaaugguguuuggauagggagaacuaaaagcauuaguucaagaaacgguuuugagaugauuugggauccgaacggauggacugggacagacaauaacuucucaauaaagcaagauaucguaggaauaaaugaauggucaggauauagcgggaguuuuguucagcauccagaacuaacagggcuggauuguauaagaccuugcuucuggguugaacuaaucagagggcgacccaaagagaacacaaucuggacuagcgggagcagcauauccuucugugguguaaacagugacacuguggguuggucuuggccagauggugcugaguugccauuuaccauugacaaguaa

SEQ ID NO: 56477 - RNA, 1410 nt, Artificial Sequence
  derived and/or modified CDS sequence (wt) from neuraminidase__InfluenzaA__AHL80897
augaauccaaaccaaaagauaauaaccauugguucggucuguaugacaauuggaauggcuaacuuaauauuacaaauuggaaacauaaucucaauauggauuagccacucaauucaacuugggaaucaaaaucagauugaaacaugcaaucaaagcgucauuacuuaugaaaacaacacuuggguaaaucagacauauguuaacaucagcaacaccaacuuugcugcuggacagucagugguuuccgugaaauuagcgggcaauuccucucucugcccuguuaguggaugggcuauauacaguaaagacaacaguauaagaaucgguuccaagggggauguguuugucauaagggaaccauucauaucaugcucccccuuggaaugcagaaccuucuucuugacucaaggggccuugcuaaaugacaaacauuccaauggaaccauuaaagacaggagcccauaucgaacccuaaugagcuguccuauuggugaaguucccucuccauacaacucaagauuugagucagucgcuuggucagcaagugcuugucaugauggcaucaauuggcuaacaauuggaauuucuggcccagacaauggggcaguggcuguguuaaaguacaacggcauaauaacagacacuaucaagaguuggagaaacaauauauugagaacacaagagucugaaugugcauguauaaaugguucuugcuuuacuguaaugaccgauggaccaagugauggacaggccucauacaagaucuucagaauagaaaagggaaagauagucaaaucagucgaaaugaaugccccuaauuaucacuaugaggaaugcuccuguuauccugauucuagugaaaucacaugugugugcagggauaacuggcauggcucgaaucgaccgugggugucuuucaaccagaaucuggaauaucagauaggauacauaugcagugggauuuucggagacaauccacgcccuaaugauaagaaaggcaguugugguccaguaucgucuaauggagcaaauggaguaaaaggauuuucauucaaauacggcaaugguguuuggauagggagaaccaaaagcauuaguucaagaaacgguuuugagaugauuugggauccgaacggauggacugggacagacaauaacuucucaauaaagcaagauaucguaggaauaaaugaauggucaggauauagcgggaguuuuguucagcauccagaacuaacagggcuggauuguauaagaccuugcuucuggguugaacuaaucagagggcgacccaaagagaacacaaucuggacuagcgggagcagcauauccuuuugugguguaaacagugacacuguggguuggucuuggccagacggugcugaguugccauuuaccauugacaaguaa

SEQ ID NO: 56478 - RNA, 1410 nt, Artificial Sequence
  derived and/or modified CDS sequence (wt) from neuraminidase__InfluenzaA__AHL80908
augaauccaaaccaaaagauaauaaccauugguucggucuguaugacaauuggaauggcuaacuuaauauuacaaauuggaaacauaaucucaauauggauuagccacucaauucaacuugggaaucaaaaucagauugaaacaugcaaucaaagcgucacuauucaugaaaacaacacuuggguaaaucagacauauguuaacaucagcaacaccaacuuugcugcuggacagucagugguuuccgugaaauuagcgggcaauuccucucucugcccuguuaguggaugggcuauauacaguaaagacaacaguauaagaaucgguuccaagggggauguguuugucauaagggaaccauucauaucaugcucccccuuggaaugcagaaccuucuucuugacucaaggggccuugcuaaaugacaaacauuccaauggaaccauuaaagacaggagcccauaucgaacccuaaugagcuguccuauuggugaaguucccucuccauacaacucaagauuugagucagucgcuuggucagcaagugcuugucaugauggcaucaauuggcuaacaauuggaauuucuggcccagacaauggggcaguggcuguguuaaaguacaacggcauaauaacagacacuaucaagaguuggagaaacaauauauugagaacacaagagucugaaugugcauguguaaaugguucuugcuuuacuguaaugaccgauggaccaagugauggacaggccucauacaagaucuucagaauagaaaagggaaagauagucaaaucagucgaaaugaaugccccuaauuauuacuaugaggaaugcuccuguuauccugauucuagugaaaucacaugugugugcagggauaacuggcauggcucgaaucgaccgugggugucuuucaaccagaaucuggaauaucagauaggauacauaugcagugggauuuucggagacaauccacgcccuaaugauaagaaaggcaguugugguccaguaucgucuaauggagcaaauggaguaaaaggauuuucauucaaauacggcaaugguguuuggauagggagaacuaaaagcauuaguucaagaaacgguuuugagaugauuugggauccgaacggauggacugggacagacaacaacuucucaauaaagcaagauaucguaggaauaaaugaauggucaggauauagcgggaguuuuguucagcauccagaacuaacagggcuggauuguauaagaccuugcuucuggguugaacuaaucagagggcgacccaaagagaacacaaucuggacuagcgggagcagcauauccuuuugugguguaaacagugacacuguggguuggucuuggccagacggugcugaguugccauuuaccauugacaaguaa

SEQ ID NO: 56479 - RNA, 1410 nt, Artificial Sequence
  derived and/or modified CDS sequence (wt) from neuraminidase__InfluenzaA__AHL80919
augaauccaaaccaaaagauaauaaccauugguucggucuguaugacaauuggaauggcuaacuuaauauuacaaauuggaaacauaaucucaauauggauuagccacucaauucaacuugggaaucaaagucagauugaaacaugcaaucaaagcgucauuacuuaugaaaacaacacuuggguaaaucagacauauguuaacaucagcaacaccaacuuugcugcuggacagucagugguuuccgugaaauuagcgggcaauuccucucucugcccuguuaguggaugggcuauauacaguaaagacaacaguauaagaaucgguuccaagggggauguguuugucauaagggaaccauucauaucaugcucccccuuggaaugcagaaccuucuucuugacucaaggggccuugcuaaaugacaaacauuccaauggaaccauuaaagacaggagcccauaucgaacccuaaugagcuguccuacuggugaaguucccucuccauacaacucaagauuugagucagucgcuuggucagcaagugcuugucaugauggcaucaauuggcuaacaauuggaauuucuggcccagacaauggggcaguggcuguguuaaaguacaacggcauaauaacagacacuaucaagaguuggagaaacaauauauugagaacacaagagucugaaugugcauguguaaaugguucuugcuuuaccauaaugaccgauggaccaagugauggacaggccucauacaagaucuucagaauagaaaagggaaagauagucaaaucagucgaaaugaaugccccuaauuaucacuaugaggaaugcuccuguuauccugauucuagugaaaucacaugugugugcagggauaacuggcauggcucgaaucgaccgugggugucuuucaaccagaaucuggaauaucagauaggauacauaugcagugggauuuucggagacaauccacgcccuaaugauaagacaggcaguugugguccaguaucgucuaauggagcaaauggaguaaaaggauuuucauucaaauacggcaaugguguuuggauagggagaacuaaaagcauuaguucaagaaaagguuuugagaugauuugggauccaaacggauggacugggacagacaauaacuucucaauaaagcaagauaucguaggaauaaaugaguggucaggauauagcgggaguuuuguucagcauccagaacuaacagggcuggacuguauaagaccuugcuucuggguugaacuaaucagagggcgacccaaagagaacacaaucuggacuagcgggagcagcauauccuuuugugguguaaacagugacacuguggguuggucuuggccagacggugcugaguugccauuuaccauugacaaguaa

SEQ ID NO: 56480 - RNA, 1410 nt, Artificial Sequence
  derived and/or modified CDS sequence (wt) from neuraminidase__InfluenzaA__AHL80930
augaauccaaaucaaaagauaauaacgauuggcucuguuucucucaccauuuccacaauaugcuucuucaugcaaauugccaucuugauaacuacuguaacauugcauuucaagcaauaugaauucaacucccccccaaacaaccaagugaugcugugugaaccaacaauaauagaaagaaacauaacagagauaguguaucugaccaacaccaccauagagaaggaaauaugccccaaacuagcagaauacagaaauuggucaaagccgcaaugugacauuacaggauuugcaccuuuuucuaaggacaauucgauuaggcuuuccgcugguggggacaucugggugacaagagaaccuuaugugucaugcgauccugacaaguguuaucaauuugcccuuggacagggaacaacacuaaacaacgugcauucaaauaacacaguacgugauaggaccccuuaucggacccuauugaugaaugaguuagguguuccuuuucaucuggggaccaagcaagugugcauagcaugguccagcucaaguugucacgauggaaaagcauggcugcauguuuguauaacgggggaugauaaaaaugcaacugcuagcuucauuuacaaugggaggcuuguagauaguguuguuucaugguccaaagaaauccuuaggacccaggagucagaaugcguuuguaucaauggaacuuguacaguaguaaugacugaugggagugcuucaggaaaagcugauacuaaaauacuauucauugaggaggggaaaaucguucauacuagcacauugucaggaagugcucagcaugucgaggagugcucuugcuauccucgauauccuggugucagaugugucugcagagacaacuggaaaggcuccaauaggcccaucguagauauaaacauaaaggaucauagcauuguuuccaguuauguguguucaggacuuguuggagacacacccagaaaaaacgacagcuccagcaguagccauuguuuggauccuaacaaugaagaagguggucauggagugaaaggcugggccuuugaugauggaaaugacguguggaugggaagaacgaucaacgagacgucacguuuaggguaugaaaccuucaaagucauugaaggcugguccaacccuaaguccaaauugcagauaaauaggcaagucauaguugacagagguaauagguccgguuauucugguauuuucucuguugaaggcaaaagcugcaucaaucggugcuuuuauguggaguugauuaggggaagaaaagaggaaacugaagucuuguggaccucaaacaguauuguuguguuuuguggcaccucagguacauauggaacaggcucauggccugauggggcggaccucaaucucaugccuauauaa

SEQ ID NO: 56481 - RNA, 1410 nt, Artificial Sequence; identical to SEQ ID NO: 56480
  derived and/or modified CDS sequence (wt) from neuraminidase__InfluenzaA__AHL80949

SEQ ID NO: 56482 - RNA, 1410 nt, Artificial Sequence
  derived and/or modified CDS sequence (wt) from neuraminidase__InfluenzaA__AHL80961
augaauccaaaccaaaagauaauaaccauugguucggucuguaugacaauuggaauggcuaacuuaauauuacaaauuggaaacauaaucucaauauggauuagccacucaauucaacuugggaaucaaaaucagauugaaacaugcaaucaaagcgucauuacuuaugaaaacaacacuuggguaaaucagacauauguuaacaucagcaacaccaacuuugcugcuggacagucaguggucuccgugaaauuagcgggcaauuccucucucugcccuguuaguggaugggcuauauacaguaaagacaacaguauaagaaucgguuccaagggggauguguuugucauaagggaaccauucauaucaugcucccccuuggaaugcagaaccuucuucuugacucaaggggccuugcuaaaugacaaacauuccaauggaaccauuaaagacaggagcccauaucgaacccuaaugagcuguccuauuggugaaguucccucuccauacaacucaagauuugagucagucgcuuggucagcaagugcuugucaugauggcaucaauuggcuaacaauuggaauuucuggcccagacaauggggcaguggcuguguuaaaguacaacggcauaauaacagacacuaucaagaguuggagaaacaauauauugagaacacaagagucugaaugugcauguguaaaugguucuugcuuuaccauaaugaccgauggaccaagugauggacaggccucauacaagaucuucagaauagaaaagggaaagauagucaaaucagucgaaaugaaugccccuaauuaucacuaugaggaaugcuccuguuauccugauucuagugaaaucacaugugugugcagggauaacuggcauggcucgaaucgaccgugggugucuuucaaccagaaucuggaauaucagauaggauacauaugcagugggauuuucggagacaauccacgcccuaaugauaagacaggcaguugugguccaguaucgucuaauggagcaaauggaguaaaaggauuuucauucaaauacggcaaugguguuuggauagggagaacuaaaagcauuaguucaagaaaagguuuugagaugauuugggauccaaacggauggacugggacagacaauaacuucucaauaaagcaagaugucguaggaauaaaugaguggucaggauauagcgggaguuuuguucagcauccagaacuaacagggcuggacuguauaagaccuugcuucuggguugaacuaaucagagggcgacccaaagagaacacaaucuggacuagcgggagcagcauauccuuuugugguguaaacagugacacuguggguuggucuuggccagacggugcugaguugccauuuaccauugacaaguaa

SEQ ID NO: 56483 - RNA, 1410 nt, Artificial Sequence; identical to SEQ ID NO: 56482
  derived and/or modified CDS sequence (wt) from neuraminidase__InfluenzaA__AHL80972

SEQ ID NO: 56484 - RNA, 1410 nt, Artificial Sequence; identical to SEQ ID NO: 56480
  derived and/or modified CDS sequence (wt) from neuraminidase__InfluenzaA__AHL80983

SEQ ID NO: 56485 - RNA, 1410 nt, Artificial Sequence; identical to SEQ ID NO: 56480
  derived and/or modified CDS sequence (wt) from neuraminidase__InfluenzaA__AHL80992

SEQ ID NO: 56486 - RNA, 1410 nt, Artificial Sequence; identical to SEQ ID NO: 56480
  derived and/or modified CDS sequence (wt) from neuraminidase__InfluenzaA__AHL81004

SEQ ID NO: 56487 - RNA, 1410 nt, Artificial Sequence
  derived and/or modified CDS sequence (wt) from neuraminidase__InfluenzaA__AHL81016
augaauccaaaucaaaagauaauaacgauuggcucuguuucucucaccauuuccacaauaugcuucuucaugcaaauugccaucuugauaacuacuguaacauugcauuucaagcaauaugaauucaacucccccccaaacaaccaagugaugcugugugaaccaacaauaauagaaagaaacauaacagagauaguguaucugaccaacaccaccauagagaaggaaauaugccccaaacuagcagaauacagaaauuggucaaagccgcaaugugacauuacaggauuugcaccuuuuucuaaggacaauucgauuaggcuuuccgcugguggggacaucugggugacaagagaaccuuaugugucaugcgauucugacaaguguuaucaauuugcccuuggacagggaacaacacuaaacaacgugcauucaaauaacacaguacgugauaggaccccuuaucggacccuauugaugaaugaguuagguguuccuuuucaucuggggaccaagcaagugugcauagcaugguccagcucaaguugucacgauggaaaagcauggcugcauguuuguauaacgggggaugauaaaaaugcaacugcuagcuucauuuacaaugggaggcuuguagauaguguuguuucaugguccaaagaaauccucaggacccaggagucagaaugcguuuguaucaauggaacuuguacaguaguaaugacugaugggagugcuucaggaaaagcugauacuaaaauacuauucauugaggaggggaaaaucguucauacuagcacauugucaggaagugcucagcaugucgaggagugcucuugcuauccucgauauccuggugucagaugugucugcagagacaacuggaaaggcuccaauaggcccaucguagauauaaacauaaaggaucauagcauuguuuccaguuauguguguucaggacuuguuggagacacacccagaaaaaacgacagcuccagcaguagccauuguuuggauccuaacaaugaagaagguggucauggagugaaaggcugggccuuugaugauggaaaugacguauggaugggaagaacgaucaacgagacgucacguuuaggguaugaaaccuucaaagucauugaaggcugguccaacccuaaguccaaauugcagauaaauaggcaagucauaguugacagagguaauagguccgguuauucugguauuuucucuguugaaggcaaaagcugcaucaaucggugcuuuuauguggaguugauuaggggaagaaaagaggaaacugaagucuuguggaccucaaacaguauuguuguguuuuguggcaccucagguacauauggaacaggcucauggccugauggggcggaccucaaucucaugccuauauaa

SEQ ID NO: 56488 - RNA, 1410 nt, Artificial Sequence; identical to SEQ ID NO: 56480
  derived and/or modified CDS sequence (wt) from neuraminidase__InfluenzaA__AHL81028

SEQ ID NO: 56489 - RNA, 1410 nt, Artificial Sequence
  derived and/or modified CDS sequence (wt) from neuraminidase__InfluenzaA__AHL81040
augaauccaaaucaaaagauaauaacgauuggcucuguuucucucaccauuuccacaauaugcuucuucaugcaaauugccaucuugauaacuacuguaacauugcauuucaagcaauaugaauucaacucucccccaaacaaccaagugaugcugugugaaccaacaauaauagaaagaaacauaacagagauaguguaucugaccaacaccaccauagagaaggaaauaugccccaaacuagcagaauacagaaauuggucaaagccgcaaugugacauuacaggauuugcaccuuuuucuaaggacaauucgauuaggcuuuccgcugguggggacaucugggugacaagagaaccuuaugugucaugcgauccugacaaguguuaucaauuugcccuuggacagggaacaacacuaaacaacgugcauucaaauaacacaguacgugauaggaccccuuaucggacccuauugaugaaugaguuagguguuccuuuucaucuggggaccaagcaagugugcauagcaugguccagcucaaguugucacgauggaaaagcauggcugcauguuuguauaacgggggaugauaaaaaugcaacugcuagcuucauuuacaaugggaggcuuguagauagcguuguuucaugguccaaagaaauccucaggacccaggagucagaaugcguuuguaucaauggaacuuguacaguaguaaugacugaugggagugcuucaggaaaagcugauacuaaaauacuauucauugaggaggggaaaaucguucauacuagcacauugucaggaagugcucagcaugucgaggagugcucuugcuauccucgauauccuggugucagaugugucugcagagacaacuggaaaggcuccaauaggcccaucguagauauaaacauaaaggaucauagcauuguuuccaguuauguguguucaggacuuguuggagacacacccagaaaaaacgacagcuccagcaguagccauuguuuggauccuaacaaugaagaagguggucauggagugaaaggcugggccuuugaugauggaaaugacguguggaugggaagaacgaucaacgagacgucacguuuaggguaugaaaccuucaaagucauugaaggcugguccaacccuaaguccaaauugcagauaaauaggcaagucauaguugacagagguaauagguccgguuauucugguauuuucucuguugaaggcaaaagcugcaucaaucggugcuuuuauguggaguugauuaggggaagaaaagaggaaacugaagucuuguggaccucaaacagcauuguuguguuuuguggcaccucagguacauauggaacaggcucauggccugauggggcggaccucaaucucaugccuauauaa

SEQ ID NO: 56490 - RNA, 1410 nt, Artificial Sequence; identical to SEQ ID NO: 56489
  derived and/or modified CDS sequence (wt) from neuraminidase__InfluenzaA__AHL81052

SEQ ID NO: 56491 - RNA, 1410 nt, Artificial Sequence; identical to SEQ ID NO: 56482
  derived and/or modified CDS sequence (wt) from neuraminidase__InfluenzaA__AHL81064

SEQ ID NO: 56492 - RNA, 1410 nt, Artificial Sequence; identical to SEQ ID NO: 56482
  derived and/or modified CDS sequence (wt) from neuraminidase__InfluenzaA__AHL81075

SEQ ID NO: 56493 - RNA, 1410 nt, Artificial Sequence
  derived and/or modified CDS sequence (wt) from neuraminidase__InfluenzaA__AHL81086
augaauccaaaucaaaagauaauaacgauuggcucuguuucucucaccauuuccacaauaugcuucuucaugcaaauugccaucuugauaacuacuguaacauugcauuucaagcaauaugaauucaacucccccccaaacaaccaagugaugcuguguaaaccaacaauaauagaaagaaacauaacagagauaguguaucugaccaacaccaccauagagaaggaaauaugccccaaacuagcagaauacagaaauuggucaaagccgcaaugugacauuacaggauuugcaccuuuuucuaaggacaauucgauuagacuuuccgcugguggggacaucugggugacaagagaaccuuaugugucaugcgauccugacaaguguuaucaauuugcccuuggacaggggacaacacuaaacaacgugcauucaaauaacacaguacgugauaggaccccuuaucggacccuauugaugaaugaguuagguguuccuuuucaucuggggaccaagcaagugugcauagcaugguccagcucaaguugucacgauggaaaagcauggcugcauguuuguauaacgggggaugauaaaaaugcaacugcuagcuucauuuacaaugggaggcuuguagauaguguuguuucaugguccaaagaaauccucaggacccaggagucagaaugcguuuguaucaauggaacuuguacaguaguaaugacugaugggagugcuucaggaaaagcugauacuaaaauacuauucauugaggaggggaaaaucguucauacuagcacauugucaggaagugcucagcaugucgaggagugcucuugcuauccucgauauccuggugucagaugugucugcagagacaacuggaaaggcuccaauaggcccaucguagauauaaacauaaaggaucauagcauuguuuccaguuauguguguucaggacuuguuggagacacacccagaaaaaacgacagcuccagcaguagccauuguuuggauccuaacaaugaagaagguggucauggagugaaaggcugggccuuugaugauggaaaugacguguggaugggaagaacgaucaacgagacgucacguuuaggguaugaaaccuucaaagucauugaaggcugguccaacccuaaguccaaauugcagauaaauaggcaagucauaguugacagagguaauagguccgguuauucugguauuuucucuguugaaggcaaaagcugcaucaaucggugcuuuuauguggaguugauuaggggaagaaaagaggaaacugaagucuuguggaccucaaacaguauuguuguguuuuguggcaccucagguacauauggaacaggcucauggccugauggggcggaccucaaucucaugccuauauaa

SEQ ID NO: 56494 - RNA, 1410 nt, Artificial Sequence
  derived and/or modified CDS sequence (wt) from neuraminidase__InfluenzaA__AHL81098
augaauccaaaucaaaagauaauaacgauuggcucuguuucucucaccauuuccacaauaugcuucuucgugcaaauugccaucuugauaacuacuguaacauugcauuucaagcaauaugaauucaacucccccccaaacaaccaagugaugcugugugaaccaacaauaauagaaagaaacauaacagagauaguguaucugaccaacaccaccauagagaaggaaauaugccccaaacuagcagaauacagaaauuggucaaagccgcaaugugacauuacaggauuugcaccuuuuucuaaggacaauucgauuaggcuuuccgcugguggggacaucugggugacaagagaaccuuaugugucaugcgauccugacaaguguuaucaauuugcccuuggacagggaacaacacuaaacaacgugcauucaaauaacacaguacgugauaggaccccuuaucggacccuauugaugaaugaguuagguguuccuuuucaucuggggaccaagcaagugugcauagcaugguccagcucaagcugucacgauggaaaagcauggcugcauguuuguauaacgggggaugauaaaaaugcaacugcuagcuucauuuacaaugggaggcuuguagauaguguuguuucaugguccaaagaaauccucaggacccaggagucagaaugcguuuguaucaauggaacuuguacaguaguaaugacugaugggagugcuucaggaaaagcugauacuaaaauacuauucauugaggaggggaaaaucguucauacuagcacauugucaggaagugcucagcaugucgaggagugcucuugcuauccucgauauccuggugucagaugugucugcagagacaacuggaaaggcuccaauaggcccaucguagauauaaacauaaaggaucauagcauuguuuccaguuauguguguucaggacuuguuggagacacacccagaaaaaacgacagcuccagcaguagccauuguuuggauccuaacaaugaagaagguggucauggagugaaaggcugggccuuugaugauggaaaugacguguggaugggaagaacgaucaaugagacgucacguuuaggguaugaaaccuucaaagucauugaaggcugguccaacccuaaguccaaauugcagauaaauaggcaagucauaguugacagagggaauagguccgguuauucugguauuuucucuguugaaggcaaaagcugcaucaaucggugcuuuuauguggaguugauuaggggaagaaaagaggaaacugaagucuuguggaccucaaacaguauuguuguguuuuguggcaccucagguacauauggaacaggcucauggccugauggggcggaccucaaucucaugccuauauaa

SEQ ID NO: 56495 - RNA, 1410 nt, Artificial Sequence
  derived and/or modified CDS sequence (wt) from neuraminidase__InfluenzaA__AHL81110
augaauccaaaccaaaagauaauaaccauugguucggucuguaugacaauuggaauggcuaacuuaauauuacaaauuggaaacauaaucucaauauggauuagccacucaauucaacuugggaaucaaaaucagauugaaacaugcaaucaaagcgucauuacuuaugaaaacaacacuuggguaaaucagacauauguuaacaucagcaacaccaacuuugcugcuggacagucagugguuuccgugaaauuagcgggcaauuccucucucugcccuguuaguggaugggcuauauacaguaaagacaacaguauaagaauugguuccaagggggauguguuugucauaagggaaccauucauaucaugcucccccuuggaaugcagaaccuucuucuugacucaaggggccuugcuaaaugacaaacauuccaauggaaccauuaaagacaggagcccauaucgaacccuaaugagcuguccuauuggugaaguucccucuccauacaacucaagauuugagucagucgcuuggucagcaagugcuugucaugauggcaucaauuggcuaacaauuggaauuucuggcccagacaauggggcaguggcuguguuaaaguacaacggcauaauaacagacacuaucaagaguuggagaaacaauauauugagaacacaagagucugaaugugcauguguaaaugguucuugcuuuaccauaaugaccgauggaccaagugauggacaggccucauacaagaucuucagaauagaaaagggaaagauagucaaaucagucgaaaugaaugccccuaauuaucacuaugaggaaugcuccuguuauccugauucuagugaaaucacaugugugugcagggauaacuggcauggcucgaaucgaccgugggugucuuucaaccagaaucuggaauaucagauaggauacauaugcagugggauuuucggagacaauccacgcccuaaugauaagacaggcaguugugguccaguaucgucuaauggagcaaauggaguaaaaggauuuucauucaaauacggcaaugguguuuggauagggagaacuaaaagcauuaguucaagaaaagguuuugagaugauuugggauccaaacggauggacugggacagacaauaacuucucaauaaagcaagauaucguaggaauaaaugaguggucaggauauagcgggaguuuuguucagcauccagaacuaacagggcuggacuguauaagaccuugcuucuggguugaacuaaucagagggcgacccaaagagaacacaaucuggacuagcgggagcagcauauccuuuugugguguaaacagugacacuguggguuggucuuggccagacggugcugaguugccauuuaccauugacaaguaa

SEQ ID NO: 56496 - RNA, 1410 nt, Artificial Sequence; identical to SEQ ID NO: 56495
  derived and/or modified CDS sequence (wt) from neuraminidase__InfluenzaA__AHL81121

SEQ ID NO: 56497 - RNA, 1410 nt, Artificial Sequence; identical to SEQ ID NO: 56489
  derived and/or modified CDS sequence (wt) from neuraminidase__InfluenzaA__AHL81132

SEQ ID NO: 56498 - RNA, 1410 nt, Artificial Sequence; identical to SEQ ID NO: 56489
  derived and/or modified CDS sequence (wt) from neuraminidase__InfluenzaA__AHL81144

SEQ ID NO: 56499 - RNA, 1410 nt, Artificial Sequence; identical to SEQ ID NO: 53805
  derived and/or modified CDS sequence (wt) from neuraminidase__InfluenzaA__AHL81156

SEQ ID NO: 56500 - RNA, 1410 nt, Artificial Sequence
  derived and/or modified CDS sequence (wt) from neuraminidase__InfluenzaA__AHL81168
augaauccaaaucaaaagauaauaacgauuggcucuguuucucucaccauuuccacaauaugcuucuucaugcaaauugccaucuugauaacuacuguaacauugcauuucaagcaauaugaauucaacucccccccaaacaaccaagugaugcugugugaaccgacaauaauagaaagaaacauaacagaaauaguguaucugaccaacaccaccauagagaaggaaauaugccccaaacuagcagaauacagaaauuggucaaaaccgcaaugugacauuacaggauuugcacccuuuucuaaggacaauucgaucaggcuuuccgcugguggagacaucugggugacaagagaaccuuaugugucaugcgauccugacaaguguuaucaauuugcccuuggacagggaacaacacuaaacaacgugcauucaaauaacacaguacgugauaggaccccuuaucggacccuauugaugaaugaguuagguguuccuuuucaucuggggaccaagcaagugugcauagcaugguccagcucaaguugucacgauggaaaagcauggcugcauguuuguauaacgggggaugauaaaaaugcaacugcaagcuucauuuacaaugggaggcuuguagauaguguuguuucaugguccaaagaaauucucaggacccaggagucagaaugcguuuguaucaauggaacuuguacaguaguaaugacugauggaagugcuucaggaaaagcugauacuaaaauacuauucauugaggaggggaaaaucguucauacuagcacauugucaggaagugcucagcaugucgaggagugcucuugcuauccucgauauccuggugucagaugugucugcagagacaacuggaaaggcuccaauaggcccaucguagauauaaacauaaaggaucauagcauaguuuccaguuauguguguucaggacuuguuggagacacacccagaaaaaacgacagcuccagcaguagccauuguuuggauccuaacaaugaagaagguggucauggagugaaaggcugggccuuugaugauggaaaugacguguggaugggaagaacaaucaacgagacgucacgcuugggguaugaaaccuucaaagucauugaaggcugguccaacccuaaguccaaauugcagauaaauaggcaagucauaguugacaaagguaauagguccgguuauucugguauuuucucuguugaaggcaaaagcugcaucaaucggugcuuuuauguggaguugauuaggggaagaaaagaggaaacugaagucuuguggaccucaaacaguauuguuguguuuuguggcaccucagguacauauggaacaggcucauggccugauggggcugaccucaaucucaugccuauauaa

SEQ ID NO: 56501 - RNA, 1410 nt, Artificial Sequence; identical to SEQ ID NO: 56500
  derived and/or modified CDS sequence (wt) from neuraminidase__InfluenzaA__AHL81180

SEQ ID NO: 56502 - RNA, 1410 nt, Artificial Sequence; identical to SEQ ID NO: 56480
  derived and/or modified CDS sequence (wt) from neuraminidase__InfluenzaA__AHL81192

SEQ ID NO: 56503 - RNA, 1410 nt, Artificial Sequence
  derived and/or modified CDS sequence (wt) from neuraminidase__InfluenzaA__AHL81215
augaauccaaaucaaaagauaauaacgauuggcucuguuucucucaccauuuccacaauaugcuucuucaugcaaauugccaucuugauaacuacuguaacauugcauuucaagcaauaugaauucaacucccccccaaacaaccaagugaugcugugugaaccaacaauaauagaaagaaacauaacagagauaauguaucugaccaacaccaccauagagaaggaaauaugccccaaacuagcagaauacagaaauuggucaaagccgcaaugugacauuacaggauuugcaccuuuuucuaaggacaauucgauuaggcuuuccgcugguggggacaucugggugacaagagaaccuuaugugucaugcgauccugacaaguguuaucaauuugcccuuggacagggaacaacacuaaacaacgugcauucaaauaacacaguacgugauaggaccccuuaucggacccuauugaugaaugaguuagguguuccuuuucaucuggggaccaagcaagugugcauagcaugguccagcucaaguugucacgauggaaaagcauggcugcauguuuguauaacgggggaugauaaaaaugcaacugcuagcuucauuuacaaugggaggcuuguagauaguguuguuucaugguccaaagaaauccucaggacccaggagucagaaugcguuuguaucaauggaacuuguacaguaguaaugacugaugggagugcuucaggaaaagcugauacuaaaauacuauucauugaggaggggaaaaucguucauacuagcacauugucaggaagugcucagcaugucgaggagugcucuugcuauccucgauauccuggugucagaugugucugcagagacaacuggaaaggcuccaauaggcccaucguagauauaaacauaaaggaucauagcauuguuuccaguuauguguguucaggacuuguuggagacacacccagaaaaaacgacagcuccagcaguagccauuguuuggauccuaacaaugaagaagguggucauggagugaaaggcugggccuuugaugauggaaaugacguguggaugggaagaacgaucaacgagacgucacguuuaggauaugaaaccuucaaagucauugaaggcugguccaacccuaaguccaaauugcagauaaauaggcaagucauaguugacagagguaauagguccgguuauucugguauuuucucuguugaaggcaaaagcugcaucaaucggugcuuuuauguggaguugauuaggggaagaaaagaggaaacugaagucuuguggaccucaaacaguauuguuguguuuuguggcaccucagguacauauggaacaggcucauggccugauggggcggaccucaauuucaugccuauauaa

SEQ ID NO: 56504 - RNA, 1410 nt, Artificial Sequence
  derived and/or modified CDS sequence (wt) from neuraminidase__InfluenzaA__AHL81227
augaauccaaaccaaaagauaauaaccauugguucggucuguaugacaauuggaauggcuaacuuaauauuacaaauuggaaacauaaucucaauauggauuagccacucaauucaacuugggaaucaaagucagauugaaacaugcaaucaaagcgucauuacuuaugaaaacaacacuuggguaaaucagacauauguuaacaucagcaacaccaacuuugcugcuggacagucagugguuuccgugaaauuagcgggcaauuccucucucugcccuguuaguggaugggcuauauacaguaaagacaacaguauaagaaucgguuccaagggggauguguuugucauaagggaaccauucauaucaugcucccccuuggaaugcagaaccuucuucuugacucaaggggccuugcuaaaugacaaacauuccaauggaaccauuaaagacaggagcccauaucgaacccuaaugagcuguccuacuggugaaguucccucuccauacaacucaagauuugagucagucgcuuggucagcaagugcuugucaugauggcaucaauuggcuaacaauuggaauuucuggcccagacaauggggcaguggcuguguuaaaguacaacggcauaauaacagacacuaucaagaguuggagaaacaauauauugagaacacaagagucugaaugugcauguguaaaugguucuugcuuuaccauaaugaccgauggaccaagugauggacaggccucauacaagaucuucagaauagaaaagggaaagauagucaaaucagucgaaaugaaugccccuaauuaucacuaugaggaaugcuccuguuauccugauucuagugaaaucacaugugugugcagggauaacuggcauggcucgaaucgaccgugggugucuuucaaccagaaucuggaauaucagauaggauacauaugcagugggauuuucggagacaauccacgcccuaaugauaagacaggcaguugugguccaguaucgucuaauggagcaaauggaguaaaaggauuuucauucaaauacggcaaugguguuuggauagggagaacuaaaagcauuagcucaagaaaagguuuugagaugauuugggauccaaacggauggacugggacagacaauaacuucucaauaaagcaagauaucauaggaauaaaugaguggucaggauauagcgggaguuuuguucagcauccagaacuaacagggcuggauuguauaagaccuugcuucuggguugaacuaaucagagggcgacccaaggagaacacaaucuggacuagcgggagcagcauauccuuuugugguguaaacagugacacuguggguuggucuuggccagacggugcugaguugccauuuaccauugacaaguaa

SEQ ID NO: 56505 - RNA, 1410 nt, Artificial Sequence; identical to SEQ ID NO: 56489
  derived and/or modified CDS sequence (wt) from neuraminidase__InfluenzaA__AHL81238

SEQ ID NO: 56506 - RNA, 1410 nt, Artificial Sequence; identical to SEQ ID NO: 56489
  derived and/or modified CDS sequence (wt) from neuraminidase__InfluenzaA__AHL81250

SEQ ID NO: 56507 - RNA, 1410 nt, Artificial Sequence; identical to SEQ ID NO: 56489
  derived and/or modified CDS sequence (wt) from neuraminidase__InfluenzaA__AHL81262

SEQ ID NO: 56508 - RNA, 1410 nt, Artificial Sequence; identical to SEQ ID NO: 56489
  derived and/or modified CDS sequence (wt) from neuraminidase__InfluenzaA__AHL81274

SEQ ID NO: 56509 - RNA, 1410 nt, Artificial Sequence; identical to SEQ ID NO: 56489
  derived and/or modified CDS sequence (wt) from neuraminidase__InfluenzaA__AHL81286

SEQ ID NO: 56510 - RNA, 1410 nt, Artificial Sequence; identical to SEQ ID NO: 56489
  derived and/or modified CDS sequence (wt) from neuraminidase__InfluenzaA__AHL81298

SEQ ID NO: 56511 - RNA, 1410 nt, Artificial Sequence; identical to SEQ ID NO: 56482
  derived and/or modified CDS sequence (wt) from neuraminidase__InfluenzaA__AHL81310

SEQ ID NO: 56512 - RNA, 1410 nt, Artificial Sequence
  derived and/or modified CDS sequence (wt) from neuraminidase__InfluenzaA__AHL81332
augaauccaaaccaaaagauaauaaccauugguucggucuguaugacaauuggaauggcuaacuuaauauuacaaauuggaaacauaaucucaauauggauuagccacucaauucaacuugggaaucaaaaucagauugaaacaugcaaucaaagcgucauuacuuaugaaaacaacacuuggguaaaucagacauauguuaacaucagcaacaccaacuuugcugcuggacagucaguggucuccgugaaauuagcgggcaauuccucucucugcccuguuaguggaugggcuauauacaguaaagacaacaguauaagaaucgguuccaagggggauguguuugucauaagggaaccauucauaucaugcucccccuuggaaugcagaaccuucuucuugacucaaggggccuugcuaaaugacaaacauuccaauggaaccauuaaagacaggagcccauaucgaacucuaaugagcuguccuauuggugaaguucccucuccauacaacucaagauuugagucagucgcuuggucagcaagugcuugucaugauggcaucaauuggcuaacaauuggaauuucuggcccagacaauggggcaguggcuguguuaaaguacaacggcauaauaacagacacuaucaagaguuggagaaacaauauauugagaacacaagagucugaaugugcauguguaaaugguucuugcuuuaccauaaugaccgauggaccaagugauggacaggccucauacaagaucuucagaauagaaaagggaaagauagucaaaucagucgaaaugaaugccccuaauuaucacuaugaggaaugcuccuguuauccugauucuagugaaaucacaugugugugcagggauaacuggcauggcucgaaucgaccgugggugucuuucaaccagaaucuggaauaucagauaggauacauaugcagugggauuuucggagacaauccacgcccuaaugauaagacaggcaguugugguccaguaucgucuaauggagcaaauggaguaaaaggauuuucauucaaauacggcaaugguguuuggauagggagaacuaaaagcauuaguucaagaaaagguuuugagaugauuugggauccaaacggauggacugggacagacaauaacuucucaauaaagcaagauaucguaggaauaaaugaguggucaggauauagcgggaguuuuguucagcauccagaacuaacagggcuggacuguauaagaccuugcuucuggguugaacuaaucagagggcgacccaaagagaacacaaucuggacuagcgggagcagcauauccuuuugugguguaaacagugacacuguggguuggucuuggccagacggugcugaguugccauuuaccauugacaaguaa

SEQ ID NO: 56513 - RNA, 1410 nt, Artificial Sequence
  derived and/or modified CDS sequence (wt) from neuraminidase__InfluenzaA__AHL81343
augaauccaaaucaaaagauaauaacgauuggcucuguuucucuuaccauuuccacaauaugcuuccucaugcaaauugccaucuugauaacuacuguaacauugcauuucaagcaauaugaauucaacucccccccaaacaaccaagugaugcugugugaaccaacaauaauagaaagaaacauaacagagauaguguaccugaccaacaccaccauagagaaggaaauaugccccaaacuagcagaauacagaaauuggucaaagccgcaaugugacauuacaggguuugcaccuuuuucuaaggacaauucgauuaggcuuuccgcugguggggacaucugggugacaagagaaccuuaugugucaugcgauccugacaaguguuaucaauuugcccuuggacagggaacaacacuaaacaacguacauucaaauaacacaguacgugauaggaccccuuaucggacccuauugaugaaugaguuagguguuccuuuucaucuggggaccaagcaagugugcauagcaugguccagcucaaguugucacgauggaaaagcauggcugcauguuuguauaacgggggacgauaaaaaugcaacugcuagcuucauuuacaaugggaggcuuguagauaguguuguuucaugguccaaagaaauccucaggacccaggagucagaaugcguuuguaucaauggaacuuguacaguaguaauuacugaugggagugcuucaggaaaagcugauacuaaaauacuauucauugaggaggggaaaaucguucauacuagcacauugucaggaagugcucagcaugucgaggagugcuccugcuauccucgauauccuggugucagaugugucugcagagacaacuggaaaggauccaauaggcccaucguagauauaaacauaaaggaucauagcauugucuccaguuauguguguucaggacuuguuggagacacacccagaaaaaacgacagcuccagcaguagccauuguucggacccuaacaaugaggaagguggucauggggugaaaggcugggccuuugaugauggaaaugacguguggaugggaagaacgaucagcgagaagucacgcuuaggauaugaaaccuucaaagucauugaaggcugguccaacccuaaguccaaauugcagauaaauaggcaagucauaguugacagagguaauagguccgguuauucugguauuuucucuguugaaggcaaaagcugcaucaaucggugcuuuuauguggaguugauaaggggaagaaaagaggaaacugaagucuuguggaccucaaacaguauuguuguguuuuguggcaccucagguacauauggaacaggcucauggccugauggggcggauaucaaucucaugccuauauaa

SEQ ID NO: 56514 - RNA, 1410 nt, Artificial Sequence; identical to SEQ ID NO: 56489
  derived and/or modified CDS sequence (wt) from neuraminidase__InfluenzaA__AHL81355

SEQ ID NO: 56515 - RNA, 1410 nt, Artificial Sequence
  derived and/or modified CDS sequence (wt) from neuraminidase__InfluenzaA__AHL81367
augaauccaaaccaaaagauaauaaccauugguucggucuguaugacaauuggaauggcuaacuuaauauuacaaauuggaaacauaaucucaauauggauuagccacucaauucaacuugggaaucaaaaucagauugaaacaugcaaucaaagcgucauuacuuaugaaaacaacacuuggguaaaucagacauauguuaacaucagcaacaccaacuuugcugcuggacagucagugguuuccgugaaauuagcgggcaauuccucucucugcccuguuaguggaugggcuauauacaguaaagacaacaguauaagaauugguuccaagggggauguguuugucauaagggaaccauucauaucaugcucccccuuggaaugcagaaccuucuucuugacucaaggggccuugcuaaaugacaaacauuccaauggaaccauuaaagacaggagcccauaucgaacccuaaugagcuguccuauuggugaaguucccucuccauacaauucaagauuugagucagucgcuuggucagcaagugcuugucaugauggcaucaauuggcuaacaauuggaauuucuggcccagacaauggggcaguggcuguguuaaaguacaacggcauaauaacagacacuaucaagaguuggagaaacaauauauugagaacacaagagucugaaugugcauguguaaaugguucuugcuuuaccauaaugaccgauggaccaagugauggacaggccucauacaagaucuucagaauagaaaagggaaagauagucaaaucagucgaaaugaaugccccuaauuaucacuaugaggaaugcuccuguuauccugauucuagugaaaucacaugugugugcagggauaacuggcauggcucgaaucgaccgugggugucuuucaaccagaaucuggaauaucagauaggauacauaugcagugggauuuucggagacaauccacgcccuaaugauaagacaggcaguugugguccaguaucgucuaauggagcaaauggaguaaaaggauuuucauucaaauacggcaaugguguuuggauagggagaacuaaaagcauuaguucaagaaaagguuuugagaugauuugggauccaaacggauggacugggacagacaauaacuucucaauaaagcaagauaucguaggaauaaaugaguggucaggauauagcgggaguuuuguucagcauccagaacuaacagggcuggacuguauaagaccuugcuucuggguugaacuaaucagagggcgacccaaagagaacacaaucuggacuagcgggagcagcauauccuuuugugguguaaacagugacacuguggguuggucuuggccagacggugcugaguugccauuuaccauugacaaguaa

SEQ ID NO: 56516 - RNA, 1410 nt, Artificial Sequence; identical to SEQ ID NO: 56495
  derived and/or modified CDS sequence (wt) from neuraminidase__InfluenzaA__AHL81378

SEQ ID NO: 56517 - RNA, 1410 nt, Artificial Sequence; identical to SEQ ID NO: 56495
  derived and/or modified CDS sequence (wt) from neuraminidase__InfluenzaA__AHL81389

SEQ ID NO: 56518 - RNA, 1410 nt, Artificial Sequence; identical to SEQ ID NO: 56489
  derived and/or modified CDS sequence (wt) from neuraminidase__InfluenzaA__AHL81400

SEQ ID NO: 56519 - RNA, 1410 nt, Artificial Sequence; identical to SEQ ID NO: 56503
  derived and/or modified CDS sequence (wt) from neuraminidase__InfluenzaA__AHL81412

SEQ ID NO: 56520 - RNA, 1410 nt, Artificial Sequence; identical to SEQ ID NO: 56466
  derived and/or modified CDS sequence (wt) from neuraminidase__InfluenzaA__AHL81422

SEQ ID NO: 56521 - RNA, 1410 nt, Artificial Sequence; identical to SEQ ID NO: 56476
  derived and/or modified CDS sequence (wt) from neuraminidase__InfluenzaA__AHL81433

SEQ ID NO: 56522 - RNA, 1410 nt, Artificial Sequence
  derived and/or modified CDS sequence (wt) from neuraminidase__InfluenzaA__AHL88954
augaauccaaaucaaaagauaauaacgauuggcucuguuucucucaccauuuccacaauaugcuucuucaugcaaauugccaucuugauaacuacuguaacauugcauuucaagcaauaugaauucaacucccccccaaacaaccaagugaugcugugugaaccaacaauaauagaaagaaacauaacagagauaguguaucugaccaacaccaccauagagaaggaaauaugccccaaacuagcagaauacagaaauuggucaaaaccgcaauguaacauuacaggauuugcaccuuuuucuaaggacaauucgauuaggcuuuccgcugguggggacaucugggugacaagagaaccuuaugugucaugcgauccugacaaguguuaucaauuugcccuuggacagggaacaacacuaaacaacgugcauucaaaugacacaguacaugauaggaccccuuaucggacccuauugaugaaugaguuagguguuccauuucaucuggggaccaagcaagugugcauagcaugguccagcucaaguugucacgauggaaaagcauggcugcauguuuguguaacgggggaugauaaaaaugcaacugcuagcuucauuuacaaugggaggcuuguagauaguauuguuucaugguccaaagaaauccucaggacccaggagucagaaugcguuuguaucaauggaacuuguacaguaguaaugacugaugggagugcuucaggaaaagcugauacuaaaauacuauucauuaaggaggggaaaaucguucauacuagcacauugucaggaagugcucagcaugucgaggaguguuccugcuauccucgauauccuggugucagaugugucugcagagacaacuggaaaggcuccaauaggcccauaguagauauaaacauaaaggauuauagcauuguuuccaguuaugugugcucaggacuuguuggagacacacccagaaaaaacgacagcuccagcaguagccauugcuuggauccuaacaaugaagaagguggucauggagugaaaggcugggccuuugaugauggaaaugacguguggaugggaagaacgaucagcgagaaguuacgcucaggauaugaaaccuucaaagucauugaaggcugguccaacccuaauuccaaauugcagauaaauaggcaagucauaguugacagagauaauagguccgguuauucugguauuuucucuguugaaggcaaaagcugcaucaaucggugcuuuuauguggaguugauaaggggaagaaaagaggaaacugaagucuuguggaccucaaacaguauuguuguguuuuguggcaccucagguacauauggaacaggcucauggccugauggggcggauaucaaucucaugccuauauaa

SEQ ID NO: 56523 - RNA, 1410 nt, Artificial Sequence
  derived and/or modified CDS sequence (wt) from neuraminidase__InfluenzaA__AHL89033
augaauccaaaucaaaagauaauaacgauuggcucuguuucucucaccauuuccacaauaugcuucuucaugcaaauugccaucuugauaacuacuguaacauugcauuucaagcaauaugaauucaacucccccccaaacaaccaagugaugcugugugaaccaacaauaauagaaagaaacauaacagagauaguguaucugaccaacaccaccauagagaaggaaauaugccccaaacuagcagaauacagaaauuggucaaaaccgcaauguaacauuacaggauuugcaccuuuuucuaaggacaauucgauuaggcuuuccgcugguggggacaucugggugacaagagaaccuuaugugucaugcgauccugacaaguguuaucaauuugcccuuggacagggaacaacacuaaacaacgugcauucaaaugacacaguacaugauaggaccccuuaucggacccuauugaugaaugaguuagguguuccauuucaucuggggaccaagcaagugugcauagcaugguccagcucaaguugucacgauggaaaagcauggcugcauguuuguguaacgggggaugauaaaaaugcaacugcuagcuucauuuacaaugggaggcuuguagauaguauuguuucaugguccaaagaaauccucaggacccaggagucagaaugcguuuguaucaauggaacuuguacaguaguaaugacugaugggagugcuucaggaaaagcugauacuaaaauacuauucauugaggaggggaaaaucguucauacuagcacauugucaggaagugcucagcaugucgaggaguguuccugcuauccucgauauccuggugucagaugugucugcagagacaacuggaaaggcuccaauaggcccauaguagauauaaacauaaaggauuauagcauuguuuccaguuaugugugcucaggacuuguuggagacacacccagaaaaaacgacagcuccagcaguagccauugcuuggauccuaacaaugaagaagguggucauggagugaaaggcugggccuuugaugauggaaaugacguguggaugggaagaacgaucagcgagaaguuacgcucaggauaugaaaccuucaaagucauugaaggcugguccaacccuaauuccaaauugcagauaaauaggcaagucauaguugacagagguaauagguccgguuauucugguauuuucucuguugaagacaaaagcugcaucaaucggugcuuuuauguggaguugauaaggggaagaaaagaggaaacugaagucuuguggaccucaaacaguauuguuguguuuuguggcaccucagguacauauggaacaggcucauggccugauggggcggauaucaaucucaugccuauauaa

SEQ ID NO: 56524 - RNA, 1410 nt, Artificial Sequence
  derived and/or modified CDS sequence (wt) from neuraminidase__InfluenzaA__AHL89045
augaauccaaaucaaaagauaauaacgauuggcucuguuucucucaccauuuccacaauaugcuucuucaugcaaauugccaucuugauaacuacuguaacauugcauuucaagcaauaugaauucaacucccccccaaacaaccaagugaugcugugugaaccaacaauaauagaaagaaacauaacagagauaguguaucugaccaacaccaccauagagaaggaaauaugccccaaacuagcagaauacagaaauuggucaaagccgcaauguaacauuacaggauuugcacccuuuucuaaggacaauucgauuaggcuuuccgcugguggggacaucugggugacaagagaaccuuaugugucaugcgauccugacaaguguuaucaauuugcccuuggacagggaacaacacuaaacaacgugcauucaaaugacacaguacaugauaggaccccuuaucggacccuauugaugaaugaguuagguguuccauuucaucuggggaccaagcaagugugcauagcaugguccagcucaaguugucacgauggaaaagcauggcugcauguuuguguaacgggggaugauaaaaaugcaacugcuagcuucauuuacaaugggaggcuuguagauaguauuguuucaugguccaaagaaauccucaggacccaggagucagaaugcguuuguaucaauggaacuuguacaguaguaaugacugaugggagugcuucaggaaaagcugauacuaaaauacuauucauugaggaggggaaaaucguucauacuagcacauugucaggaagugcucagcaugucgaggagugcuccugcuauccucgacauccuggugucagaugugucugcagagacaacuggaagggcuccaauaggcccauaguagauauaaacauaaaggauuauagcauuguuuccaguuaugugugcucaggacuuguuggagacacacccagaaaaaacgacagcuccagcaguagccauugcuuggauccuaacaaugaagaagguggucauggagugaaaggcugggccuuugaugauggaaaugacguguggaugggaagaacgaucagcgagaaguuacgcucaggauaugaaaccuucaaagucauugaaggcugguccaacccuaauuccaaauugcagacaaauaggcaagucauaguugacagagguaauagguccgguuauucugguauuuucucuguugaaggcaaaagcugcaucaaucggugcuuuuauguggaguugauaaggggaagaaaagaggaaacugaagucuuguggaccucaaacaguauuguuguguuuuguggcaccucagguacauauggaacaggcucauggccugauggggcggacaucaaucucaugccuauauaa

SEQ ID NO: 56525 - RNA, 1410 nt, Artificial Sequence
  derived and/or modified CDS sequence (wt) from neuraminidase__InfluenzaA__AHL89057
augaauccaaaucaaaagauaauaacgauuggcucuguuucucucaccauuuccacaauaugcuucuucaugcaaauugccaucuugauaacuacuguaacacugcauuucaagcaauaugaauucaacucccccccaaacaaccaagugaugcugugugaaccaacaauaauagaaagaaacauaacagagauaguguaucugaccaacaccaccauagagaaggaaauaugccccaaacuagcagaauacagaaauuggucaaagccgcaauguaacauuacaggauuugcaccuuuuucuaaggacaauucuauuaggcuuuccgcugguggggacaucugggugacaagagaaccuuaugugucaugcgauccugacaaguguuaucaauuugcccuuggacagggaacaacacuaaacaacgugcauucaaaugacacaguacaugauaggaccccuuaucggacccuauugaugaaugaguuagguguuccauuucaucuggggaccaagcaagugugcauagcaugguccagcucaaguugucacgauggaaaagcauggcugcauguuuguguaacgggggaugauaaaaaugcaacugcuagcuucauuuacaaugggaggcuuguagauaguauuguuucaugguccaaagaaauccucaggacccaggagucagaaugcguuuguaucaauggaacuuguacaguaguaaugacugaugggagugcuucaggaaaagcugauacuaaaauacuauucauugaggaggggaaaaucguucauacuagcacauugucaggaagugcucaacaugucgaggagugcuccugcuauccucgauauccuggugucagaugugucugcagagacaacuggaaaggcuccaauaggcccauaguagauauaaacauaaaggauuauagcauuguuuccaguuaugugugcucaggacuuguuggagacacacccagaaaaaacgacagcuccagcaguagccauugcuuggauccuaacaaugaagaagguggucauggagugaaaggcugggccuuugaugauggaaaugacguguggaugggaagaacgaucagcgagaaguuacgcucaggauaugaaaccuucaaagucauugaaggcugguccaaaccuaauuccaaauugcagauaaauaggcaagucauaguugacagagguaauagguccgguuauucugguauuuucucuguugaaggcaaaagcugcaucaaucggugcuuuuauguggaguugauaaggggaagaaaagaggaaacugaagucuuguggaccucaaacaguauuguuguguuuuguggcacuucagguacauauggaacaggcucauggccugauggggcggacaucaaucucaugccuauauaa

SEQ ID NO: 56526 - RNA, 1410 nt, Artificial Sequence
  derived and/or modified CDS sequence (wt) from neuraminidase__InfluenzaA__AHL89069
augaauccaaaucaaaagauaauaacgauuggcucuguuucucucaccauuuccacaauaugcuucuucaugcaaauugccaucuugauaacuacuguaacauugcauuucaagcaauaugaauucaacucccccccaaacaaccaagugaugcugugugaaccaacaauaauagaaagaaacauaacagagauaguguaucugaccaacaccaccauagagaaggaaauaugccccaaacuagcagaauacagaaauuggucaaagccgcaaugugacauuacaggauuugcaccuuuuucuaaggacaauucgauuaggcuuuccgcugguggggacaucugggugacaagagaaccuuaugugucaugcgauccugacaaguguuaucaauuugcccuuggacagggaacaacacuaaacaacgugcauucaaacgacacaguacaugauaggaccccuuaucggacccuauugaugaaugaguuagguguuccauuucaucuggggaccaagcaagugugcauagcaugguccagcucaaguugucacgauggaaaagcauggcugcauguuuguguaacgggggaugauaaaaaugcaacugcuagcuucauuuacaaugggaggcuuguagauaguguuguuucaugguccaaagauauccucaggacccaggagucagaaugcguuuguaucaauggaacuuguacaguaguaaugacugaugggagugcuucaggaaaagcugauacuaaaauacuauucauugaggaggggaaaaucguucauacuagcacauugucaggaagugcucagcaugucgaggagugcuccugcuauccucgauauccuggugucagaugugucugcagagacaacuggaaaggcuccaauaggcccauuguagauauaaacauaaaaaauuauagcauuguuucaaguuaugugugcucaggacuuguuggagacacacccagaaaaaccgacagcuccagcaguagccauugcuuggauccuaacaaugaagaagguggucauggagugaaaggcugggccuuugaugauggaaaugacguguggaugggaagaacgaucagcgagaaguuacgcuuaggauaugaaaccuucaaagucauugaaggcugguccaacccuaauuccaaauugcagauaaauaggcaagucauaguugacagagguaauagguccgguuauucugguauuuucucuguugaaggcaaaagcugcaucaaucggugcuuuuauguggaguugauaaggggaagaaaagaggaaacugaagucuuguggaccucaaacaguauuguuguauuuuguggaaccucagguacauauggaacaggcucauggccugauggggcggacaucaaucucaugccuauauaa

SEQ ID NO: 56527 - RNA, 1410 nt, Artificial Sequence
  derived and/or modified CDS sequence (wt) from neuraminidase__InfluenzaA__AHL89081
augaauccaaaucaaaagauaauaacgauuggcucuguuucucucaccauuuccacaauaugcuucuucaugcaaauugccaucuugauaacuacuguaacauugcauuucaagcaauaugaauucaacucccccccaaacaaccaagugaugcugugugaaccaacaauaauagaaagaaacauaacagagauaguguaucugaccaacaccaccauagagaaggaaauaugccccaaacuagcagaauacagaaauuggucaaagccgcaauguaacauuacaggauuugcaccuuuuucuaaggacaauucgauuaggcuuuccgcugguggggacaucugggugacaagagaaccuuaugugucaugcgauccugacaaguguuaucaauuugcccuuggacagggaacaacacuaaacaacgugcauucaaaugacacaguacaugauaggaccccuuaucggacccuauugaugaaugaguuagguguuccauuucaucuggggaccaagcaagugugcauagcaugguccagcucaaguugucacgauggaaaagcauggcugcauguuuguguaacgggggaugauaaaaaugcaacugcuagcuucauuuacaaugggaggcuuguagauaguauuguuucaugguccaaagaaauccucaggacccaggagucagaaugcguuuguauuaauggaacuuguacaguaguaaugacugaugggagugcuucaggaaaagcugauacuaaaauacuauucauugaggaggggaaaaucguucauacuagcacauugucagggagugcucagcaugucgaggagugcuccugcuauccucgauauccuggugucagaugugucugcagagacaacuggaaaggcuccaauaggcccauaguagauauaaacauaaaggauuauagcauuguuuccaguuaugugugcucaggacuuguuggagacacacccagaaaaaacgacagcuccagcaguagccauugcuuggauccuaacaaugaagaagguggucauggagugaaaggcugggccuuugaugauggaaaugacguguggaugggaagaacgaucagcgagaaguuacgcucaggauaugaaaccuucaaagucauugaaggcugguccaacccuaauuccaaauuacagauaaauaggcaagucauaguugacagagguaauagguccgguuauucugguaucuucucuguugaaggcaaaagcugcaucaaucggugcuuuuauguggaguugauaaggggaagaaaagaggaaacugaagucuuguggaccucaaacaguauuguuguguuuuguggcacuucagguacauauggaacaggcucauggccugauggggcggacaucaaucucaugccuauauaa

SEQ ID NO: 56528 - RNA, 1410 nt, Artificial Sequence
  derived and/or modified CDS sequence (wt) from neuraminidase__InfluenzaA__AHL89093
augaauccaaaucaaaagauaauaacgauuggcucuguuucucucaccauuuccacaauaugcuucuucaugcaaauugccaucuugauaacuacuguaacauugcauuucaagcaauaugaauucaacucccccccaaacaaccaagugaugcugugugaaccaacaauaauagaaagaaacauaacagagauaguguaucugaccaacaccaccauagagaaggaaauaugccccaaacuagcagaauacagaaauuggucaaaaccgcaauguaacauuacaggauuugcaccuuuuucuaaggacaauucgauuaggcuuuccgcugguggggacaucugggugacaagagaaccuuaugugucaugcgauccugacaaguguuaucaauuugcccuuggacagggaacaacacuaaacaacgugcauucaaaugacacaguacaugauaggaccccuuaucggacccuauugaugaaugaguuagguguuccauuucaucuggggaccaagcaagugugcauagcaugguccagcucaaguugucacgauggaaaagcauggcugcauguuuguguaacgggggaugauaaaaaugcaacugcuagcuucauuuacaaugggaggcuuguagauaguauuguuucaugguccaaagaaauccucaggacccaggagucagaaugcguuuguaucaauggaacuuguacaguaguaaugacugaugggagugcuucaggaaaagcugauacuaaaauacuauucauugaggaggggaaaaucguucauacuagcacauugucaggaagugcucagcaugucgaggaguguuccugcuauccucgauauccuggugucagaugugucugcagagacaacuggaaaggcuccaauaggcccauaguagauauaaacauaaaggauuauagcauuguuuccaguuaugugugcucaggacuuguuggagacacacccagaaaaaacgacagcuccagcaguagccauugcuuggauccuaacaaugaagaagguggucauggagugaaaggcugggccuuugaugauggaaaugacguguggaugggaagaacgaucagcgagaaguuacgcucaggauaugaaaccuucaaagucauugaaggcugguccaacccuaauuccaaauugcagauaaauaggcaagucauaguugacagagguaauagguccgguuauucugguauuuucucuguugaagguaaaagcugcaucaaucggugcuuuuauguggaguugauaaggggaagaaaagaggaaacugaagucuuguggaccucaaacaguauuguuguguuuuguggcaccucagguacauauggaacaggcucauggccugauggggcggauaucaaucucaugccuauauaa

SEQ ID NO: 56529 - RNA, 1410 nt, Artificial Sequence
  derived and/or modified CDS sequence (wt) from neuraminidase__InfluenzaA__AHL89117
augaauccaaaucaaaagauaauaacgauuggcucuguuucucucaccauuuccacaauaugcuucuucaugcaaauugccaucuugauaacuacuguaacauugcauuucaagcaauaugaauucaacucccccccaaacaaccaagugaugcugugugaaccaacaauaauagaaagaaacauaacagagauaguguaucugaccaacaccaccauagagaaggaaauaugccccaaacuagcagaauacagaaauuggucaaaaccgcaauguaacauuacaggauuugcaccuuuuucuaaggacaauucgauuaggcuuuccgcugguggggacaucugggugacaagagaaccuuaugugucaugcgauccugacaaguguuaucaauuugcccuuggacagggaacaacacuaaacaacgugcauucaaaugacacaguacaugauaggaccccuuaucggacccuauugaugaaugaguuagguguuccauuucaucuggggaccaagcaagugugcauagcaugguccagcucaaguugucacgauggaaaagcauggcugcauguuuguguaacgggggaugauaaaaaugcaacugcuagcuucauuuacaaugggaggcuuguagauaguauuguuucaugguccaaagaaauccucaggacccaggagucagaaugcguuuguaucaauggaacuuguacaguaguaaugacugaugggagugcuucaggaaaagcugauacuaaaauacuauucauugaggaggggaaaaucguucauacuagcacauugucaggaagugcucagcaugucgaggaguguuccugcuauccucgauauccuggugucagaugugucugcagagacaacuggaaaggcuccaauaggcccauaguagauauaaacauaaaggauuauagcauuguuuccaguuaugugugcucaggacuuguuggagacacacccagaaaaaacgacagcuccagcaguagccauugcuuggauccuaacaaugaagaagguggucauggagugaaaggcugggccuuugaugauggaaaugacguguggaugggaagaacgaucagcgagaaguuacgcucaggauaugaaaccuucaaagucauugaaggcugguccaacccuaauuccaaauugcagauaaauaggcaagucauaguugacagagguaauagguccgguuauucugguauuuucucuguugaaggcaaaagcugcaucaaucggugcuuuuauguggaguugauaaggggaagaaaagaggaaacugaagucuuguggaccucaaacaguauuguuguguuuuguggcaccucagguacauauggaacaggcucauggccugauggggcagauaucaaucucaugccuauauaa

SEQ ID NO: 56530 - RNA, 1410 nt, Artificial Sequence
  derived and/or modified CDS sequence (wt) from neuraminidase__InfluenzaA__AHL89129
augaauccaaaucaaaagauaauaacgauuggcucuguuucucucaccauuuccacaauaugcuucuucaugcaaauugccauccugauaacuacuguaacauugcauuucaagcaauaugaauucaacucccccccaaacaaccaagugaugcugugugaaccaacaauaauagaaagaaacauaacagagauaguguaucugaccaacaccaccauagagaaggaaauaugccccaaacuagcagaauacagaaauuggucaaaaccgcaauguaacauuacaggauuugcaccuuuuucuaaggacaauucgauuaggcuuuccgcugguggggacaucugggugacaagagaaccuuaugugucaugcgauccugacaaguguuaucaauuugcccuuggacagggaacaacacuaaacaacgugcauucaaaugacacaguacaugauaggaccccuuaucggacccuauugaugaaugaguuagguguuccauuucaucuggggaccaagcaagugugcauagcaugguccagcucaaguugucacgauggaaaagcauggcugcauguuuguguaacgggggaugauaaaaaugcaacugcuagcuucauuuacaaugggaggcuuguagauaguauuguuucaugguccaaagaaauccucaggacccaggagucagaaugcguuuguaucaauggaacuuguacaguaguaaugacugaugggagugcuucaggaaaagcugauacuaaaauacuauucauugaggaggggaaaaucguucauacuagcacauugucaggaagugcucagcaugucgaggaguguuccugcuauccucgauauccuggugucagaugugucugcagagacaacuggaaaggcuccaauaggcccauaguagauauaaacauaaaggauuauagcauuguuuccaguuaugugugcucaggacuuguuggagacacacccagaaaaaacgacagcuccagcaguagccauugcuuggauccuaacaaugaagaagguggucauggagugaaaggcugggccuuugaugauggaaaugacguguggaugggaagaacgaucagcgagaaguuacgcucaggauaugaaaccuucaaagucauugaaggcugguccaacccuaauuccaaauugcagauaaauaggcaagucauaguugacagagguaauagguccgguuauucugguauuuucucuguugaaggcaaaagcugcaucaaucggugcuuuuauguggaguugauaaggggaagaaaagaggaaacugaagucuuguggaccucaaacaguauuguuguguuuuguggcaccucagguacauauggaacaggcucauggccugauggggcggauaucaaucucaugccuauauaa

SEQ ID NO: 56531 - RNA, 1410 nt, Artificial Sequence
  derived and/or modified CDS sequence (wt) from neuraminidase__InfluenzaA__AHL89141
augaauccaaaucaaaagauaauaacgauuggcucuguuucucucaccauuuccacaauaugcuucuucaugcaaauugccaucuugauaacuacuguaacauugcauuucaagcaauaugaauucaacucccccccaaacaaccaagugaugcugugugaaccaacaauaauagaaagaaacauaacagagauaguguaucugaccaacaccaccauagagaaggaaauaugccccaaacuagcagaauacagaaauuggucaaagccgcaauguaacauuacaggauuugcaccuuuuucuaaggacaauucgauuaggcuuuccgcugguggggacaucugggugacaagagaaccuuaugugucaugcgauccugauaaguguuaucaauuugcccuuggacagggaacaacacuaaacaacgugcauucaaaugacacaguacaugauaggaccccuuaucggacccuauugaugaaugaguuagguguuccauuucaucuggggaccaagcaagugugcauagcaugguccagcucaaguugucacgauggaaaagcauggcugcauguuuguguaacgggggaugauaaaaaugcaacugcuagcuucauuuacaaugggaggcuuguagauaguauuguuucaugguccaaagaaauccucaggacccaggagucagaaugcguuuguaucaauggaacuuguacaguaguaaugacugaugggagugcuucaggaaaagcugauacuaaaauacuauucauugaggaggggaaaaucguucauacuagcacauugucaggaagugcucaacaugucgaggagugcuccugcuauccucgauauccuggugucagaugugucugcagagacaacuggaaaggcuccaauaggcccauaguagauauaaacauaaaggauuauagcauuguuuccaguuaugugugcucaggacuuguuggagacacacccagaaaaaacgacagcuccagcaguagccauugcuuggauccuaacaaugaagaagguggucauggagugaaaggcugggccuuugaugauggaaaugacguguggaugggaagaacgaucagcgagaaguuacgcuuaggauaugaaaccuucaaagucauugaaggcugguccaacccuaauuccaaauugcagacaaauaggcaagucauaguugacagagguaauagguccgguuauucugguauuuucucuguugaaggcaaaagcugcaucaaucggugcuuuuauguggaguugauaaggggaagaaaagaggaaacugaagucuuguggaccucaaacaguauuguuguguuuuguggcaccucagguacauauggaacaggcucauggccugauggggcggacaucaaucucaugccuauauaa

SEQ ID NO: 56532 - RNA, 1410 nt, Artificial Sequence
  derived and/or modified CDS sequence (wt) from neuraminidase__InfluenzaA__AHL89153
augaauccaaaucaaaagauaauaacgauuggcucuguuucucucaccauuuccacaauaugcuucuucaugcaaauugccaucuugauaacuacuguaacauugcauuucaagcaauaugaauucaacucccccccaaacaaccaagugaugcugugugaaccaacaauaauagaaagaaacauaacagagauaguguaucugaccaacaccaccauagagaaggaaauaugccccaaacuagcagaauacagaaauuggucaaaaccgcaauguaacauuacaggauuugcaccuuuuucuaaggacaauucgauuaggcuuuccgcugguggggacaucugggugacaagagaaccuuaugugucaugcgauccugacaaguguuaucaauuuucccuuggacagggaacaacacuaaacaacgugcauucaaaugacacaguacaugauaggaccccuuaucggacccuauugaugaaugaguuagguguuccauuucaucuggggaccaagcaagugugcauagcaugguccagcucaaguugucacgauggaaaagcauggcugcauguuuguguaacgggggaugauaaaaaugcaacugcuagcuucauuuacaaugggaggcuuguagauaguauuguuucaugguccaaagaaauccucaggacccaggagucagaaugcguuuguaucaauggaacuuguacaguaguaaugacugaugggagugcuucaggaaaagcugauacuaaaauacuauucauugaggaggggaaaaucguucauacuagcacauugucaggaagugcucagcaugucgaggaguguuccugcuauccucgauauccuggugucagaugugucugcagagacaacuggaaaggcuccaauaggcccauaguagauauaaacauaaaggauuauagcauuguuuccaguuaugugugcucaggacuuguuggagacacacccagaaaaaacgacagcuccagcaguagccauugcuuggauccuaacaaugaagaagguggucauggagugaaaggcugggccuuugaugauggaaaugacguguggaugggaagaacgaucagcgaaaaguuacgcucaggauaugaaaccuucaaagucauugaaggcugguccaacccuaauuccaaauugcagauaaauaggcaagucauaguugacagagguaauagguccgguuauucugguauuuucucuguugaaggcaaaagcugcaucaaucggugcuuuuauguggaguugauaaggggaagaaaagaggaaacugaagucuuguggaccucaaacaguauuguuguguuuuguggcaccucagguacauauggaacaggcucauggccugauggggcggauaucaaucucaugccuauauaa

SEQ ID NO: 56533 - RNA, 1410 nt, Artificial Sequence
  derived and/or modified CDS sequence (wt) from neuraminidase__InfluenzaA__AHL89165
augaauccaaaucaaaagauaauaacgauuggcucuguuucucucaccauuuccacaauaugcuucuucaugcaaauugccaucuugauaacuacuguaacauugcauuucaagcaauaugaauucaacucccccccaaacaaccaagugaugcugugugaaccaacaauaauagaaagaaacauaacagagauaguguaucugaccaacaccaccauagagaaggaaauaugccccaaacuagcagaauacagaaauuggucaaagccgcaauguaacauuacaggauuugcaccuuuuucuaaggacaauucgauuaggcuuuccgcugguggggacaucugggugacaagagaaccuuaugugucaugcgauccugacaaguguuaucaauuugcccuuggacagggaacaacacuaaacaacgugcauucaaaugacacaguacaugauaggaccccuuaucggacccuauugaugaaugaguuagguguuccauuucaucuggggaccaagcaagugugcauagcaugguccagcucaaguugucacgauggaaaagcauggcugcauguuuguguaacgggggaugauaaaaaugcaacugcuagcuucauuuacaaugggaggcuuguagauaguauuguuucaugguccaaagaaauccucaggacccaggagucagaaugcguuugcaucaauggaacuuguacaguaguaaugacugaugggagugcuucaggaaaagcugauacuaaaauacuauucauugaggaggggaaaaucguucauacuagcacauugucaggaagugcucagcaugucgaggagugcuccugcuauccucgauauccuggugucagaugugucugcagagacaacuggaaaggcuccaauaggcccauaguagauauaaacauaaaggauuauagcauuguuuccaguuaugugugcucaggacuuguuggagacacacccagaaaaaacgacagcuccagcaguagccauugcuuggauccuaacaaugaagaagguggucauggagugaaaggcugggccuuugaugauggaaaugacguguggaugggaagaacgaucagcgagaaguuacgcucaggauaugaaaccuucaaagucauugaaggcugguccaacccuaauuccaaauugcagauaaauaggcaagucauaguugacagagguaauagguccgguuauucugguauuuucucuguugaaggcaaaagcugcaucaaucggugcuuuuauguggaguugauaaggggaagaaaagaggaaacugaagucuuguggaccucaaacaguauuguuguguuuuguggcaccucagguacauauggaacaggcucauggccugauggggcggacaucaaucucaugccuauauaa

SEQ ID NO: 56534 - RNA, 1410 nt, Artificial Sequence
  derived and/or modified CDS sequence (wt) from neuraminidase__InfluenzaA__AHL89177
augaauccaaaucaaaagauaauaacgauuggcucuguuucccucaccauuuccacaauaugcuucuucaugcaaauugccaucuugauaacuacuguaacauugcauuucaagcaauaugaauucaacucccccccaaacaaccaagugaugcugugugaaccaacaauaauagaaagaaacauaacagagauaguguaucugaccaacaccaccauagagaaggaaauaugccccaaacuagcagaauacagaaauuggucaaagccgcaauguaacauuacaggauuugcaccuuuuucuaaggacaauucgauuaggcuuuccgcugguggggacaucugggugacaagagaaccuuaugugucaugcgauccugacaaguguuaucaauuugcccuuggacagggaacaacacuaaacaacguacauucaaaugacacaguacaugauaggaccccuuaucggacccuauugaugaaugaguuagguguuccauuucaucuggggaccaagcaagugugcauagcaugguccagcucaaguugucacgauggaaaagcauggcugcauguuuguguaacgggggaugauaaaaaugcaacugcuagcuucauuuacaaugggaggcuuguagauaguauuguuucaugguccaaugaaauccucaggacccaggagucagaaugcguuuguaucaauggaacuuguacaguaguaaugacugaugggagugcuucaggaaaagcugauacuaaaauacuauucauugaggaggggaaaaucguucauacuagcacauugucaggaagugcucagcaugucgaggagugcuccugcuauccucgauauccuggugucagaugugucugcagagacaacuggaaaggcuccaauaggcccauaguagauauaaacauaaaggauuauagcauuguuuccaguuaugugugcucaggacuuguuggagacacacccagaaaaaacgacagcuccagcaguagccauugcuuggauccuaacaaugaagaagguggucauggagugaaaggcugggccuuugaugauggaaaugacguguggaugggaagaacgaucagcgagaaguuacgcucaggauaugaaaccuucaaagucauugaaggcugguccaacccuaauuccaaauugcagauaaauaggcaagucauaguugacagagguaaucgguccgguuauucugguauuuucucuguugaaggcaaaagcugcaucaaucggugcuuuuauguggaguugauaaggggaagaaaagaggaaaaugaagucuuguggaccucaaacaguauuguuguguuuuguggcaccucagguacauauggaacaggcucauggccugauggggcggacaucaaucuuaugccuauauaa

SEQ ID NO: 56535 - RNA, 1410 nt, Artificial Sequence; identical to SEQ ID NO: 52714
  derived and/or modified CDS sequence (wt) from neuraminidase__InfluenzaA__AHL89189

SEQ ID NO: 56536 - RNA, 1410 nt, Artificial Sequence
  derived and/or modified CDS sequence (wt) from neuraminidase__InfluenzaA__AHL89201
augaauccaaaucaaaagauaauaacgauuggcucuguuucucucaccauuuccacaauaugcuucuucaugcaaauugccaucuugauaacuacuguaacauugcauuucaagcaauaugaauucaacucccccccaaacaaccaagugaugcugugugaaccaacaauaauagaaagaaacauaacagagauaguguaucugaccaacaccaccauagagaaggaaauaugccccaaacuagcagaauacagaaauuggucaaagccgcaaugugacauuacaggauuugcaccuuuuucuaaggacaauucaauuaggcuuuccgcugguggggacaucugggugacaagagaaccuuaugugucaugcgauccugacaaguguuaucaauuugcccuuggacagggaacaacacuaaacaacgugcauucaaacgacacaguacaugauaggaccccuuaucggacccuauugaugaaugaguuagguguuccauuucaucuggggaccaagcaagugugcauagcaugguccagcucaaguugucacgauggaaaagcauggcugcauguuuguguaacaggggaugauaaaaaugcaacugcuagcuucauuuacaauggaaggcuuguagauaguguuguuucaugguccaaagauauccucaggacccaggagucagaaugcguuuguaucaauggaacuuguacaguaguaaugacugaugggagugcuucaggaaaagcugauacuaaaauacuauucauugaggaggggaaaaucguucauacuagcacauugucaggaagugcucagcaugucgaggagugcuccugcuauccucgauauccuggugucagaugugucugcagagacaacuggaaaggcuccaauaggcccauuguagauauaaacauaaagaauuauagcauuguuuccaguuaugugugcucaggacuuguuggagacacacccagaaaaaccgacagcuccagcaguagccauugcuuggauccuaacaaugaagaagguggucauggagugaaaggcugggccuuugaugauggaaaugacguguggaugggaagaacgaucagcgagaaguuacgcuuaggauaugaaaccuucaaagucauugaaggcugguccaacccuaauuccaaauugcagauaaauaggcaagucauaguugacagagguaauagguccgguuauucugguauuuucucuguugaaggcaaaagcugcaucaaucggugcuuuuauguggaguugauaaggggaagaaaagaggaaacugaagucuuguggaccucaaacaguauuguuguauuuuguggaaccucagguacauauggaacaggcucauggccugauggggcggacaucaaucucaugccuauauaa

SEQ ID NO: 56537 - RNA, 1410 nt, Artificial Sequence
  derived and/or modified CDS sequence (wt) from neuraminidase__InfluenzaA__AHL89213
augaauccaaaucaaaagauaauaacgauuggcucuguuucucucaccauuuccacaauaugcuucuucaugcaaauugccaucuugauaacuacuguaacauugcauuucaagcaauaugaauucaacucccccccaaacaaccaagugaugcugugugaaccaacaauaauagaaagaaacauaacagagauaguguaucugaccaacaccaccauagagaaggaaauaugccccaaacuagcagaauacagaaauuggucaaagccgcaauguaacauuacaggauuugcaccuuuuucuaaggacaauucgauuaggcuuuccgcugguggggacaucugggugacaagagaaccuuaugugucaugcgauccugacaaguguuaucaauuugcccuuggacagggaacaacacuaaacaacgugcauucaaaugacacaguacaugauaggaccccuuaucggacccuauugaugaaugaguuagguguuccauuucaucuggggaccaagcaagugugcauagcaugguccagcucaaguugucacgauggaaaagcauggcugcauguuuguguaacgggggaugauaaaaaugcaacugcuagcuucauuuacaaugggaggcuuguagauaguauuguuucaugguccaaagaaauccucaggacccaggagucagaaugcguuuguaucaauggaacuuguacaguaguaaugacugaugggagugcuucaggaaaagcugauacuaaaauacuauucauugaggaggggaaaaucguucauacuagcacauugucaggaagugcucagcaugucgaggagugcuccugcuauccucgauauccuggugucagaugugucugcagagacaacuggaaaggcuccaauaggcccauaguagauauaaacauaaaggauuauagcauuguuuccaguuacgugugcucaggacuuguuggagacacacccagaaaaaacgacagcuccagcaguagccauugcuuggauccuaacaaugaagaagguggucauggagugaaaggcugggccuuugaugauggaaaugacguguggaugggaagaacgaucagcgagaaguuacgcucaggauaugaaaccuucaaagucauugaaggcugguccaacccuaauuccaaauugcagacaaauaggcaagucauaguugacagagguaauagguccgguuauucugguauuuucucuguugaaggcaaaagcugcaucaaucggugcuuuuauguggaguugauaaggggaagaaaagaggaaacugaagucuuguggaccucaaacaguauuguuguguuuuguggcaccucagguacauauggaacaggcucauggccugauggggcggacaucaaucucaugccuauauaa

SEQ ID NO: 56538 - RNA, 1410 nt, Artificial Sequence
  derived and/or modified CDS sequence (wt) from neuraminidase__InfluenzaA__AHL89225
augaauccaaaucaaaagauaauaacgauuggcucuguuucucucaccauuuccacaauaugcuucuucaugcaaauugccaucuugauaacuacuguaacauugcauuucaagcaauaugaauucaacccccccccaaacaaccaagugaugcugugugaaccaacaauaauagaaagaaacauaacagagauaguguaucugaccaacaccaccauagagaaggaaauaugccccaaacuagcagaauacagaaauuggucaaagccgcaauguaacauuacaggauuugcaccuuuuucuaaggacaauucgauuaggcuuuccgcugguggggacaucugggugacaagagaaccuuaugugucaugcgauccugauaaguguuaucaauuugcccuuggacagggaacaacacuaaacaacgugcauucaaaugacacaguacaugauaggaccccuuaucggacccuauugaugaaugaguuagguguuccauuucaucuggggaccaagcaagugugcauagcaugguccagcucaaguugucacgauggaaaagcauggcugcauguuuguguaacgggggaugauaaaaaugcaacugcuagcuucauuuacaaugggaggcuuguagauaguauuguuucaugguccaaagaaauccucaggacccaggagucagaaugcguuuguaucaauggaacuuguacaguaguaaugacugaugggagugcuucaggaaaagcugauacuaaaauacuauucauugaggaggggaaaaucguucauacuagcacauugucaggaagugcucaacaugucgaggagugcuccugcuauccucgauauccuggugucagaugugucugcagagacaacuggaaaggcuccaauaggcccauaguagauauaaacauaaaggauuauagcauuguuuccaguuaugugugcucaggacuuguuggagacacacccagaaaaaacgacagcuccagcaguagccauugcuuggauccuaacaaugaagaagguggucauggagugaaaggcugggccuuugaugauggaaaugacguguggaugggaagaacaaucagcgagaaguuacgcuuaggauaugaaaccuucaaagucauugaaggcugguccaacccuaauuccaaauugcagacaaauaggcaagucauaguugacagagguaauagguccgguuauucugguauuuucucuguugaaggcaaaagcugcaucaaucggugcuuuuauguggaguugauaaggggaagaaaagaggaaacugaagucuuguggaccucaaacaguauuguuguguuuuguggcaccucagguacauauggaacaggcucauggccugauggggcggacaucaaucucaugccuauauaa

SEQ ID NO: 56539 - RNA, 1410 nt, Artificial Sequence; identical to SEQ ID NO: 52714
  derived and/or modified CDS sequence (wt) from neuraminidase__InfluenzaA__AHL89237

SEQ ID NO: 56540 - RNA, 1410 nt, Artificial Sequence; identical to SEQ ID NO: 47719
  derived and/or modified CDS sequence (wt) from neuraminidase__InfluenzaA__AHL89261

SEQ ID NO: 56541 - RNA, 1410 nt, Artificial Sequence
  derived and/or modified CDS sequence (wt) from neuraminidase__InfluenzaA__AHL89273
augaauccaaaucaaaagauaauaacgauuggcucuguuucucucaccauuuccacaauaugcuucuucaugcaaauugccaucuugauaacuacuguaacauugcauuucaagcaauaugaauucaacucccccccaaacaaccaagugaugcugugugaaccaacaauaauagaaagaaacauaacagagauaguguaucugaccaacaccaccauagagaaggaaauaugccccaaacuagcagaauacagaaauuggucaaagccgcaauguaacauuacaggauuugcaccuuuuucuaaggacaauucgauuaggcuuuccgcugguggggacaucugggugacaagagaaccuuaugugucaugcgauccugauaaguguuaucaauuugcccuuggacagggaacaacacuaaacaacgugcauucaaaugacacaguacaugauaggaccccuuaucggacccuauugaugaaugaguuagguguuccauuucaucuggggaccaagcaagugugcauagcaugguccagcucaaguugucacgauggaaaagcauggcugcauguuuguguaacgggggaugauaaaaaugcaacugcuagcuucauuuacaaugggaggcuuguagauaguauuguuucaugguccaaagaaauccucaggacccaggagucagaaugcguuuguaucaauggaacuuguacaguaguaaugacugaugggagugcuucaggaaaagcugauacuaaaauacuauucauugaggagggaaaaaucguucauacuagcacauugucaggaagugcucaacaugucgaggagugcuccugcuauccucgauauccuggugucagaugugucugcagagacaacuggaaaggcuccaauaggcccauaguagauauaaacauaaaggauuauagcauuguuuccaguuaugugugcucaggacuuguuggagacacacccagaaaaaacgacagcuccagcaguagccauugcuuggauccuaacaaugaagaagguggucauggagugaaaggcugggccuuugaugauggaaaugacguguggaugggaagaacgaucagcgagaaguuacgcuuaggauaugaaaccuucaaagucauugaaggcugguccaacccuaauuccaaauugcagacaaauaggcaagucauaguugacagagguaauagguccgguuauucugguauuuucucuguugaaggcaaaagcugcaucaaucggugcuuuuauguggaguugauaaggggaagaaaagaggaaacugacgucuuguggaccucaaacaguauuguuguguuuuguggcaccucagguacauauggaacaggcucauggccugauggggcggacaucaaucucaugccuauauaa

SEQ ID NO: 56542 - RNA, 1410 nt, Artificial Sequence
  derived and/or modified CDS sequence (wt) from neuraminidase__InfluenzaA__AHL89285
augaauccaaaucaaaagauaauaacgauuggcucuguuucucucaccauuuccacaauaugcuucuucaugcaaauugccaucuugauaacuacuguaacauugcauuucaagcaauaugaauucaacucccccccaaacaaccaagugaugcugugugaaccaacaauaauagaaagaaacauaacagagauaguguaucugaccaacaccaccauagagaaggaaauaugccccaaacuagcagaauacagaaauuggucaaagccgcaauguaacauuacaggauuugcaccuuuuucuaaggacaauucgauuaggcuuuccgcugguggggacaucugggugacaagagaaccuuaugugucaugcgauccugauaaguguuaucaauuugcccuuggacagggaacaacacuaaacaacgugcauucaaaugacacaguacaugauaggaccccuuaucggacccuauugaugaaugaguuagguguuccauuucaucuggggaccaagcaagugugcauagcaugguccagcucaaguugucacgauggaaaagcauggcugcauguuuguguaacgggggaugauaaaaaugcaacugcuagcuucauuuacaaugggaggcuuguagauaguauuguuucaugguccaaagaaauccucaggacccaggagucagaaugcguuuguaucaauggaacuuguacaguaguaaugacugaugggagugcuucaggaaaagcugauacuaaaauacuauucauugaggagggaaaaaucguucauacuagcacauugucaggaagugcucaacaugucgaggagugcuccugcuauccucgauauccuggugucagaugugucugcagagacaacuggaaaggcuccaauaggcccauaguagauauaaacauaaaggauuauagcauuguuuccaguuaugugugcucaggacuuguuggagacacacccagaaagaacgacagcuccagcaguagccauugcuuggauccuaacaaugaagaagguggucauggagugaaaggcugggccuuugaugauggaaaugacguguggaugggaagaacgaucagcgagaaguuacgcuuaggauaugaaaccuucaaagucauugaaggcugguccaacccuaauuccaaauugcagacaaauaggcaagucauaguugacagagguaauagguccgguuauucugguauuuucucuguugaaggcaaaagcugcaucaaucggugcuuuuauguggaguugauaaggggaagaaaagaggaaacugacgucuuguggaccucaaacaguauuguuguguuuuguagcaccucagguacauauggaacaggcucauggccugauggggcggacaucaaucucaugccuauauaa

SEQ ID NO: 56543 - RNA, 1410 nt, Artificial Sequence; identical to SEQ ID NO: 56541
  derived and/or modified CDS sequence (wt) from neuraminidase__InfluenzaA__AHL89297

SEQ ID NO: 56544 - RNA, 1410 nt, Artificial Sequence; identical to SEQ ID NO: 56541
  derived and/or modified CDS sequence (wt) from neuraminidase__InfluenzaA__AHL89309

SEQ ID NO: 56545 - RNA, 1410 nt, Artificial Sequence
  derived and/or modified CDS sequence (wt) from neuraminidase__InfluenzaA__AHL89321
augaauccaaaucaaaagauaauaacgauuggcucuguuucucucaccauuuccacaauaugcuucuucaugcaaauugccaucuugauaacuacuguaacauugcauuucaagcaauaugaauucaacucccccccgaacaaccaagugaugcugugugaaccaacaauaauagaaagaaacauaacagagauaguguaucugaccaacaccaccauagagaaggaaauaugccccaaacuagcagaauacagaaauuggucaaagccgcaaugugacauuacaggauuugcaccuuuuucuaaggacaauucgauuaggcuuuccgcugguggggacaucugggugacaagagaaccuuaugugucaugcgauccugacaaguguuaucaauuugcccuuggacagggaacaacacuaaacaacgugcauucaaacgacacaguacaugauaggaccccuuaucggacccuauugaugaaugaguuagguguuccauuucaucuggggaccaagcaagugugcauagcaugguccagcucaaguugucacgauggaaaagcauggcugcauguuuguguaacaggggaugauaaaaaugcaacugcuagcuucauuuacaaugggaggcuuguagauaguguuguuucaugguccaaagauauccucaggacccaggagucagaaugcguuuguaucaauggaacuuguacaguaguaaugacugauggaagugcuucaggaaaagcugauacuaaaauacuauucauugaggaggggaaaaucguucauauuagcacauugucaggaagugcucagcaugucgaggagugcuccugcuauccucgauauccuggugucagaugugucugcagagacaacuggaaaggcuccaauaggcccauuguagauauaaacauaaagaauuauagcauuguuuccaguuaugugugcucaggacuuguuggagacacacccagaaaaaccgacagcuccagcaguagccauugcuuggauccuaacaaugaagaagguggucauggagugaaaggcugggccuuugaugauggaaaugacguguggaugggaagaacgaucagcgagaaguuacgcuuaggauaugaaaccuucaaagucauugaaggcugguccaacccuaauuccaaauugcagauaaauaggcaagucauaguugacagagguaauagguccgguuauucugguauuuucucuguugaaggcaaaagcugcaucaaucggugcuuuuauguggaguugauaaggggaagaaaagaggaaacugaagucuuguggaccucaaacaguauuguuguauuuuguggaaccucagguacauacggaacaggcucauggccugauggggcggacaucaaucucaugccuauauaa

SEQ ID NO: 56546 - RNA, 1410 nt, Artificial Sequence
  derived and/or modified CDS sequence (wt) from neuraminidase__InfluenzaA__AHL89333
augaauccaaaucaaaagauaauaacgauuggcucuguuucucucaccauuuccacaauaugcuucuucaugcaaauugccaucuugauagcuacuguaacauugcauuucaagcaauaugaauucaacucccccccaaacaaccaagugaugcugugugaaccaacaauaauagaaagaaacauaacagagauaguguaucugaccaacaccaccauagagaaggaaauaugccccaaacuagcagaauacagaaauuggucaaagccgcaauguaacauuacaggauuugcaccuuuuucuaaggacaauucgauuaggcuuuccgcugguggggacaucugggugacaagagaaccuuaugugucaugcgauccugauaaguguuaucaauuugcccuuggacagggaacaacacuaaacaacgugcauucaaaugacacaguacaugauaggaccccuuaucggacccuauugaugaaugaguuagguguuccauuucaucuggggaccaagcaagugugcauagcaugguccagcucaaguugucacgauggaaaagcauggcugcauguuuguguaacgggggaugauaaaaaugcaacugcuagcuucauuuacaaugggaggcuuguagauaguauuguuucaugguccaaagaaauccucaggacccaggagucagaaugcguuuguaucaauggaacuugugcaguaguaaugacugaugggagugcuucaggaaaagcugauacuaaaauacuauucauugaggaggggaaaaucguucauacuagcacauugucaggaagugcucaacaugucgaggagugcuccugcuauccucgauauccuggugucagaugugucugcagagacaacuggaaaggcuccaauaggcccauaguagauauaaacauaaaggauuauagcauuguuuccaguuaugugugcucaggacuuguuggagacacacccagaaaaaacgacagcuccagcaguagccauugcuuggauccuaacaaugaagaagguggucauggagugaaaggcugggccuuugaugauggaaaugacguguggaugggaagaacgaucagcgagaaguuacgcuuaggauaugaaaccuucaaagucauugaaggcugguccaacccuaauuccaaauugcagacaaauaggcaagucauaguugacagagguaauagguccgguuauucugguauuuucucuguugaaggcaaaagcugcaucaaucggugcuuuuauguggaguugauaaggggaagaaaagaggaaacugaagucuuguggaccucaaacaguauuguuguguuuuguggcaccucagguacauauggaacaggcucauggccugauggggcggacaucaaucucaugccuauauaa

SEQ ID NO: 56547 - RNA, 1410 nt, Artificial Sequence
  derived and/or modified CDS sequence (wt) from neuraminidase__InfluenzaA__AHL89345
augaauccaaaucaaaagauaauaacgauuggcucuguuucucucaccauuuccacaauaugcuucuucaugcaaauugccaucuugauaacuacuguaacauugcauuucaagcaauaugaauucaacucccccccaaacaaccaagugaugcugugugaaccaacaauaauagaaagaaacauaacagagauaguguaucugaccaacaccaccauagagaaggaaauaugccccaaacuagcagaauacagaaauuggucaaaaccgcaauguaacauuacaggauuugcaccuuuuucuaaggacaauucgauuaggcuuuccgcugguggggacaucugggugacaagagaaccuuaugugucaugcgauccugacaaguguuaucaauuugcccuuggacagggaacaacacuaaacaacgugcauucaaaugacacaguacaugauaggaccccuuaucggacccuauugaugaaugaguuagguguuccauuucaucuggggaccaagcaagugugcauagcaugguccagcucaaguugucacgauggaaaagcauggcugcauguuuguguaacgggggaugauaaaaaugcaacugcuagcuucauuuacaaugggaggcuuguagauaguauuguuucaugguccaaagaaauccucaggacccaggagucagaaugcguuuguaucaauggaacuuguacaguaguaaugacugaugggagugcuucaggaaaagcugauacuaaaauacuauucauugaggaggggaaaaucguucauacuagcacauugucaggaagugcucagcaugucgaggaguguuccugcuauccucgauauccuggugucagaugugucugcagagacaacuggaaaggcuccaauaggcccauaguagauauaaacauaaaggauuauagcauuguuuccaguuaugugugcucaggacuuguuggagacacacccagaaaaaacgacagcuccagcaguagccauugcuuggauccuaacaaugaagaagguggucauggagugaaaggcugggccuuugaugauggaaaugacguguggaugggaagaacgaucagcgagaaguuacgcucaggauaugaaaccuucaaagucauugaaggcugguccaacccuaauuccaaauugcagauaaauaggcaaguuauaguugacagagguaauagguccgguuauucugguauuuucucuguugaaggcaaaagcugcaucaaucggugcuuuuauguggaguugauaaggggaagaaaagaggaaacugaagucuuguggaccucaaacaguauuguuguguuuuguggcaccucagguacauauggaacaggcucauggccugauggggcggauaucaaucucaugccuauauaa

SEQ ID NO: 56548 - RNA, 1410 nt, Artificial Sequence; identical to SEQ ID NO: 47718
  derived and/or modified CDS sequence (wt) from neuraminidase__InfluenzaA__AHL89357

SEQ ID NO: 56549 - RNA, 1410 nt, Artificial Sequence
  derived and/or modified CDS sequence (wt) from neuraminidase__InfluenzaA__AHL89369
augaauccaaaucaaaagauaauaacgauuggcucuguuucucucaccauuuccacaauaugcuucuucaugcaaauugccaucuugauaacuacuguaacauugcauuucaagcaauaugaauucaacucccccccaaacaaccaagugaugcugugugaaccaacaauaauagaaagaaacauaacagagauaguguaucugaccaacaccaccauagagaaggaaauaugccccaaacuagcagaauacagaaauuggucaaagccgcaaugugacauuacaggauuugcaccuuuuucuaaggacaauucaauuagacuuuccgcugguggggacaucugggugacaagagaaccuuaugugucaugcgauccugacaaguguuaucaauuugcccuuggacagggaacaacacuaaacaacgugcauucaaacgacacaguacaugauaggaccccuuaucggacccuauugaugaaugaguuagguguuccauuucaucuggggaccaagcaagugugcauagcaugguccagcucaaguugucacgauggaaaagcauggcugcauguuuguguaacaggggaugauaaaaaugcaacugcuagcuucauuuacaauggaaggcuuguagauaguguuguuucaugguccaaagauauccucaggacccaggagucagaaugcguuuguaucaauggaacuuguacaguaguaaugacugaugggagugcuucaggaaaagcugauacuaaaauacuauucauugaggaggggaaaaucguucauacuagcacauugucaggaagugcucagcaugucgaggagugcuccugcuauccucgauauccuggugucagaugugucugcagagacaacuggaaaggcuccaauaggcccauuguagauauaaacauaaagaauuauagcauuguuuccaguuaugugugcucaggacuuguuggagacacacccagaaaaaccgacagcuccagcaguagccauugcuuggauccuaacaaugaagaagguggucauggagugaaaggcugggccuuugaugauggaaaugacguguggaugggaagaacgaucagcgagaaguuacgcuuaggauaugaaaccuucaaagucauugaaggcugguccaacccuaauuccaaauugcagauaaauaggcaagucauaguugacagagguaauagguccgguuauucugguauuuucucuguugaaggcaaaagcugcaucaaucggugcuuuuauguggaguugauaaggggaagaaaagaggaaacugaagucuuguggaccucaaacaguauuguuguauuuuguggaaccucagguacauauggaacaggcucauggccugauggggcggacaucaaucucaugccuauauaa

SEQ ID NO: 56550 - RNA, 1410 nt, Artificial Sequence
  derived and/or modified CDS sequence (wt) from neuraminidase__InfluenzaA__AHL89381
augaauccaaaucaaaagauaauaacgauuggcucuguuucucucaccauuuccacaauaugcuucuucaugcaaauugccaucuugauaacuacuguaacauugcauuucaagcaauaugaauacaacucccccccaaacaaccaagugaugcugugugaaccaacaauaauagaaagaaacauaacagagauaguguaucugaccaacaccaccauagagaaggaaauaugccccaaacuagcagaauacagaaauuggucaaagccgcaauguaacauuacaggauuugcaccuuuuucuaaggacaauucgauuaggcuuuccgcugguggggacaucugggugacaagagaaccuuaugugucaugcgauccugauaaguguuaucaauuugcccuuggacagggaacaacacuaaacaacgugcauucaaaugacacaguacaugauaggaccccuuaucggacccuauugaugaaugaguuagguguuccauuucaucuggggaccaagcaagugugcauagcaugguccagcucaaguugccacgauggaaaagcauggcugcauguuuguguaacgggggaugauaaaaaugcaacugcuagcuucauuuacaaugggaggcuuguagauaguauuguuucaugguccaaagaaauccucaggacccaggagucagaaugcguuuguaucaauggaacuuguacaguaguaaugacugaugggagugcuucaggaaaagcugauacuaaaauacuauucauugaggagggaaaaaucguucauacuagcacauugucaggaagugcucaacaugucgaggagugcuccugcuauccucgauauccuggugucagaugugucugcagagacaacuggaaaggcuccaauaggcccauaguagauauaaacauaaaggauuauagcauuguuuccaguuaugugugcucaggacuuguuggagacacacccagaaaaaacgacagcuccagcaguagccauugcuuggauccuaacaaugaagaagguggucauggagugaaaggcugggccuuugaugauggaaaugacguguggaugggaagaacgaucagcgagaaguuacgcuuaggauaugaaaccuucaaagucauugaaggcugguccaacccuaauuccaaauugcagacaaauaggcaagucauaguugacagagguaauagguccgguuauucugguauuuucucuguugaaggcaaaagcugcaucaaucggugcuuuuauguggaguugauaaggggaagaaaagaggaaacugaagucuuguggaccucaaacaguauuguuguguuuuguggcaccucagguacauauggaacaggcucauggccugauggggcggacaucaaucucaugccuauauaa

SEQ ID NO: 56551 - RNA, 1410 nt, Artificial Sequence; identical to SEQ ID NO: 56541
  derived and/or modified CDS sequence (wt) from neuraminidase__InfluenzaA__AHL89405

SEQ ID NO: 56552 - RNA, 1410 nt, Artificial Sequence
  derived and/or modified CDS sequence (wt) from neuraminidase__InfluenzaA__AHL89417
augaauccaaaucaaaagauaauaacgauuggcucuguuucucucaccauuuccacaauaugcuucuucaugcaaauugccaucuugauaacuacuguaacauugcauuucaagcaauaugaauucaacucccccccaaacaaccaagugaugcugugugaaccaacaauaauagaaagaaacauaacagagauaguguaucugaccaacaccaccauagagaaggaaauaugccccaaacuagcagaauacagaaauuggucaaagccgcaaugugacauuacaggauuugcaccuuuuucuaaggacaauucgauuaggcuuuccgcugguggggacaucugggugacaagagaaccuuaugugucaugcgauccugacaaguguuaucaauuugcccuuggacagggaacaacacuaaacaacgugcauucaaacgacacaguacaugauaggaccccuuaucggacccuauugaugaaugaguuagguguuccauuucaucuggggaccaagcaagugugcauagcaugguccagcucaaguugucacgauggaaaagcauggcugcauguuuguguaacgggggaugauaaaaaugcaacugcuagcuucauuuacaaugggaggcuuguagauaguguuguuucaugguccaaagauauccucaggacccaggagucagaaugcguuuguaucaauggaacuuguacaguaguaaugacugaugggagugcuucaggaaaagcugauacuaaaauacuauucauugaggaggggaaaaucguucauacuagcacauugucaggaagugcucagcaugucgaggagugcuccugcuauccucgauauccuggugucagaugugucugcagagacaacuggaaaggcuccaauaggcccauuguagauauagacauaaagaauuauagcauuguuuccaguuaugugugcucaggacuuguuggagacacacccagaaaaaccgacagcuccagcaguagccauugcuuggauccuaacaaugaagaagguggucauggagugaaaggcugggccuuugaugauggaaaugacguguggaugggaagaacgaucagcgagaaguuacgcuugggauaugaaaccuucaaagucauugaaggcugguccaacccuaauuccaaauugcagauaaauaggcaagucauaguugacagagguaauagguccgguuauucugguauuuucucuguugaaggcaaaagcugcaucaaucggugcuuuuauguggaguugauaaggggaagaaaagaggaaacugaagucuuguggaccucaaacaguauuguuguauuuuguggaaccucagguacauauggaacaggcucauggccugauggggcggacaucaaucucaugccuauauaa

SEQ ID NO: 56553 - RNA, 1410 nt, Artificial Sequence; identical to SEQ ID NO: 48584
  derived and/or modified CDS sequence (wt) from neuraminidase__InfluenzaA__AHL89429

SEQ ID NO: 56554 - RNA, 1410 nt, Artificial Sequence
  derived and/or modified CDS sequence (wt) from neuraminidase__InfluenzaA__AHL89441
augaauccaaaucaaaagauaauaacgauuggcucuguuucucucaccauuuccacaauaugcuucuucaugcaaauugccaucuugauaacuacuguaacauugcauuucaagcaauaugaauucaacucccccccaaacaaccaagugaugcugugugaaccaacaauaauagaaagaaacauaacagagauaguguaucugaccaacaccaccauagagaaggaaauaugccccaaacuagcagaauacagaaauuggucaaagccgcaguguaacauuacaggauuugcaccuuuuucuaaggacaauucgauuaggcuuuccgcugguggggacaucugggugacaagagaaccuuaugugucaugcgauccugacaaguguuaucaauuugcccuuggacagggaacaacacuaaacaacgugcauucaaaugacacaguacaugauaggaccccuuaucggacccuauugaugaaugaguuagguguuccauuucaucuggggaccaaacaagugugcauagcaugguccagcucaaguugucacgauggaaaagcauggcugcauguuuguguaacgggggaugauaaaaaugcaacugcuagcuucauuuacaaugggaggcuuguagauaguauuguuucaugguccaaagaaauccucaggacccaggagucagaaugcguuuguaucaauggaacuuguacaguaguaaugacugaugggagugcuucaggaaaagcugauacuaaaauacuauucauugaggaggggaaaaucguucauacuagcacauugucaggaagugcucagcaugucgaggagugcuccugcuauccucgauauccuggugucagaugugucugcagagacaacuggaaaggcuccaauaggcccauaguagauauaaacauaaaggauuauagcauuguuuccaguuaugugugcucaggacuuguuggagacacacccagaaaaaacgacagcuccagcaguagccauugcuuggauccuaacaaugaagaagguggucauggagugaaaggcugggccuuugaugauggaaaugacguguggaugggaagaacgaucagcgagaaguuacgcucaggauaugaaaccuucaaagucauugaaggcugguccaacccuaauuccaaauugcagauaaauaggcaagucauaguugacagagguaauagguccgguuauucugguauuuucucuguugaaggcaaaagcugcaucaaucggugcuuuuauguggaguugauaagaggaagaaaagaggaaacugaagucuuguggaccucaaacaguauuguuguguuuuguggcaccucagguacauauggaacaggcucauggccugauggggcggacaucaaucucaugccuauauaa

SEQ ID NO: 56555 - RNA, 1410 nt, Artificial Sequence; identical to SEQ ID NO: 56554
  derived and/or modified CDS sequence (wt) from neuraminidase__InfluenzaA__AHL89453

SEQ ID NO: 56556 - RNA, 1410 nt, Artificial Sequence
  derived and/or modified CDS sequence (wt) from neuraminidase__InfluenzaA__AHL89465
augaauccaaaucaaaagauaauaacgauuggcucuguuucucucaccauuuccacaauaugcuucuucaugcaaauugccaucuugauaacuacuguaacauugcauuucaagcaauaugaauucaacucccccccaaacaaccaagugaugcugugugaaccaacaauaauagaaagaaacauaacagagauaguguaucugaccaacaucaccauagagaaggaaaaaugccccaaacuagcagaauacagaaauuggucaaagccgcaauguaacauuacaggauuugcaccuuuuucuaaggacaauucgauuaggcuuuccgcugguggggacaucugggugacaagagaaccuuaugugucaugcgauccugauagguguuaucaauuugcccuuggacagggaacaacacuaaacaacgugcauucaaaugacacaguacaugauaggaccccuuaucggacccuauugaugaaugaguuagguguuccauuucaucuggggaccaagcaagugugcauagcaugguccagcucaaguugucacgauggaaaagcauggcugcauguuuguguaacgggggaugauaaaaaugcaacugcuagcuucauuuacaaugggaggcuuguagauaguauuguuucaugguccaaagaaauccucaggacccaggagucagaaugcguuuguaucaauggaacuuguacaguaguaaugacugaugggagugcuucaggaaaagcugauacuaaaauacuauucauugaggaggggaaaaucguucauacuagcacauugucaggaagugcucaacaugucgaggagugcuccugcuauccucgauauccuggugucagaugugucugcagagacaacuggaaaggcuccaauaggcccauaguagauauaaacauaaaggauuauagcauuguuuccaguuaugugugcuccggacuuguuggagacacacccagaaaaaacgacagcuccagcaguagccauugcuuggauccuaacaaugaagaagguggucauggagugaaaggcugggccuuugaugauggaaaugacguguggaugggaagaacgaucagcgagaaguuacgccuaggauaugaaaccuucaaagucauugaaggcugguccaacccuaauuccaaauugcagacaaauaggcaagucauaguugacagagguaauagguccgguuauucugguauuuucucuguugaaggcaaaagcugcaucaaucggugcuuuuauguggaguugauaaggggaagaaaagaggaaacugaagucuuguggaccucaaacaguauuguuguguuuuguggcaccucagguacauauggaacaggcucauggccugauggggcggacaucaaucucaugccuauauaa

SEQ ID NO: 56557 - RNA, 1410 nt, Artificial Sequence
  derived and/or modified CDS sequence (wt) from neuraminidase__InfluenzaA__AHL89477
augaauccaaaucaaaagauaauaacgauuggcucuguuucucucaccauuuccacaauaugcuucuucaugcaaauugccaucuugauaacuacuguaacauugcauuucaagcaauaugaauucaacucccccccaaacaaccaagugaugcugugugaaccaacaauaauagaaagaaacauaacagagauaguguaucugaccaacaccaccauagagaaggaaauaugccccaaacuagcagaauacagaaauuggucaaagccgcaauguaacauuacaggauuugcaccuuuuucuaaggacaauucgauuaggcuuuccgcugguggggacaucugggugacaagagaaccuuaugugucaugcgauccugauaaguguuaucaauuugcccuuggacagggaacaacacuaaacaacgugcauucaaaugacacaguacaugauaggaccccuuaucggacccuauugaugaaugaguuagguguuccauuucaucuggggaccaagcaagugugcauagcaugguccagcucaaguugucacgauggaaaagcauggcugcauguuuguguaacgggggaugauaaaaaugcaacugcuagcuucauuuacaaugggaggcuuguagauaguauuguuucaugguccaaagaaauccucaggacccaggagucagaaugcguuuguaucaauggaacuuguacaguaguaaugacugaugggagugcuucaggaaaagcugauacuaaaauacuauucauugaggagggaaaaaucguucauacuagcacauugucaggaagugcucaacaugucgaggagugcuccugcuauccucgauauccuggugucagaugugucugcagagacaacuggaaaggcuccaauaggcccauaguagauauaaacauaaaggauuauagcauuguuuccaguuaugugugcucaggacuuguuggagacacacccagaaaaaacgacagcuccagcaguagccauugcuuggauccuaacaaugaagaagguggucauggagugaaaggcugggccuuugaugauggaaaugacguguggaugggaagaacgaucagcgagaaguuacgcuuaggauaugaaaccuucaaagucauugaaggcugguccaacccuaauuccaaauugcagacaaauaggcaagucauaguugacagagguaauagguccgguuauucugguauuuucucuguugaaggcaaaagcugcaucaaucggugcuuuuauguggaguugauaaggggaagaaaagaggaaacugaagucuuguggaccucaaacaguauuguuguguuuuguggcaccucagguacauauggaacaggcucauggccugauggggcggacaucaaucucaugccuauauaa

SEQ ID NO: 56558 - RNA, 1410 nt, Artificial Sequence
  derived and/or modified CDS sequence (wt) from neuraminidase__InfluenzaA__AHL89489
augaauccaaaucaaaagauaauaacgauuggcucuguuucucucaccauuuccacaauaugcuucuucaugcaaauugccaucuugauaacuacuguaacauugcauuucaagcaauaugaauucaacucccccccaaacaaccaagugaugcugugugaaccaacaauaauagaaagaaacauaacagagauaguguaucugaccaacaccaccauagagaaggaaauaugccccaaacuagcagaauacagaaauuggucaaagccgcaauguagcauuacaggauuugcaccuuuuucuaaggacaauucgauuaggcuuuccgcugguggggacaucugggugacaagagaaccuuaugugucaugcgauccugacaagugcuaucaauuugcccuuggacagggaacaacacuaaacaacgugcauucaaaugacacaguacaugauagaaccccuuaucggacccuauugaugaaugaguuagguguuccauuucaucuggggaccaagcaagugugcauagcaugguccagcucaaguugucacgauggaaaagcauggcugcauguuuguguaacgggggaugauaaaaaugcaacugcuagcuucauuuacaaugggaggcuuguagauaguauuguuucaugguccaaagaaauccucaggacccaggagucagaaugcguuuguaucaauggaacuuguacaguaguaaugacugauggaagugcuucaggaaaagcugauacuaaaauacuauucauugaggaggggaaaaucguucauacuagcacauugucaggaagugcucagcaugucgaggagugcuccugcuauccucgauauccuggugucagaugugucugcagagacaacuggaaaggcuccaauaggcccauaguagacauaaacauaaaggauuauagcauuguuuccaguuaugugugcucaggacuuguuggagacacacccagaaaaaacgacagauccagcaguagccauugcuuggauccuaacaaugaagaagguggucauggagugaaaggcugggccuuugaugauggaaaugacguguggaugggaagaacgaucagcgagaagucacgcucaggauaugaaaccuucaaagucauugaaggcugguccaacccucauuccaaauugcagauaaauaggcaagucauaguugacagagguaauagguccgguuauucugguauuuucucuguugaaggcaaaagcugcaucaaucggugcuuuuauguggaguugauaaggggaagaaaagaggaaacugaagucuuguggaccucaaacaguauuguuguguucuguggcaccucagguacauauggaacaggcucauggccugauggggcggacaucaaucucaugccuauauaa

SEQ ID NO: 56559 - RNA, 1410 nt, Artificial Sequence; identical to SEQ ID NO: 48584
  derived and/or modified CDS sequence (wt) from neuraminidase__InfluenzaA__AHL89501

SEQ ID NO: 56560 - RNA, 1410 nt, Artificial Sequence; identical to SEQ ID NO: 48584
  derived and/or modified CDS sequence (wt) from neuraminidase__InfluenzaA__AHL89513

SEQ ID NO: 56561 - RNA, 1410 nt, Artificial Sequence; identical to SEQ ID NO: 48584
  derived and/or modified CDS sequence (wt) from neuraminidase__InfluenzaA__AHL89525

SEQ ID NO: 56562 - RNA, 1410 nt, Artificial Sequence
  derived and/or modified CDS sequence (wt) from neuraminidase__InfluenzaA__AHL89537
augaauccaaaucaaaagauaauaacgauuggcucuguuucucucaccauuuccacaauaugcuucuucaugcaaauugccaucuugauaacuacuguaacauugcauuucaagcaauaugaauucaacucccccccaaacaaccaagugaugcugugugaaccaacaauaauagaaagaaacauaacagagauaguguaucugaccaacaccaccauagagaaggaaauaugccccaaacuagcagaauacagaaauuggucaaagccgcaaugugacauuacaggauuugcaccuuuuucuaaggacaauucaauuaggcuuuccgcugguggggacaucugggugacaagagaaccuuaugugucaugcgauccugacaaguguuaucaauuugcccuuggacagggaacaacacuaaacaacgugcauucaaacgacacaguacaugauaggaccccguaucggacccuauugaugaaugaguuagguguuccauuucaucuggggaccaagcaagugugcauagcaugguccagcucaaguugucacgauggaaaagcauggcugcauguuuguguaacaggggaugauaaaaaugcaacugcuagcuucauuuacaauggaaggcuuguagauaguguuguuucaugguccaaagauauccucaggacccaggagucagaaugcguuuguaucaauggaacuuguacaguaguaaugacugaugggagugcuucaggaaaagcugauacuaaaauacuauucauugaggaggggaaaaucguucauacuagcacauugucaggaagugcucagcaugucgaggagugcuccugcuauccucgauauccuggugucagaugugucugcagagacaacuggaaaggcuccaauaggcccauuguagauauaaacauaaagaauuauagcauuguuuccaguuaugugugcucaggacuuguuggagacacacccagaaaaaccgacagcuccagcaguagccauugcuuggauccuaacaaugaagaagguggucauggagugaaaggcugggccuuugaugauggaaaugacguguggaugggaagaacgaucagcgagaaguuacgcuuaggauaugaaaccuucaaagucauugaaggcugguccaacccuaauuccaaauugcagauaaauaggcaagucauaguugacagagguaauagguccgguuauucugguauuuucucuguugaaggcaaaagcugcaucaaucggugcuuuuauguggaguugauaaggggaagaaaagaggaaacugaagucuuguggaccucaaacaguauuguuguauuuuguggaaccucagguacauauggaacaggcucauggccugauggggcggacaucaaucucaugccuauauaa

SEQ ID NO: 56563 - RNA, 1413 nt, Artificial Sequence
  derived and/or modified CDS sequence (wt) from neuraminidase__InfluenzaA__AHL89549
augaauccaaaucaaaaaauaauaaccauugggucaaucaguauagcaaucggaauaauuagucuaauguugcaaauaggaaauauuauuucaauaugggcuagucacucaauccaaacuggaagucaaaaccacacuggaauaugcaaccaaagaaucaucacauaugaaaacagcaccugggugaaucacacauauguuaauauuaacaacacuaauguuguugcuggaaaggacaaaacuucagugacauuggccggcaauucaucucuuuguucuaucaguggaugggcuauauacacaaaagacaacagcauaagaauuggcuccaaaggagauguuuuugucauaagagaaccuuucauaucauguucucauuuggaaugcaggaccuuuuuucugacccaaggugcucuauuaaaugacaaacauucaaauggaaccguuaaggacagaaguccuuauagggcccuaaugagcuguccucuaggugaagcuccguccccauacaauucaaaguuugaaucaguugcauggucagcaagcgcaugccaugauggcaugggcugguuaacaaucggaauuucugguccagacaauggagcuguggcuguacuaaaauacaacggaauaauaacugaaaccauaaaaaguuggaaaaagcggauauugagaacacaagagucugaaugugucugugugaacgggucauguuucaccauaaugaccgauggcccgaguaauggggccgccucguacaaaaucuucaagaucgaaaaggggaagguuacuaaaucaauagaguuaaaugcacccaauuuucauuaugaggaauguuccuguuacccagacacuggcacagugauguguguaugcagggacaacuggcaugguucaaaucgaccuugggugucuuuuaaucaacacuuggauuaucaaauaggauacaucugcaguggaguguucggugacaauccgcgucccaaagauggaaagggcagcuguaauccagugacuguugauggagcagacggaguuaagggguuuucauacaaauaugguaaugguguuuggauaggaaggacuaaaaguaacagacuuagaaagggguuugagaugauuugggauccuaauggauggacagauaccgacagugauuucucagugaaacaggauguuguggcaauaacugauuggucaggguacaguggaaguuucguucaacauccugaguuaacaggauuggacuguauaagaccuugcuucuggguugaguuagucagaggacugccuagagaaaauacaacaaucuggacuagugggagcagcauuucuuuuuguggcguugauagugauacugcaaacuggucuuggccagacggugcugaguugccguucaccauugacaaauag

SEQ ID NO: 56564 - RNA, 1413 nt, Artificial Sequence
  derived and/or modified CDS sequence (wt) from neuraminidase__InfluenzaA__AHL89561
augaauccaaaucaaaaaauaauaaccauuggaucaaucaguauagcaaucgggauaauuagucuaauguugcaaauaggaaauauuauuucaauaugggcuagucacucaauccaaacuggaagucaaaaccacacuggaauaugcaaccaaagaaucaucacauaugaaaacagcaccugggugaaucacacauauguuaguauuaacaacacuaauguuguugcuggaaaggacaaaacuucagugacauuggccggcaauucaucucuuuguucuaucaguggaugggcuauauacacaaaagacaacagcauaagaauuggcuccaaaggagauguuuuugucauaagagaaccuuucauaucauguucucauuuggaaugcaggaccuuuuuucugacccaaggugcucuauuaaaugacaaacauucaaauggaaccguuaaggaccgaaguccuuauagggccuuaaugagcuguccucuaggugaagccccguccccauacaauucaaaguuugaaucaguugcauggucagcaagcgcaugccaugauggcaugggcugguuaacaaucggaauuucugguccagacaauggagcuguggcuguacuaaaauacaacggaauaauaacugaaaccauaaaaaguuggaaaaagcgaauauugagaacacaagagucugaaugugucugugugaacgggucauguuucaccauaaugaccgauggcccgaguaauggggccgccucguacaaaaucuucaaaaucgaaaaggggaagguuacuaaaucaauagaguuaaaugcacccaauuuucauuaugaggaauguuccuguuacccagacacuggcacagugauguguguaugcagggacaacuggcaugguucaaaucgaccuugggugucuuuuaaucaaaacuuggauuaucaaauaggauacaucugcaguggaguguucggugacaauccgcgccccaaagauggaaagggcagcuguaauccagugacuguugauggagcagacgggguuaagggguuuucauacaaauaugguaaugguguuuggauaggaagaacuaaaaguaacagacuuagaaagggguuugagaugauuugggauccuaauggauggacagauaccgacagugauuucucagugaaacaggauguuguggcaauaacugauuggucaggguacaguggaaguuucguucaacauccugaguuaacaggauuggacuguauaagaccuugcuucuggguugaguuagucagaggacugccuagagaaaauacaacaaucuggacuagugggagcagcauuucuuuuuguggcguugauagugauacugcaaacuggucuuggccagacggugcugaguugccguucaccauugacaaguag

SEQ ID NO: 56565 - RNA, 1413 nt, Artificial Sequence
  derived and/or modified CDS sequence (wt) from neuraminidase__InfluenzaA__AHL89573
augaauccaaaucaaaaaauaauaaccauuggaucaaucaguauagcaaucgggauaauuagucuaauguugcaaauaggaaauauuauuucaauaugggcuagucacucaauccaaacuggaagucaaaaccacacaggaauaugcaaccaaagaaucaucacauaugaaaacagcaccugggugaaucacacauauguuaguauuaacaacacuaauguuguugcuggaaaggacaaaacuucagugacauuggccgguaauucaucucuuuguucuaucaguggaugggcuauauacacaaaagacaacagcauaagaauuggcuccaaaggagauguuuuugucauaagagaaccuuucauaucauguucucauuuggaaugcaggaccuuuuuucugacccaaggugcucuauuaaaugacaaacauucaaauggaaccguuaaggaccgaaguccuuauagggccuuaaugagcuguccucuaggugaagcuccguccccauacaauucaaaguuugaaucaguugcauggucagcaagcgcaugccaugauggcaugggcugguuaacaaucggaauuucugguccagacaauggagcuguggcuguacuaaaauacaacggaauaauaacugaaaccauaaaaaguuggaaaaagcgaauauugagaacacaagagucugaaugugucugugugaacgggucauguuucaccauaaugaccgauggcccgaguaauggggccgccucguacaaaaucuucaaaaucgaaaaggggaagguuacuaaaucaauagaguuaaaugcacccaauuuucauuaugaggaauguuccuguuacccagacacuggcacagugauguguguaugcagggacaacuggcaugguucaaaucgaccuugggugucuuuuaaucaaaacuuggauuaucaaauaggauacaucugcaguggaguguucggugacaauccgcgucccaaagauggaaagggcagcuguaauccagugacuguugauggagcagacgggguuaagggguuuucauacaaauaugguaaugguguuuggauaggaagaacuaaaaguaacagacuuagaaagggguuugagaugauuugggauccuaauggauggacagauaccgacagugauuucucagugaaacaggauguuguggcaauaacugauuggucaggguacaguggaaguuucguucaacauccugaguuaacaggauuggacuguauaagaccuugcuucuggguugaguuagucagaggacugccuagagaaaauacaacaaucuggacuagugggagcagcauuucuuuuuguggcguugauagugauacugcaaacuggucuuggccagacggugcugaguugccguucaccauugacaaguag

SEQ ID NO: 56566 - RNA, 1413 nt, Artificial Sequence
  derived and/or modified CDS sequence (wt) from neuraminidase__InfluenzaA__AHL89585
augaauccaaaucaaaaaauaauaaccauuggaucaaucaguauagcaauuggaauaauuagucuaauguugcaaauaggaaauauuauuucaauaugggcuagucacucaauccaaacuggaagucaaaaccacacuggaauaugcaaccaaagaaucaucacauaugaaaacagcaccugggugaaucacacauauguuaauauuaacaacacuaauguuguugcuggaaaggacaaaacuucagugacauuggccggcaauucaucucuuuguucuaucaguggaugggcuauauacacaaaagacaacagcauaagaauuggcuccaaaggagauguuuuugucauaagagaaccuuucauaucauguucucauuuggaaugcaggaccuuuuuucugacccaaggugcucuauuaaaugacaaacauucaaauggaaccguuaaggacagaaguccuuauagggccuuaaugagcuguccucuaggugaagcuccguccccauacaauucaaaguuugagucaguugcauggucagcaagcgcaugccaugauggcaugggcugguuaacaaucgggauuucugguccagacaauggagcuguggcuguacuaaaauacaacggaauaauaacugaaaccauaaaaaguuggaaaaagcgaauauugagaacacaggagucugaaugugucugugugaacgggucauguuucaccauaaugaccgauggcccgaguaauggggccgccucguacaaaaucuucaagaucgaaaaggggaagguuacuaaaucaauagaguuaaaugcacccaauuuucauuaugaggaauguuccuguuacccagacacuggcacagugauguguguaugcagggauaacuggcaugguucaaaucgaccuugggugucuuuuaaucaaaacuuggauuaucaaguaggauacaucugcaguggaguguucggugacaauccgcgucccaaagauggaaagggcagcuguaauccaaugacuguugauggagcagacggaguuaagggguuuucauacaaauaugguaaugguguuuggauaggaaggacuaaaaguaacaaacuuagaaagggguuugagaugauuugggauccuaauggauggacagauaccgacagugauuucucagugaaacaggauguuguggcaauaacugauuggucaggguacaguggaaguuucguucaacauccugaguuaacaggauuggacuguauaagaccuugcuucuggguugaguuagucagaggacugccuagagaaaauacaacaaucuggacuagugggagcagcauuucuuuuuguggcguugauagugauacugcaaacuggucuuggccagacggugcugaguugccguucaccauugacaaauag

SEQ ID NO: 56567 - RNA, 1413 nt, Artificial Sequence
  derived and/or modified CDS sequence (wt) from neuraminidase__InfluenzaA__AHL89597
augaauccaaaucaaaaaauaauaaccauuggaucaaucaguauagcaauuggaauaauuagucuaauguugcaaauaggaaauauuauuucaauaugggcuagucacucaauccaaacuggaagucaaaaccacacuggaauaugcaaccaaagaaucaucacauaugaaaacagcaccugggugaaucacacauauguuaauauuaacaacacuaauguuguugcuggaaaggacaaaacuucagugacauuggccggcaauucaucucuuuguucuaucaguggaugggcuauauacacaaaagacaacagcauaagaauuggcuccaaaggagauguuuuugucauaagagaaccuuucauaucauguucucauuuggaaugcaggaccuuuuuucugacccaaggugcucuauuaaaugacaaacauucaaauggaaccguuagggacagaaguccuuauagggccuuaaugagcuguccucuaggugaagcuccguccccauacaauucaaaguuugaaucaguugcauggucagcaagcgcaugccaugauggcaugggcugguuaacaaucgggauuucugguccagacaauggagcuguggcuguacuaaaauacaacggaauaauaacugaaaccauaaaaaguuggaaaaagcgaauauugagaacacaggagucugaaugugucugugugaacgggucauguuucaccauaaugaccgauggcccgaguaauggggccgccucguacaaaaucuucaagaucgaaaaggggaagguuacuaaaucaauagaguuaaaugcacccaauuuucauuaugaggaauguuccuguuacccagacacuggcacagugauguguguaugcagggauaacuggcaugguucaaaucgaccuugggugucuuuuaaucaaaacuuggauuaccaaguaggauacaucugcaguggaguguucggugacaauccgcgucccaaagauggaaagggcagcuguaauccaaugacuguugauggagcagacggaguuaagggguuuucauacaaauaugguaaugguguuuggauaggaaggacuaaaaguaacaaacuuagaaagggguuugagaugauuugggauccuaauggauggacagauaccgacagugauuucucagugaaacaggauguuguggcaauaacugauuggucaggguacaguggaaguuucguucaacauccugaguuaacaggauuggacuguauaagaccuugcuucuggguugaguuagucagaggacugccuagagaaaauacaacaaucuggacuagugggagcagcauuucuuuuuguggcguugauagugauacugcaaacuggucuuggccagacggugcugaguugccauucaccauugacaaauag

SEQ ID NO: 56568 - RNA, 1413 nt, Artificial Sequence; identical to SEQ ID NO: 56566
  derived and/or modified CDS sequence (wt) from neuraminidase__InfluenzaA__AHL89609

SEQ ID NO: 56569 - RNA, 1413 nt, Artificial Sequence
  derived and/or modified CDS sequence (wt) from neuraminidase__InfluenzaA__AHL89621
augaauccaaaucaaaaaauaauaaccauuggaucaaucaguauagcaaucgggauaauuagucuaauguugcaaauaggaaauauuauuucaauaugggcuagucacucaauccaaacuggaagucaaaaccacacuggaauaugcaaccaaagaaucaucacauaugaaaacagcaccugggugaaucacacauauguuaguauuaacaacacuaauguuguugcuggaaaggacaaaacuucagugacauuggccggcaauucaucucuuuguucuaucaguggaugggcuauauacacaaaagacaacagcauaagaauuggcuccaaaggagauguuuuugucauaagagaaccuuucauaucauguucucauuuggaaugcaggaccuuuuuucugacccaaggugcucuauuaaaugacaaacauucaaauggaaccguuaaggaccgaaguccuuauagggccuuaaugagcuguccucuaggugaagccccguccccauacaauucaaaguuugaaucaguugcauggucagcaagcgcaugccaugauggcaugggcugguuaacaaucggaauuucugguccagacaauggagcuguggcuguacuaaaauacaacggaauaauaacugaaaccauaaaaaguuggaaaaagcgaauauugagaacacaagagucugaaugugucugugugaacgggucauguuucaccauaaugaccgauggcccgaguaauggggccgccucguacaaaaucuucaaaaucgaaaaggggaagguuacuaaaucaauagaguuaaaugcacccaauuuucauuaugaggaauguuccuguuacccagacacuggcacagugauguguguaugcagggacaacuggcaugguucaaaucgaccuugggugucuuuuaaucaaaacuuggauuaucaaauaggauacaucugcaguggaguguucggugacaauccgcgucccaaagauggaaagggcagcuguaauccagugacuguugauggagcagacgggguuaagggguuuucauacaaauaugguaaugguguuuggauaggaagaacuaaaaguaacagacauagaaagggguuugagaugauuugggauccuaauggauggacagauaccgacagugauuucucagugaaacaggauguuguggcaauaacugauuggucaggguacaguggaaguuucguucaacauccugaguuaacaggauuggacuguauaagaccuugcuucuggguugaguuagucagaggacugccuagagaaaauacaacaaucuggacuagugggagcagcauuucuuuuuguggcguugauagugauacugcaaacuggucuuggccagacggugcugaguugccguucaccauugacaaguag

SEQ ID NO: 56570 - RNA, 1413 nt, Artificial Sequence; identical to SEQ ID NO: 48228
  derived and/or modified CDS sequence (wt) from neuraminidase__InfluenzaA__AHL89633

SEQ ID NO: 56571 - RNA, 1413 nt, Artificial Sequence
  derived and/or modified CDS sequence (wt) from neuraminidase__InfluenzaA__AHL89645
augaauccaaaucaaaaaauaauaaccauuggaucaaucaguauagcaauuggaauaauuagucuaauguugcaaauaggaaauauuauuucaauaugggcuagucacucaauccaaacuggaagucaaaaccacacuggaauaugcaaccaaagaaucaucacauaugaaaacagcaccugggugaaucacacauauguuaauauuaacaacacuaauguuguugcuggaaaggacaaaacuucagugacauuggccggcaauucaucucuuuguucuaucaguggaugggcuauauacacaaaagacaacagcauaagaauuggcuccaaaggagauguuuuugucauaagagaaccuuucauaucauguucucauuuggaaugcaggaccuuuuuucugacccaaggugcucuauuaaaugacaaacauucaaauggaaccguuaaggacagaaguccuuauagggccuuaaugagcuguccucuaggcgaagcuccguccccauacaauucaaaguuugaaucaguugcauggucagcaagcgcaugccaugauggcaugggcugguuaacaaucgggauuucugguccagacaauggagcuguggcuguacuaaaauacaacggaauaauaacugaaaccauaaaaaguuggaaaaagcgaauauugagaacacaggagucugaaugugucugugugaacgggucauguuucaccauaaugaccgauggcccgaguaauggggccgccucguacaaaaucuucaagaucgaaaaggggaagguuacuaaaucaauagaguuaaaugcacccaauuuucauuaugaggaauguuccuguuacccagacacuggcacagugauguguguaugcagggauaacuggcaugguucaaaucgaccuugggugucuuuuaaucaaaacuuggauuaucaaguaggauacaucugcaguggaguguucggugacaauccgcgucccaaagauggaaagggcagcuguaauccaaugacuguugauggagcagacggaguuaagggguuuucauacaaauaugguaaugguguuuggauaggaaggacuaaaaguaacaaacuuagaaagggguuugagaugauuugggauccuaauggauggacagauaccgacagugauuucucagugaaacaggauguuguggcaauaacugauuggucaggguacaguggaaguuucguucaacauccugaguuaacaggauuggacuguauaagaccuugcuucuggguugaguuagucagaggacugccuagagaaaauacaacaaucuggacuagugggagcagcauuucuuuuuguggcguugauagugauacugcaaacuggucuuggccagacggugcugaguugccguucaccauugacaaauag

SEQ ID NO: 56572 - RNA, 1413 nt, Artificial Sequence
  derived and/or modified CDS sequence (wt) from neuraminidase__InfluenzaA__AHL89657
augaauccaaaucaaaaaauaauaaccauuggaucaaucaguauagcaauagggauaauuagucuaauguugcaaauaggaaauauuauuucaauaugggcuagucacucaauccaaacuggaagucaaaaccacacuggaauaugcaaccaaagaaucaucacauaugaaaacagcaccugggugaaucacacauauguuaguauuaacaacacuaauguuguugcuggaaaggacaaaacuucagugacauuggccggcaauucaucucuuuguucuaucaguggaugggcuauauacacaaaagacaacagcauaagaauuggcuccaaaggagauguuuuugucauaagagaaccuuucauaucauguucucauuuggaaugcaggaccuuuuuucugacccaaggugcucuauuaaaugacaaacauucaaauggaaccguuaaggaccgaaguccuuauagggccuuaaugagcuguccucuaggugaagcuccguccccauacaauucaaaguuugaaucaguugcauggucagcaagcgcaugccaugauggcaugggcugguuaacaaucggaauuucugguccagacaauggagcuguggcuguacuaaaauacaacggaauaauaacugaaaccauaaaaaguuggaaaaagcgaauauugagaacacaagagucugaaugugucugugugaacgggucauguuucaccauaaugaccgauggcccgaguaauggggccgccucguacaaaaucuucaagaucgaaaaggggaagguuacuaaaucaauagaguuaaaugcacccaauuuucauuaugaggaauguucuuguuacccagacacuggcacagugauguguguaugcagggacaacuggcaugguucaaaucgaccuugggugucuuuuaaucaaaacuuggauuaucaaauaggauacaucugcaguggaguguucggugacaauccgcgucccaaagauggaaagggcagcuguaauccagugacuguugauggagcagacgggguuaagggguuuucauacaaauaugguaaugguguuuggauaggaagaacuaaaaguaacagacuuagaaagggguuugagaugauuugggauccuaauggauggacagauaccgacagugauuucucagugaaacaggauguuguggcaauaacugauuggucaggguacaguggaaguuucguucaacauccugaguuaacaggauuggacuguauaagaccuugcuucuggguugaguuagucagaggacugccuagagaaaauacaacaaucuggacuagugggagcagcauuucuuuuuguggcguugauagugauacugcaaacuggucuuggccagacggugcugaguugccguucaccauugacaaguag

SEQ ID NO: 56573 - RNA, 1413 nt, Artificial Sequence
  derived and/or modified CDS sequence (wt) from neuraminidase__InfluenzaA__AHL89669
augaauccaaaucaaaaaauaauaaccauuggaucaaucaguauagcaauuggaauaauuagucuaauguugcaaauaggaaauauuauuucaauaugggcuagucacucaauccaaacuggaagucaaaaccacacuggaauaugcaaccaaagaaucaucacauaugaaaacagcaccugggugaaucacacauauguuaauauuaacaacacuaauguuguugcuggaaaggacaaaacuucagugacauuggccggcaauucaucucuuuguucuaucaguggaugggcuauauacacaaaagacaacagcauaagaauuggcuccaaaggagauguuuuugucauaagagaaccuuucauaucauguucucauuuggaaugcaggaccuuuuuucugacccaaggugcucuauuaaaugacaaacauucaaauggaaccguuaaggacagaaguccuuauagggccuuaaugagcuguccucuaggcgaagcuccguccccauacaauucaaaguuugaaucaguugcauggucagcaagcgcaugccaugauggcaugggcugguuaacaaucgggauuucugguccagacaauggagcuguggcuguacuaaaauacaacggaauaauaacugaaaccauaaaaaguuggaaaaagcgaauauugagaacacaggagucugaaugugucugugugaacgggucauguuucaccauaaugaccgauggcccgaguaauggggccgccucguacaaaaucuucaagaucgaaaaggggaagguuacuaaaucaauagaguuaaaugcacccaauuuucauuaugaggaauguuccuguuacccagacacuggcacagugauguguguaugcagggauaacuggcaugguucaaaucgaccuugggugucuuuuaaucaaaacuuggauuaucaaguaggauacaucugcaguggaguguucggugacaauccgcgucccaaagauggaaagggcagcuguaauccaaugacuguugauggagcagacggaguuaagggguuuucauacaaauaugguaaugguguuuggauaggaaggacuaaaaguaacgaacuuagaaagggguuugagaugauuugggauccuaauggauggacagauaccgacagugauuucucagugaaacaggauguuguggcaauaacugauuggucaggguacaguggaaguuucguucaacauccugaguuaacaggauuggacuguauaagaccuugcuucuggguugaguuagucagaggacugccuagagaaaauacaacaaucuggacuagugggagcagcauuucuuuuuguggcguugauagugauacugcaaacuggucuuggccagacggugcugaguugccguucaccauugacaaauag

SEQ ID NO: 56574 - RNA, 1413 nt, Artificial Sequence
  derived and/or modified CDS sequence (wt) from neuraminidase__InfluenzaA__AHL89681
augaauccaaaucaaaaaauaauaaccauuggaucaaucaguauagcaauuggaauaauuagucuaauguugcaaauaggaaauauuauuucaauaugggcuagucacucaauccaaacuggaagucaaaaccacacuggaauaugcaaccaaagaaucaucacauaugaaaacagcaccugggugaaucacacauauguuaauauuaacaacacuaauguuguugcuggaaaggacaaaacuucagugacauuggccggcaauucaucucuuuguucuaucaguggaugggcuauauacacaaaagacaacagcauaagaauuggcuccaaaggagauguuuuugucauaagagaaccuuucauaucauguucucauuuggaaugcaggaccuuuuuucugacccaaggugcucuauuaaaugacaaacauucaaauggaaccguuaaggacagaaguccuuauagggccuuaaugagcuguccucuaggugaagcuccguccccauacaauucaaaguuugaaucaguugcauggucagcaagcgcaugccaugauggcaugggcugguuaacaaucgggauuucugguccagacaauggagcuguggcuguacuaaaauacaacggaauaauaacugaaaccauaaaaaguuggaaaaagcgaauauugagaacacaggagucugaaugugucugugugaacgggucauguuucaccauaaugacugauggcccgaguaauggggccgccucguacaaaaucuucaagaucgaaaaggggaagauuacuaaaucaauagaguuaaaugcacccaauuuucauuaugaggaauguuccuguuacccagacacuggcacagugauguguguaugcagggauaacuggcaugguucaaaucgaccuugggugucuuuuaaucaaaacuuggauuaucaaguaggauacaucugcaguggaguguucggugacaauccgcgucccaaagauggaaagggcagcuguaauccaaugacuguugauggagcagacggaguuaagggguuuucauacaaauaugguaaugguguuuggauaggaaggacuaaaaguaacaaacuuagaaagggguuugagaugauuugggauccuaauggauggacagauaccgacagugauuucucagugaaacaggauguuguggcaauaaccgauuggucaggguacaguggaaguuucguucaacauccugaguuaacaggauuggacuguauaagaccuugcuucuggguugaguuagucagaggacugccuagagaaaaugcaacaaucuggacuagugggagcagcauuucuuuuuguggcguugauagugauacugcaaacuggucuuggccagacggugcugaguugccguucaccauugacaaauag

SEQ ID NO: 56575 - RNA, 1413 nt, Artificial Sequence
  derived and/or modified CDS sequence (wt) from neuraminidase__InfluenzaA__AHL89693
augaacccaaaucaaaagauaauaaccauuggaucaaucaguauagcaaucggaauaauuagucuaauguugcaaauaggaaauauuauuucaauaugggcuagucacucaauccaaacuggaagucaaaaccacacuggaauaugcaaccaaagaaucaucacauaugaaaacagcaccugggugaaucacacguauguuaauauuaacaacacuaauguuguugcuggaaaggacaaaacuucagugacauuggccggcaauucaucucuuuguucuaucaguggaugggcuauauacacaaaagacaacagcauaagaauuggcuccaaaggagauguuuuugucauaagagaaccuuucauaucauguucucacuuggaaugcagaaccuuuuuucugacccaaggcgcucuauuaaaugacaaacauucaaaugggaccguaaaggacagaaguccuuauagggccuuaaugagcuguccucuaggugaagcuccguccccauacaauucaaaguucgaaucaguugcauggucagcaagcgcaugccaugauggcaugggcugguuaacaaucggaauuucugguccagacaauggagcuguggcuguacuaaaauacaaaggaauaauaacuggaaccauaaaaaguuggagaaagcaaauauuaagaacacaagagucugaaugugucuguaugaacgggucauguuucaccauaaugaccgauggcccgaguaauggggccgccucguacaaaauuuucaagaucgaaaaggggaagguuacuaaaucaauagaguugaaugcacccaauuuucauuaugaggaauguuccuguuacccagacacuggcauagugauguguguaugcagggacaacuggcaugguucaaaucgaccuugggugucuuuuaaucaaaacuuggauuaucaaauaggauacaucugcaguggaguguucggugacaauccgcgucccaaagauggagagggcagcugcaauccagugacuguugauggagcagacggaguaaaaggguuuucauacaaauaugaugaugguguuuggauaggaaggaccaaaaguaacagacuuagaaagggguuugagaugauuugggauccuaauggauggacaaauaccgacagugauuucucagugaaacaggauguuguagcaauaacugauuggucaggguacagcggaaguuucguccaacauccugaguuaacaggauuggacuguauaagaccuugcuucuggguugaguuagucagaggacugccuagagaaaauacaacaaucuggacuagugggagcagcauuucuuucuguggcguuaauagugauacugcaaacuggucuuggccagacggugcugaguugccguucaccauugacaaguag

SEQ ID NO: 56576 - RNA, 1413 nt, Artificial Sequence
  derived and/or modified CDS sequence (wt) from neuraminidase__InfluenzaA__AHL89705
augaauccaaaucaaaaaauaauaaccauuggaucaaucaguauagcaauagggauaauuagucuaauguugcaaauaggaaauauuauuucaauaugggcuagucacucaauccaaaauggaagucaaaaccacacuggaauaugcaaccaaagaaucaucacauaugaaaacagcaccugggugaaucacacauauguuaguauuaacaacacuaauguuguugcuggaaaggacaaaacuucagugacauuggccggcaauucaucucuuuguucuaucaguggaugggcuauauacacaaaagacaacagcauaagaauuggcuccaaaggagauguuuuugucauaagagaaccuuucauaucauguucucauuuggaaugcaggaccuuuuuucugacccaaggugcucuauuaaaugacaaacauucaaauggaaccguuaaggaccgaaguccuuauagggccuuaaugagcuguccucuaggugaagcuccguccccauacaauucaaaguuugaaucaguugcauggucagcaagcgcaugccaugauggcaugggcugguuaacaaucggaauuucugguccagacaauggagcuguggcuguacuaaaauacaacggaauaauaacugaaaccauaaaaaguuggaaaaagcgaauauugagaacacaagagucugaaugugucugugugaacgggucauguuucaccauaaugaccgauggcccgaguaauggggccgccucguacaaaaucuucaagaucgaaaaggggaagguuacuaaaucaauagaguuaaaugcacccaauuuucauuaugaggaauguuccuguuacccagacacuggcacagugauguguguaugcagggacaacuggcaugguucaaaucgaccuugggugucuuuuaaucaaaacuuggauuaucaaauaggauacaucugcaguggaguguucggugacaauccgcgucccaaagauggaaagggcagcuguaauccagugacuguugauggagcagacgggguuaagggguuuucauacaaauaugguaaugguguuuggauaggaagaacuaaaaguaacagacuuagaaagggguuugagaugauuugggauccuaauggauggacagauaccgacagugauuucucagugaaacaggauguuguggcaauaacugauuggucaggguacaguggaaguuucguucaacauccugaguuaacaggauuggacuguauaagaccuugcuucuggguugaguuagucagaggacugccuagagaaaauacaacaaucuggacuagugggagcagcauuucuuuuuguggcguugauagugauacugcaaacuggucuuggccagacggugcugaguugccguucaccauugacaaguag

SEQ ID NO: 56577 - RNA, 1413 nt, Artificial Sequence; identical to SEQ ID NO: 48043
  derived and/or modified CDS sequence (wt) from neuraminidase__InfluenzaA__AHL89717

SEQ ID NO: 56578 - RNA, 1413 nt, Artificial Sequence; identical to SEQ ID NO: 48170
  derived and/or modified CDS sequence (wt) from neuraminidase__InfluenzaA__AHL89729

SEQ ID NO: 56579 - RNA, 1413 nt, Artificial Sequence
  derived and/or modified CDS sequence (wt) from neuraminidase__InfluenzaA__AHL89753
augaauccaaaucaaaaaauaauaaccauuggaucaaucaguauagcaaucgggauaauuagucuaauguugcaaauaggaaauauuauuucaauaugggcuagucacucaauccaaacuggaagucaaaaccacacuggaauaugcaaccaaagaaucaucacauaugaaaacagcaccugggugaaucacacauauguuaguauuaacaacacuaauguuguugcuggaaaugacaaaacuucagugacauuggcgggcaauucaucucuuuguucuaucaguggaugggcuauauacacaaaagacaacagcauaagaauuggcuccaaaggagauguuuuugucauaagagaaccuuucauaucauguucucauuuggaaugcaggaccuuuuuucugacccaaggugcucuauuaaaugacaaacauucaaauggaaccguuaaggaccgaaguccuuauagggccuuaaugagcuguccucuaggugaagcuccguccccauacaauucaaaguuugaaucaguugcauggucagcaagcgcaugccaugauggcaugggcugguuaacaaucggaauuucugguccagacaauggagcuguggcuguacuaaaauacaacggaauaauaacugaaaccauaaaaaguuggaaaaagcgaauauugagaacacaagagucugaaugugucugugugaacgggucauguuucaccauaaugaccgauggcccgaguaauggggccgccucguacaaaaucuucaaaaucgaaaaggggaagguuacuaaaucaauagaguuaaaugcacccaauuuucauuaugaggaauguuccuguuacccagacacuggcacagugauguguguaugcagggacaacuggcaugguucaaaucgaccuugggugucuuuuaaucaaaacuuggauuaucaaauaggauacaucugcaguggaguguucggugacaauccgcgucccaaagauggaaagggcagcuguaauccagugacuguugauggagcagacgggguuaagggguuuucauacaaauaugguaaugguguuuggauaggaagaacuaaaaguaacagacuuagaaagggguuugagaugauuugggauccuaauggauggacagauaccgacagugauuucucagugaaacaggauguuguggcaauaacugauuggucaggguacaguggaaguuucguucaacauccugaguuaacaggauuggacuguauaagaccuugcuucuggguugaguuagucaggggacugccuagagaaaauacaacaaucuggacuagugggagcagcauuucuuuuuguggcguugauagugauacugcaaacuggucuuggccagacggugcugaguugccguucaccauugacaaguag

SEQ ID NO: 56580 - RNA, 1413 nt, Artificial Sequence
  derived and/or modified CDS sequence (wt) from neuraminidase__InfluenzaA__AHL89765
augaauccaaaucaaaaaauaauaaccauuggaucaaucaguauagcaaucgggauaauuagucuaauguugcaaauaggaaauauuauuucaauaugggcuagucacucaauccaaacuggaagucaaaaccacacuggaauaugcaaccaaagaaucaucacauaugaaaacagcaccugggugaaucacacauauguuaguauuaacaacaccaauguuguugcuggaaaggacaaaacuucagugacauuggccggcaauucaucucuuuguucuaucaguggaugggcuauauacacaaaagacaacagcauaagaauuggcuccaaaggagauguuuuugucauaagagaaccuuucauaucauguucucauuuggaauguaggaccuuuuuucugacccaaggugcucuauuaaaugacaaacauucaaauggaaccguuaaggaccgaaguccuuauagggcccuaaugagcuguccucuaggugaagcuccguccccauacaauucaaaguuugaaucaguugcauggucagcaagcgcaugccaugauggcaugggcugguuaacaaucggaauuucugguccagacaauggagcuguggcuguacuaaaauacaacggaauaauaacugaaaccauaaaaaguuggaaaaagcgaauauugagaacacaagagucugaaugugucugugugaacgggucauguuucaccauaaugaccgauggcccgaguaauggggccgccucguacaaaaucuucaagaucgaaaaggggaagguuacuaaaucaauagaguuaaaugcacccaauuuucauuaugaggaauguuccuguuacccagacacuggcacagugauguguguaugcagggacaacuggcaugguucaaaucgaccuugggugucuuuuaaucaaaacuuggauuaucaaauaggauacaucugcaguggaguguucggugacaauccgcgucccaaagauggaaagggcagcuguaauccagugacuguugauggagcagacgggguuaagggguuuucauacaaauaugguaaugguguuuggauaggaagaacuaaaaguaacagacuuagaaagggguuugagaugauuugggauccuaauggauggacagauaccgacagugauuucucagugaaacaggauguuguggcaauaacugauuggucaggguacaguggaaguuucguucaacauccugaguuaacaggauuggacuguauaagaccuugcuucuggguugaguuagucagaggacugccuagagaaaauacaacaaucuggacuagugggagcagcauuucuuuuuguggcguugauagugauacugcaaacuggucuuggccagacggugcugaguugccguucaccauugacaaguag

SEQ ID NO: 56581 - RNA, 1413 nt, Artificial Sequence; identical to SEQ ID NO: 48195
  derived and/or modified CDS sequence (wt) from neuraminidase__InfluenzaA__AHL89777

SEQ ID NO: 56582 - RNA, 1413 nt, Artificial Sequence; identical to SEQ ID NO: 48048
  derived and/or modified CDS sequence (wt) from neuraminidase__InfluenzaA__AHL89789

SEQ ID NO: 56583 - RNA, 1413 nt, Artificial Sequence
  derived and/or modified CDS sequence (wt) from neuraminidase__InfluenzaA__AHL89801
augaauccaaaucaaaaaauaauaaccauuggaucaaucaguauagcaaucggaauaauuagucuaauguugcaaauaggaaauauuauuucaauaugggcuagucacucaauccaaacuggaagucaaaaccacacuggaauaugcaaccaaagaaucaucacauaugaaaacagcaccugggugaaucacacauauguuaauauuaacaacacuaauguuguugcuggaaaggacaaaacuucaguggcauuggccggcaauucaucucuuuguucuaucaguggaugggcuauauacacaaaagacaacagcauaagaauuggcuccaagggagauguuuuugucauaagagaaccuuucauaucauguucucauuuggaaugcaggaccuuuuuucugacccaaggugcucuauuaaaugacaaacauucaaauggaaccguuaaggacagaaguccuuauagggccuuaaugagcuguccucuaggugaagcuccguccccauacaauucaaaguuugaaucaguugcauggucagcaagcgcaugccaugauggcaugggcugguuaacaaucggaauuucugguccagacaauggagcuguggcuguacuaaaauacaacggaauaauaacugaaaccauaaaaaguuggaaaaagcgaauauugagaacacaagagucugaaugugucugugugaacgggucuuguuucaccauaaugaccgauggcccgaguaauggggccgccucguacaaaaucuucaagaucgaaaagggaaagguuacuaaaucaauagaguuaaaugcacccaauuuucauuaugaggaauguuccuguuacccagacacuggcacagugauguguguaugcagagacaacuggcaugguucaaaucgaccuugggugucuuuuaaucaaaacuuggauuaucaaauaggauacaucugcaguggaguguucggugacaauccgcgucccaaagauggaaagggcagcuguaauccagugacuguugauggagcagacggaguuaagggguuuucauacaaauaugguaaugguguuuggauaggaagaacuaaaaguaacagacuuagaaagggguuugagaugauuugggauccuaauggauggacaaauaccgacagugauuucucagugaaacaggauguuguggcaauaacugauuggucaggguacaguggaaguuucguucaacauccugaguuaacaggauuggacuguauaagaccuugcuucuggguugaauuagucagaggacugccuagagaaaauacaacaaucuggacuagugggagcagcauuucuuuuuguggcguugauagugauacugcaaacuggucuuggccagacggugcugaguugccguucaccauugacaaauag

SEQ ID NO: 56584 - RNA, 1413 nt, Artificial Sequence
  derived and/or modified CDS sequence (wt) from neuraminidase__InfluenzaA__AHL89813
augaauccaaaucaaaaaauaauaaccauuggaucaaucaguauagcaauuggaauaauuagucuaauguugcaaauaggaaauauuauuucaauaugggcuagucacucaauccaaacuggaagucaaaaccacacuggaauaugcaaccaaagaaucaucacauaugaaaacagcaccugggugaaucacacauauguuaauauuaacaacacuaauguuguugcuggaaaggacaaaacuucagugacauuggccggcaauucaucucuuuguucuaucaguggaugggcuauauacacaaaagacaacagcauaagaauuggcuccaaaggagauguuuuugucauaagagaaccuuucauaucauguucucauuuggaaugcaggaccuuuuuucugacccaaggugcucuauuaaaugacaaacauucaaauggaaccguuaaggacagaaguccuuauagggccuuaaugagcuguccucuaggugaagcuccguccccauacaauucaaaguuugaaucaguugcauggucagcaagcgcaugccaugauggcaugggcugguuaacaaucgggauuucugguccagacaauggagcuguggcuguacuaaaauacaacggaauaauaacugaaaccauaaaaaguuggaaaaagcgaauauugagaacacaggagucugaaugugucugugugaacgggucauguuucaccauaaugaccgauggcccgaguaauggggccgccucguacaaaaucuucaagaucgaaaaggggaagguuacuaaaucaauagaguuaaaugcacccaauuuucauuaugaggaauguuccuguuacccagacacuggcacagugauguguguaugcagggauaacuggcaugguucaaaucgaccuugggugucuuuuaaucaaaacuuggauuaucaaguaggauacaucugcaguggaguguucggugacaauccgcgucccaaagauggaaagggcagcuguaauccaaugacugcugauggagcagacggaguuaagggguuuucauacaaauaugguaaugguguuuggauaggaaggacuaaaaguaacaaacuuagaaagggguuugagaugauuugggauccuaauggauggacagauaccgacagugauuucucagugaaacaggauguuguggcaauaaccgauuggucaggguacaguggaaguuucguucaacauccugaguuaacaggauuggacuguauaagaccuugcuucuggguugaguuagucagaggacugccuagagaaaaugcaacaaucuggacuagugggagcagcauuucuuuuuguggcguugauagugauacugcaaacuggucuuggccagacggugcugaguugccguucaccauugacaaauag

SEQ ID NO: 56585 - RNA, 1413 nt, Artificial Sequence
  derived and/or modified CDS sequence (wt) from neuraminidase__InfluenzaA__AHL89825
augaauccaaaucaaaaaauaauaaccauuggaucaaucaguauagcaaucggaauaauuagucuaauguugcaaauaggaaacauuauuucaauaugggcuagucacucaauccaaacuggaagucaaaaccacacuggaauaugcaaccaaagaaucaucacauaugaaaacagcaccugggugaaucacacauauguuaauauuaacaacacuaauguuguugcuggaaaggacaaaacuucagugacauuggccggcaauucaucucuuuguucuaucaguggaugggcuauauacacaaaagacaacagcauaagaauuggcuccaagggagauguuuuugucauaagagaaccuuucauaucauguucucauuuggaaugcaggaccuuuuuucugacccaaggugcucuauuaaaugacaaacauucaaauggaaccguuaaggacagaaguccuuauagggccuuaaugagcuguccucuaggugaagcuccguccccuuacaauucaaaguuugaaucaguugcauggucagcaagcgcaugccaugauggcaugggcugguuaacaaucggaauuucugguccagacaauggagcuguggcuguacuaaaauacaacggaauaauaacugaaaccauaaaaaguuggaaaaagcgaauauugagaacacaagagucugaaugugucugugugaacgggucuuguuucaccauaaugaccgauggcccaaguaauggggccgccucguacaaaaucuucaagaucgaaaagggaaagguuacuaaaucaauagaguugaaugcacccaauuuucauuaugaggaauguuccuguuacccagacacuggcacagugauguguguaugcagggacaacuggcaugguucaaaucgaccuugggugucuuuuaaucaaaacuuggauuaucaaauaggauacaucugcaguggaguguucggugacaauccgcgucccaaagauggaaagggcagcuguaauccagugacuguugauggagcagacggaguuaagggguuuucauacaaauaugguaaugguguuuggauaggaagaacuaaaaguaacagacuuagaaagggauuugagaugauuugggauccuaauggauggacaaauaccgacagugauuucucagugaaacaggauguuguggcaauaacugauuggucaggguacaguggaaguuucguucaacauccugaguuaacaggauuggacuguauaagaccuugcuucuggguugaauuagucagaggacugccuagagaaaauacaacaaucuggacuagugggagcagcauuucuuuuuguggcguugauagugauacugcaaacuggucuuggccagacggugcugaguugccguucaccauugacaaauag

SEQ ID NO: 56586 - RNA, 1413 nt, Artificial Sequence; identical to SEQ ID NO: 56572
  derived and/or modified CDS sequence (wt) from neuraminidase__InfluenzaA__AHL89837

SEQ ID NO: 56587 - RNA, 1413 nt, Artificial Sequence
  derived and/or modified CDS sequence (wt) from neuraminidase__InfluenzaA__AHL89849
augaauccaaaucaaaaaauaauaaccauuggaucaaucaguauagcaaucggaauaauuagucuaauguugcaaauaggaaauauuauuucaauaugggcuagucacucaauccaaacuggaagucaaaaccacacuggaauaugcaaccaaagaaucaucacauaugaaaacagcaccugggugaaucacacauauguuuauauuaacaacacuaauguuguugcuggaaaggacaaaacuucagugacauuggccggcaauucaucucuuuguucuaucaguggaugggcuauauacacaaaagacaacagcauaagaauuggcuccaagggagauguuuuugucauaagagaaccuuucauaucauguucucauuuggaaugcaggaccuuuuuucugacccaaggugcucuauuaaaugacaaacauucaaauggaaccguuaaggacagaaguccuuauagagccuuaaugagcuguccucuaggugaagcuccguccccauacaauucaaaguuugaaucaguugcauggucagcaagcgcaugccaugauggcaugggcugguuaacaaucggaauuucugguccagacaauggagcuguggcuguacuaaaauacaacggaauaauaacugaaaccauaaaaaguuggaaaaaacgaauauugagaacacaagagucugaaugugucugugugaacgggucuuguuucaccauaaugaccgauggcccgaguaauggggccgccucguacaaaaucuucaagaucgaaaagggaaugguuacuaaaucaauagaguuaaaugcacccaauuuucauuaugaggaauguuccuguuacccagacacuggcacagugauguguguaugcagagacaacuggcaugguucaaaucgaccuugggugucuuuuaaucaaaacuuggauuaucaaauaggauacaucugcaguggaguguucggugacaauccgcgucccaaagauggaaagggcagcuguaauccagugacuguugauggagcagacggaguuaagggguuuucauacaaauaugguaaugguguuuggauaggaagaacuaaaaguaacaggcuuagaaagggguuugagaugauuugggauccuaauggauggacaaauaccgacagugauuucucagugaaacaggauguuguggcaauaacugauuggucaggguacaguggaaguuucguucaacauccugaguuaacaggauuggacuguauaagaccuugcuucuggguugaauuagucagaggacugccuagagaaaauacaacaaucuggacuagugggagcagcauuucuuuuuguggcguugauagugauacugcaaacuggucuuggccagacggugcugaguugccguucaccauugacaaauag

SEQ ID NO: 56588 - RNA, 1410 nt, Artificial Sequence; identical to SEQ ID NO: 48090
  derived and/or modified CDS sequence (wt) from neuraminidase__InfluenzaA__AHL89861

SEQ ID NO: 56589 - RNA, 1410 nt, Artificial Sequence
  derived and/or modified CDS sequence (wt) from neuraminidase__InfluenzaA__AHL89873
augaauccaaaucaaaagauaauaacgauuggcucuguuucucucaccauuuccacaauaugcuucuucaugcaaacugccaucuugauaacuacuguaacauugcauuucaagcaauaugaauucaacucccccccaaacaaccaagugaugcugugugaaccaacaauaauagaaagaaacauaacagagauaguguaucugaccaacaccaccauagagaaggaaauaugccccaaacuagcagaauacagaaauuggucaaagccgcaaugugacauuacaggauuugcaccuuuuucuaaggacaauucgauuaggcuuuccgcugguggggacaucugggugacaagagaaccuuaugugucaugcgauccugacaaguguuaucaauuugcccuuggacagggaacaacacuaaacaacgugcauucaaaugacacaguacgugauaggaccccuuaucggacccuauugaugaaugaguuagguguuccuuuucaucuggggaccaagcaagugugcauagcaugguccagcucaaguugucacgauggaaaagcauggcugcauguuuguauaacgggggaugauaaaaaugcaacugcuagcuucauuuacaaugggaggcuuguagauaguauuguuucaugguccaaagaaauccucaggacccaggagucagaaugcguuuguaucaauggaacuuguacaguaguaaugacugaugggagugcuucaggaaaagcugauacuaaaauacuauucauugaggaggggaaaaucguucauacuagcacauugucaggaagugcucagcaugucgaggagugcuccugcuauccucgauauccuggugucagaugugucugcagagacaacuggaaaggcuccaauaggcccaucguagauauaaacauaaaggaucauagcauuguuuccaguuauguguguucaggacuuguuggagacacacccagaaaaaacgacagcuccagcaguagccauuguuuggauccuaacaaugaagaagguggucauggagugaaaggcugggccuuugaugauggaaaugacguguggaugggaagaacgaucagcgagaagucacgcuuaggguaugaaaccuucaaagucauugaaggcugguccaacccuaaguccaaauugcagauaaauaggcaagucauaguugacggagguaauagguccgguuauucugguauuuucucuguugaaggcaaaagcugcaucaaucggugcuuuuauguggaguugauaaggggaagaaaagaggaaacugaagucuuguggaccucaaacaguauuguuguguuuuguggcaccucagguacauauggaacaggcucauggccugauggggcggacaucaaucucaugccuauauaa

SEQ ID NO: 56590 - RNA, 1410 nt, Artificial Sequence
  derived and/or modified CDS sequence (wt) from neuraminidase__InfluenzaA__AHL89885
augaauccaaaucaaaagauaauaacgauuggcucuguuucucucaccauuuccacaauaugcuucuucaugcaaauugccaucuuaauaacuacuguaacauugcauuucaagcaauacgaauucaacucccccccaaacaaccaagugaugcugugugaaccaacaauaauagaaagaaacauaacagagauaguguaucugaccaacaccaccauagagaaggaaauaugccccaaacuagcagaauacagaaaguggucaaagccgcaauguaauauuacaggauuugcaccuuuuucuaaggacaauucgauuaggcuuuccgcugguggggacaucugggugacaagagaaccuuaugugucaugcgauccugacaaguguuaucaauuugcccuuggacagggaacaacacuaaacaacgugcauucaaaugacacaguacgugauaggaccccuuaucggacccuauugaugaaugaguuagguguuccauuucaucuggggaccaagcaagugugcauagcaugguccagcucaaguugucacgauggaaaagcauggcugcauguuuguguaacgggggaugauaaaaaugcaacugcuagcuucauuuacaaugggaggcuuguagauaguauuguuucaugguccaaagaaauccucaggacccaggagucagaaugcguuuguaucaauggaacuuguacaguaguaaugacugaugggagugcuucaggaaaagcugauacuaaaauacuauucauugaggaggggaaaaucguucauacuagcacauugucaggaagugcucagcaugucgaggaaugcuccugcuauccucgauauccuggugucagaugugucugcagagacaacuggagaggcuccaauaggcccauaguagauauaaacaugaaggauuauagcauuguuuccaguuaugugugcucaggacuuguuggagacacacccagaaaaaacgacagcuccagcaguggccauugcuuggauccuaacaaugaagaagguggucauggagugaaaggcugggccuuugaugaugggaaugacguguggaugggaagaacgaucagcgagaaguuacgcucaggauaugaaaccuucaaagucauugaaggcugguccaacccuaauuccaaauugcagauaaauaggcaagucauaguugacagagguaauagguccgguuauucugguauuuucucuguugaaggcaaaagcugcaucaaucggugcuuuuauguggaguugauaaggggaagaaaagaggaaacugaagucuuguggaccucaaacaguauuguuguguuuuguggcaccucagguacauauggaacaggcucauggccugauggggcggacaucaaucucaugccuauauaa

SEQ ID NO: 56591 - RNA, 1410 nt, Artificial Sequence
  derived and/or modified CDS sequence (wt) from neuraminidase__InfluenzaA__AHL89897
augaauccaaaucaaaagauaauaacgauuggcucuguuucucucaccauuuccacaauaugcuucuucaugcaaauugccaucuugauaacuacuguaacauugcauuucaagcaauaugaauucaacucccccccaaacaaccaagugaugcugugugaaccaacaauaauagaaagaaacauaacagagauaguguaucugaccaacaccaccauagagaaggaaauaugccccaaacuagcagaauacagaaauuggucaaagccgcaaugugacauuacaggauuugcaccuuuuucuaaggacaauucgauuaggcuuuccgcugguggggacaucugggugacaagagaaccuuaugugucaugcgauccugacaaguguuaucaauuugcccuuggacagggaacaacacuaaacaacgugcauucaaaugacacaguacgugauaggaccccuuaucggacccuauugaugaaugaguuagguguuccuuuucaucuggggaccaagcaagugugcauagcaugguccagcucaaguugucacgauggaaaagcauggcugcauguuuguauaacgggggaugauaaaaaugcaacugcuagcuucauuuacaaugggaggcuuguagauaguauuguuucaugguccaaagaaauccucaggacccaggagucagaaugcguuuguaucaauggaacuuguacaguaguaaugacugaugggagugcuucaggaaaagcugauacuaaaauacuauucauugaggaggggaaaaucguucauacuagcacauugucaggaagugcucagcaugucgaggagugcuccugcuauccucgauauccuggugucagauguguaugcagagacaacuggaaaggcuccaauaggcccaucguagacauaaacauaaaggaucauagcauuguuuccaguuauguguguucaggacuuguuggagacacacccagaaaaaacgacagcuccagcaguagccauuguuuggauccuaacaaugaagaagguggucauggagugaaaggcugggccuuugaugauggaaaugacguguggaugggaagaacgaucagcgagaagucacgcuuaggguaugaaaccuucaaagucauugaaggcugguccaacccuaaguccaaauugcagacaaauaggcaagucauaguugacagagguaauagguccgguuauucugguauuuucucuguugaaggcaaaagcugcaucaaucggugcuuuuauguggaguugauaaggggaagaaaagaggaaacugaagucuuguggaccucaaacaguauuguuguguuuuguggcaccucagguacauauggaacaggcucauggccugauggggcggacaucaaucucaugccuauauaa

SEQ ID NO: 56592 - RNA, 1410 nt, Artificial Sequence
  derived and/or modified CDS sequence (wt) from neuraminidase__InfluenzaA__AHL89909
augaauccaaaucaaaagauaauaacgauuggcucuguuucucucaccauuuccacaauaugcuucuucaugcaaauugccaucuugauaacuacuguaacauugcauuucaagcaauaugaauucagcucccccccaaacaaccaagugaugcugugugaaccaacaauaauagaaagaaacauaacagagauaguguaucugaccaacaccaccauagagaaggaaauaugccccaaacuagcagaauacagaaauuggucaaagccgcaaugugacauuacaggauuugcaccuuuuucuaaggacaauucgauuaggcuuuccgcugguggggacaucugggugacaagagaaccuuaugugucaugcgauccugacaaguguuaucaauuugcccuuggacagggaacaacacuaaacaacgugcauucaaaugacacaguacaugauaggaccccuuaucggacccuauugaugaaugagcuagguguuccauuucaucuggggaccaagcaagugugcauagcaugguccagcucaaguugucacgauggaaaagcauggcugcauguuuguguaacgggggaugacaaaaaugcaacugcuagcuucauuuacaaugggaggcuuguagauaguauuguuucaugguccaaagaaauccucaggacccaggagucagaaugcguuuguaucaauggaacuuguacaguaguaaugacugaugggagugcuucaggaaaagcugauacuaaaauacuauucauugaggaggggaaaaucguucauacuagcacauugucaggaagugcucagcaugucgaggagugcuccugcuauccucgauauccuggugucagaugugucugcagagacaauuggaaaggcuccaauaggcccaucguagauauaaacauaaaggauuauagcauuguuuccagauaugugugcucaggacuuguuggagacacacccagaaaaaacgacagcuccagcaguagccauugcuuggauccuaauaaugaagaagguggucauggagugaaaggcugggccuuugaugauggaaaugacguguggaugggaagaacgaucagcgagaagucacgcucaggauaugaaaccuucaaagucauugaaggcugguccaacccuaauuccaaauugcagauaaauaggcaagucauaguugacagagguaauagguccgguuauucugguauuuucucuguugaaggcaaaagcugcaucaaucgguguuuuuauguggaguugauaaggggaagaaaagaggaaacugaaguuuuguggaccucaaacaguauuguuguguuuuguggcaccucagguacauauggaacaggcucauggccugauggggcggacaucaaucucaugccuauauaa

SEQ ID NO: 56593 - RNA, 1410 nt, Artificial Sequence
  derived and/or modified CDS sequence (wt) from neuraminidase__InfluenzaA__AHL89921
augaauccaaaucaaaagauaauaacgauuggcucuguuucucucaccauuuccacaauaugcuucuucaugcaaauugccaucuugauaacuacuguaacauugcauuucaagcaauaugaauucaacucccccccaaacaaccaagugaugcugugugaaccaacaauaauagaaagaaacauaacagagauaguguaucugaccaacaccaccauagagaaggaaauaugccccaaacuagcagaauacagaaauuggucaaagccgcaaugugacauuacaggauuugcaccuuuuucuaaggacaauucgauuaggcuuuccgcugguggggacaucugggugacaagagaaccuuaugugucaugcgauccugacaaguguuaucaauuugcccuuggacagggaacaacacuaaacaacgugcauucaaaugacacaguacgugauaggaccccuuaucggacccuauugaugaaugaguuagguguuccuuuucaucuggggaccaagcaagugugcauagcaugguccagcucaaguugucacgauggaaaagcauggcugcauguuuguauaacgggggaugauaaaaaugcaacugcuagcuucauuuacaaugggaggcuuguagauaguauuguuucaugguccaaagaaauccucaggacccaggagucagaaugcguuuguaucaauggaacuuguacaguaguaaugacugaugggagugcuucaggagaagcugauacuaaaauacuauucauugaggaggggaaaaucguucauacuagcacauugucaggaagugcucagcaugucgaggagugcuccugcuauccucgauauccuggugucagaugugucugcagagacaacuggaaaggcuccaauaggcccaucguagauauaaacauaaaggaucauagcauuguuuccaguuauguguguucaggacuuguuggagacacacccagaaaaaacgacagcuccagcaguagccauuguuuggauccuaacaaugaagaagguggucauggagugaaaggcugggccuuugaugauggaaaugacguguggaugggaagaacgaucagcgagaagucacgcuuaggguaugaaaccuucaaagucauugaaggcugguccaacccuaaguccaaauugcagauaaauaggcaagucauaguugacagagguaauagguccgguuauucugguauuuucucuguugaaggcaaaagcugcaucaaucggugcuuuuauguggaguugauaaggggaagaaaagaggaaacugaagucuuguggaccucaaacaguauuguuguguuuuguggcaccucagguacauauggaacaggcucauggccugauggggcggacaucaaucucaugccuauauaa

SEQ ID NO: 56594 - RNA, 1410 nt, Artificial Sequence
  derived and/or modified CDS sequence (wt) from neuraminidase__InfluenzaA__AHL89933
augaauccaaaucaaaagauaauaacgauuggcucuguuucucucaccauuuccacaauaugcuucuucaugcaaauugccaucuugauaacuacuguaacauugcauuucaagcaauaugaauucagcucccccccaaacaaccaagugaugcugugugaaccaacaauaauagaaagaaacauaacagagauaguguaucugaccaacaccaccauagagaaggaaauaugccccaaacuagcagaauacagaaauuggucaaagccgcaaugugacauuacaggauuugcaccuuuuucuaaggacaauucgauuaggcuuuccgcugguggggacaucugggugacaagagaaccuuaugugucaugcgauccugacaaguguuaucaauuugcccuuggacagggaacaacacuaaacaacgugcauucaaaugacacaguacaugauaggaccccuuaucggacccuauugaugaaugagcuagguguuccauuucaucuggggaccaagcaagugugcauagcaugguccagcucaaguugucacgauggaaaagcauggcugcauguuuguguaacgggggaugacaaaaaugcaacugcuagcuucauuuacaaugggaggcuuguagauaguauuguuucaugguccaaagaaauccucagaacccaggagucagaaugcguuuguaucaauggaacuuguacaguaguaaugacugaugggagugcuucaggaaaagcugauacuaaaauacuauucauugaggaggggaaaaucguucauacuagcacauugucaggaagugcucagcaugucgaggagugcuccugcuauccucgauauccuggugucagaugugucugcagagacaauuggaaaggcuccaauaggcccaucguagauauaaacauaaaggauuauagcauuguuuccagauaugugugcucaggacuuguuggagacacacccagaaaaaacgacagcuccagcaguagccauugcuuggauccuaacaaugaagaagguggucauggagugaaaggcugggccuuugaugauggaaaugacguguggaugggaagaacgaucagcgagaagucacgcucaggauaugaaaccuucaaagucauugaaggcugguccaacccuaauuccaaauugcagauaaacaggcaagucauaguugacagagguaauagguccgguuauucugguauuuucucuguugaaggcaaaagcugcaucaaucggugcuuuuauguggaguugauaaggggaagaaaagaggaaacugaaguuuuguggaccucaaacaguauuguuguguuuuguggcaccucagguacauauggaacaggcucauggccugauggggcggacaucaaucucaugccuauauaa

SEQ ID NO: 56595 - RNA, 1410 nt, Artificial Sequence
  derived and/or modified CDS sequence (wt) from neuraminidase__InfluenzaA__AHL89945
augaauccaaaucaaaagauaauaacgauuggcucuguuucucucaccauuuccacaauaugcuucuucaugcaaauugccaucuugauaacuacuguaacauugcauuucaagcaauaugaauucaacucccccccaaacaaccaagugaugcugugugaaccaacaauaauagaaagaaacauaacagagauaguguaucugaccaacaccaccauagagaaggaaauaugccccaaacuagcagaauacagaaauuggucaaagccgcaaugugacauuacaggauuugcaccuuuuucuaaggacaacucgauuaggcuuuccgcugguggggacaucugggugacaagagaaccuuaugugucaugcgauccugacaaguguuaucaauuugcccuuggacagggaacaacacuaaacaacgugcauucaaaugacacaguacgugauaggaccccuuaucggacccuauugaugaaugaguuagguguuccuuuucaucuggggaccaagcaagugugcauagcaugguccagcucaaguugucacgauggaaaagcauggcugcauguuuguauaacgggggaugauaaaaaugcaacugcuagcuucauuuacaaugggaggcuuguagauaguauuguuucaugguccaaagaaauccucaggacccaggagucagaaugcguuuguaucaauggaacuuguacaguaguaaugacugaugggagugcuucaggagaagcugauacuaaaauacuauucauugaggaggggaaaaucguucauacuagcacauugucaggaagugcucagcaugucgaggagugcuccugcuauccucgauauccuggugucagaugugucugcagagacaacuggaaaggcuccaauaggcccaucguagauauaaacauaaaggaucauagcauuguuuccaguuauguguguucaggacuuguuggagacacacccagaaaaaacgacagcuccagcaguagccauuguuuggauccuaacaaugaagaagguggucauggagugaaaggcugggccuuugaugauggaaaugacguguggaugggaagaacgaucagcgagaagucacgcuuaggguaugaaaccuucaaagucauugaaggcugguccaacccuaaguccaaauugcagauaaauaggcaagucauaguugacagagguaauagguccgguuauucugguauuuucucuguugaaggcaaaagcugcaucaaucggugcuuuuauguggaguugauaaggggaagaaaagaggaaacugaagucuuguggaccucaaacaguauuguuguguuuuguggcaccucagguacauauggaacaggcucauggccugauggggcggacaucaaucucaugccuauauaa

SEQ ID NO: 56596 - RNA, 1410 nt, Artificial Sequence
  derived and/or modified CDS sequence (wt) from neuraminidase__InfluenzaA__AHL89957
augaauccaaaucaaaagauaauaacgauuggcucuguuucucucaccauuuccacaauaugcuucuucaugcaaauugccaucuugauaacuacuguaacauugcauuucaagcaauaugaauucaacucccccccaaacaaccaagugaugcugugugaaccaacaauaauagaaagaaacauaacagagauaguguaucugaccaacaccaccauagagaaggaaauaugccccaaacuagcagaauacagaaauuggucaaagccgcaaugugacauuacaggauuugcaccuuuuucuaaggacaauucgauuaggcuuuccgcugguggggacaucugggugacaagagaaccuuaugugucaugcgauccugacaaguguuaucaauuugcccuuggacagggaacaacacuaaacaacgugcauucaaaugacacaguacgugauaggaccccuuaucggacccuauugaugaaugaguuagguguuccuuuucaucuggggaccaagcaagugugcauagcaugguccagcucaaguugucacgauggaaaagcauggcugcauguuuguauaacgggggaugauaaaaaugcaacugcuagcuucauuuacaaugggaggcuuguggauaguauuguuucaugguccaaagaaauccucaggacccaggagucagaaugcguuuguaucaauggaacuuguacaguaguaaugacugaugggagugcuucaggaaaagcugauacuaaaauacuauucauuaaggaggggaaaaucguucauacuagcacauugucaggaagugcucagcaugucgaggagugcuccugcuauccucgauauccuggugucagaugugucugcagagacaacuggaaaggcuccaauaggcccaucguagauauaaacauaaaggaucauagcauuguuuccaguuauguguguucaggacuuguuggagacacacccagaaaaaacgacagcuccagcaguagccauuguuuggauccuaacaaugaagaagguggucauggagugaaaggcugggccuuugaugauggaaaugacguguggaugggaagaacgaucagcgagaagucacgcuuaggguaugaaaccuucaaagucauugaaggcugguccaacccuaaguccaaauugcagauaaauaggcaagucauaguugacagagguaauagguccgguuauucugguauuuucucuguugaaggcaaaagcugcaucaaucggugcuuuuauguggaguugauaaggggaagaaaagaggaaacugaagucuuguggaccucaaacaguauuguuguguuuuguggcacuucagguacauauggaacaggcucauggccugauggggcggacaucaaucucaugccuauauaa

SEQ ID NO: 56597 - RNA, 1410 nt, Artificial Sequence
  derived and/or modified CDS sequence (wt) from neuraminidase__InfluenzaA__AHL89969
augaauccaaaucaaaagauaauaacgauuggcucuguuucucucaccauuuccacaauaugcuucuucaugcaaauugccaucuugauaacuacuguaacauugcauuucaagcaauaugaauucaacucccccccaaacaaccaagugaugcugugugaaccaacaauaauagaaagaaacauaacagagauaguguaucugaccaacaccaccauagagaaggaaauaugccccaaacuagcagaauacagaaauuggucaaagccgcaaugugacauuacaggauuugcaccuuuuucuaaggacaauucgauuaggcuuuccgcugguggggacaucugggugacaagagaaccuuaugugucaugcgauccugacaaguguuaucaauuugcccuuggacagggaacaacacuaaacaacgugcauucaaaugacacaguacgugauaggaccccuuaucggacccuauugaugaaugaguuagguguuccuuuucaucuggggaccaagcaagugugcauagcaugguccagcucaaguugucacgauggaaaagcauggcugcauguuuguauaacgggggaugauaaaaaugcaacugcuagcuucauuuacaaugggaggcuuguagauaguauuguuucaugguccaaagaaauccucaggacccaggagucagaaugcguuuguaucaauggaacuuguacaguaguaaugacugaugggagugcuucaggaaaagcugauacuaaaauacuauucauugaggaggggaaaaucguucauacuagcacauugucaggaagugcucagcaugucgaggagugcuccugcuauccucgauauccuggugucagaugugucugcagagacaacuggaaaggcuccaauaggcccaucguagauauaaacauaaaggaucauagcauuguuuccaguuauguguguucaggacuuguuggagacacacccagaaaaaacgacagcuccagcaguagccauuguuuggauccuaacaaugaagaagguggucauggagugaaaggcugggccuuugaugauggaaaugacguguggaugggaagaacgaucagcgagaagucacgcuuaggguaugaaaccuucaaagucauugaaggauggucuaacccuaaguccaaauugcagauaaauaggcaagucauaguugacagagguaauagguccgguuauucugguauuuucucuguugaaggcaaaagcugcaucaaucggugcuuuuauguggaguugauaaggggaagaaaagaggaaacugaagucuuguggaccucaaacaguauuguuguguuuuguggcaccucagguacauauggaacaggcucauggccugauggggcggacaucaaucucaugccuauauaa

SEQ ID NO: 56598 - RNA, 1410 nt, Artificial Sequence; identical to SEQ ID NO: 56597
  derived and/or modified CDS sequence (wt) from neuraminidase__InfluenzaA__AHL89981

SEQ ID NO: 56599 - RNA, 1410 nt, Artificial Sequence
  derived and/or modified CDS sequence (wt) from neuraminidase__InfluenzaA__AHL89993
augaauccaaaucaaaagauaauaacgauuggcucuguuucucucuccauuuccacaauaugcuucuucaugcaaauugccaucuugauaacuacuguaacauugcauuucaagcaauaugaauucaacucccccccaaacaaccaagugaugcugugugaaccaacaauaauagaaagaaacauaacagagauaguguaucugaccaacaccaccauagagaaggaaauaugccccaaacuagcagaauacagaaauuggucaaagccgcaaugugacauuacaggauuugcaccuuuuucuaaggacaauucgauuaggcuuuccgcugguggggacaucugggugacaagagaaccuuaugugucaugcgauccugacaaguguuaucaauuugcccuuggacagggaacaacacuaaacaacgugcauucaaaugacacaguacgugauaggaccccuuaucggacccuauugaugaaugaguuagguguuccuuuucaucuggggaccaagcaagugugcauagcaugguccagcucaaguugucacgauggaaaagcauggcugcauguuuguauaacgggggaugauaaaaaugcaacugcuagcuucauuuacaaugggaggcuuguagauaguauuguuucaugguccaaagaaauccucaggacccaggagucagaaugcguuuguaucaauggaacuuguacacuaguaaugacugaugggagugcuucaggaaaagcugauacuaaaauacuauucauugaggaggggaaaaucguucauacuagcacauugucaggaagugcucagcaugucgaggagugcuccugcuauccucgauauccuggugucagaugugucugcagagacaacuggaaaggcuccaauagacccaucguagauauaaacauaaaggaucauagcauuguuuccaguuauguguguucaggacuuguuggagacacacccagaaaaaacgacagcuccagcaguagccauuguuuggauccuaacaaugaagaagguggucauggagugaaaggcugggccuuugaugauggaaaugacguguggaugggaagaacgaucagcgagaagucacgcuuaggguaugaaaccuucaaagucauugaaggcugguccaacccuaaguccaaauugcagauaaauaggcaagucauaguugacagagguaauagguccgguuauucugguauuuucucuguugaaggcaaaagcugcaucaaucggugcuuuuauguggaguugauaaggggaagaaaagaggaaacugaagucuuguggaccucaaacaguauuguuguguuuuguggcaccucagguacauauggaacaggcucauggccugauggggcggacaucaaucucaugccuauauaa

SEQ ID NO: 56600 - RNA, 1410 nt, Artificial Sequence
  derived and/or modified CDS sequence (wt) from neuraminidase__InfluenzaA__AHL90005
augaauccaaaucaaaagauaauaacgauuggcucuguuucucucaccauuuccacaauaugcuucuucaugcaaauugccaucuugauaacuacuguaacauugcauuucaagcaauaugaauucagcucccccccaaacaaccaagugaugcugugugaaccaacaauaauaaaaagaaacauaacagagauaguguaucugaccaacaccaccauagagaaggaaauaugccccaaacuagcagaauacagaaauuggucaaagccgcaaugugacauuacaggauuugcaccuuuuucuaaggacaauucgauuaggcuuuccgcugguggggacaucugggugacaagagaaccuuaugugucaugcgauccugacaaguguuaucaauuugcccuuggacagggaacaacacuaaacaacgugcauucaaaugacacaguacaugauaggaccccuuaucggacccuauugaugaaugagcuagguguuccauuucaucuggggaccaagcaagugugcauagcaugguccagcucaaguugucacgauggaaaagcauggcugcauguuuguguaacgggggaugacaaaaaugcaacugcuagcuucauuuacaaugggaggcuuguagauaguauuguuucaugguccaaagaaauccucaggacccaggagucagaaugcguuuguaucaauggaacuuguacaguaguaaugacugaugggagugcuucaggaaaagcugauacuaaaauauuauucauugaggaggggaaaauuguucauacuagcacauugucaggaagugcucagcaugucgaggagugcuccugcuauccucgauauccuggugucagaugugucugcagagacaauuggaaaggcuccaauaggcccaucguagauauaaacauaaaggauuauagcauuguuuccagauaugugugcucaggacuuguuggagacacacccagaaaaaacgacagcuacagcaguagccauugcuuggauccuaacaaugaagaagguggucauggagugaaaggcugggccuuugaugauggaaaugacguguggaugggaagaacgaucagcgagaagucacgcucaggauaugaaaccuucaaagucauugaaggcugguccaacccuaauuccaaauugcagauaaacaggcaagucauaguugacagagguaauagguccgguuauucugguauuuucucuguugaaggcaaaagcugcaucaaucggugcuuuuauguggaguugauaaggggaagaaaagaggaaacugaaguuuuguggaccucaaacaguauuguuguguuuuguggcaccucagguacauauggaacaggcucauggccugauggggcggacaucaaucucaugccuauauaa

SEQ ID NO: 56601 - RNA, 1410 nt, Artificial Sequence
  derived and/or modified CDS sequence (wt) from neuraminidase__InfluenzaA__AHL90017
augaauccaaaucaaaagauaauaacgauuggcucuguuucucucaccauuuccacaauaugcuucuucaugcaaauugccaucuugauaacuacuguaacauugcauuucaagcaauaugaauucaacucccccccaaacaaccaagugaugcugugugaaccaacaauaauagaaagaaacauaacagagauaguguaucugaccaacaccaccauagagaaggaaauaugccccaaacuagcagaauacagaaauuggucaaagccgcaaugugacauuacaggauuugcaccuuuuucuaaggacaauucgauuaggcuuuccgcugguggggacaucugggugacaagagaaccuuaugugucaugcgauccugacaaguguuaucaauuugcccuuggacagggaacaacacuaaacaacgugcauucaaaugacacaguacgugauaggaccccuuaccggacccuauugaugaaugaguuagguguuccuuuucaucuggggaccaagcaagugugcauagcaugguccagcucaaguugucacgauggaaaagcauggcugcauguuuguauaacgggggaugauaaaaaugcaacugcuagcuucauuuacaaugggaggcuuguagauaguauuguuucaugguccaaagaaauccucaggacccaggagucagaaugcguuuguaucaauggaacuuguacaguaguaaugacugaugggagugcuucaggaaaagcugauacuaaaauacuauucauugaggaggggaaaaucguucauacuagcacauugucaggaagugcucagcaugucgaggagugcuccugcuauccucgauauccuggugucagaugugucugcagagacaacuggaaaggcuccaauaggcccaucguagauauaaacauaaaggaucauagcauuguuuccaguuauguguguucaggacuuguuggagacacacccagaaaaaacgacagcuccagcaguggccauuguuuggauccuaacaaugaagaagguggucauggagugaaaggcugggccuuugaugauggaaaugacguguggaugggaagaacgaucagcgagaagucacgcuuaggguaugaaaccuucaaagucauugaaggcugguccaacccuaaguccaaauugcagauaaauaggcaagucauaguugacagagguaauagguccgguuauucugguauuuucucuguugaaggcaaaagcugcaucaaucggugcuuuuauguggaguugauaaggggaagaaaagaggaaacugaagucuuguggaccucaaacaguauuguuguguuuuguggcaccucagguacauauggaacaggcucauggccugauggggcggacaucaaucucaugccuauauaa

SEQ ID NO: 56602 - RNA, 1410 nt, Artificial Sequence
  derived and/or modified CDS sequence (wt) from neuraminidase__InfluenzaA__AHL90029
augaauccaaaucaaaagauaauaacgauuggcucuguuucucucaccauuuccacaauaugcuucuucaugcaaauugccaucuugauaacuacuguaacauugcauuucaagcaauaugaauucaacucccccccaaacaaccaagugaugcugugugaaccaacaauaauagaaagaaacauaacagagauaguguaucugaccaacaccaccauagagaaggaaauaugccccaaacuagcagaauacagaaauuggucaaagccgcaaugugacauuacaggauuugcaccuuuuucuaaggacaauucgauuaggcuuuccgcugguggggacaucugggugacaagagaaccuuaugugucaugcgauccugacaaguguuaucaauuugcccuuggacagggaacaacacuaaacaacgugcauucaaaugacacaguacgugauaggaccccuuaucggacccuauugaugaaugaguuagguguuccuuuucaucuggggaccaagcaagugugcauagcaugguccagcucaaguugucacgauggaaaagcauggcugcauguuuguauaacgggggaugauaagaaugcaacugcuagcuucauuuacaaugggaggcuuguagauaguauuguuucaugguccaaagaaauccucaggacccaggagucagaaugcguuuguaucaauggaacuuguacaguaguaaugacugaugggagugcuucaggagaagcugauacuaaaauacuauucauugaggaggggaaaaucguucauacuagcacguugucaggaagugcucagcaugucgaggagugcuccugcuauccucgauauccuggugucagaugugucugcagagacaacuggaaaggcuccaauaggcccaucguagauauaaacauaaaggaucauagcauuguuuccaguuauguguguucaggacuuguuggagacacacccagaaaaaacgacagcuccagcaguagccauuguuuggauccuaacaaugaagaagguggucauggagugaaaggcugggccuuugaugauggaaaugacguguggaugggaagaacgaucagcgagaagucacgcuuaggguaugaaaccuucaaagucauugaaggcugguccaacccuaaguccaaacugcagauaaauaggcaagucauaguugacagagguaauagguccgguuauucugguauuuucucuguugaaggcaaaagcugcaucaaucggugcuuuuauguggaguugauaaggggaagaaaagaggaaacugaagucuuguggaccucaaacaguauuguuguguuuuguggcaccucagguacauauggaacaggcucauggccugauggggcggacaucaaucucaugccuauauaa

SEQ ID NO: 56603 - RNA, 1410 nt, Artificial Sequence
  derived and/or modified CDS sequence (wt) from neuraminidase__InfluenzaA__AHL90041
augaauccaaaucaaaagauaauaacgauuggcucuguuucucucaccauuuccacaauaugcuucuucaugcaaauugccaucuugauaacuacuguaacauugcauuucaagcaauaugaauucaacucccccccaaacaaccaagugaugcugugugaaccaacaauaauagaaagaaacauaacagagauaguguaucugaccaacaccaccauagagaaggaaauaugccccaaacuagcagaauacagaaauuggucaaagccgcaaugugacauuacaggauuugcaccuuuuucuaaggacaauucgauuaggcuuuccgcugguggggacaucugggugacaagagaaccuuaugugucaugcgauccugacaaguguuaucaauuugcccuuggacagggaacaacacuaaacaacgugcauucaaaugacacaguacgugauaggaccccuuaucggacccuauugaugaaugaguuagguguuccuuuucaucuggggaccaagcaagugugcauagcaugguccagcucaaguugucacgauggaaaagcauggcugcauguuuguauaacgggggaugauaaaaaugcaacugcuagcuucauuuacaaugggaggcuuguagauaguauuguuucaugguccaaagaaauccucaggacccaggagucagaaugcguuuguaucaauggaacuuguacaguaguaaugacugaugggagugcuucaggaaaagcugauacuaaaauacuauucauugaggaggggaaaaucguucauacuagcacauugucaggaagugcucagcaugucgaggagugcuccugcuauccucgauauccuggugucagaugugucugcagagacaacuggaaaggcuccaauaggcccaucguagauauaaacauaaaggaucauagcauuguuuccaguuauguguguucaggacuuguuggagacacacccagaaaaaacgacagcuccagcaguagccauuguuuggauccuaacaaugaagaagguggucauggagugaaaggcugggccuuugaugauggaaaugacguguggaugggaagaacgaucagcgagaagucacgcuuaggguaugaaaccuucaaagucauugaaggcugguccaacccuaaguccaaauugcagauaaauaggcaagucauaguugacagagguaauaggaccgguuauucugguauuuucucuguugaaggcaaaagcugcaucaaucggugcuuuuauguggaauugauaaggggaagaaaagaggaaacugaagucuuguggaccucaaacaguauuguuguguuuuguggcaccucagguacauauggaacaggcucauggccugauggggcggacaucaaucucaugccuauauaa

SEQ ID NO: 56604 - RNA, 1410 nt, Artificial Sequence; identical to SEQ ID NO: 48069
  derived and/or modified CDS sequence (wt) from neuraminidase__InfluenzaA__AHL90053

SEQ ID NO: 56605 - RNA, 1410 nt, Artificial Sequence
  derived and/or modified CDS sequence (wt) from neuraminidase__InfluenzaA__AHL90065
augaauccaaaucaaaagauaauaacgauuggcucuguuucucucacaauuuccacaauaugcuucuucaugcaaacugccaucuugauaacuacuguaacauugcauuucaagcaauaugaauucaacucccccccaaacaaccaagugaugcugugugaaccaacaauaauagaaagaaacauaacagagauaguguaucugaccaacaccaccauagagaaggaaauaugccccaaacuagcagaauacagaaauuggucaaagccgcaaugugacauuacaggauuugcaccuuuuucuaaggacaauucgauuaggcuuuccgcugguggggacaucugggugacaagagaaccuuaugugucaugcgauccugacaaguguuaucaauuugcccuuggacagggaacaacacuaaacaacgugcauucaaauaacacaguacgugauaggaccccuuaucggacccuauugaugaaugaguuagguguuccuuuucaucuggggaccaagcaagugugcauagcaugguccagcucaaguugucacgauggaaaagcauggcugcauguuuguauaacgggggaugauaaaaaugcaacugcuagcuucauuuacaaugggaggcuuguagauaguauuguuucaugguccaaagaaauccucaggacccaggagucagaaugcguuuguaucaauggaacuuguacaguaguaaugacugaugggagugcuucaggaaaagcugauacuaaaauacuauucauugaggaggggaaaaucguucauacuagcacauugucaggaagugcucagcaugucgaggagugcuccugcuauccucgauauccuggugucagaugugucugcagagacaacuggaaaggcuccaauaggcccaucguagauauaaacauaaaggaucauagcauuguuuccaguuauguguguucaggacuuguuggagacacacccagaaaaaacgacagcuccagcaguagccauuguuuggauccuaacaaugaagaagguggucauggagugaaaggcugggccuuugaugauggaaaugacguguggaugggaagaacgaucagcgagaagucacgcuuaggguaugaaaccuucaaagucauugaaggcugguccaacccuaaguccaaauugcagauaaauaggcaagucauaguugacagagguaauagguccgguuauucugguauuuucucuguugaaggcaaaagcugcaucaaucggugcuuuuauguggaguugauaaggggaagaaaagaggaaacugaagucuuguggaccucaaacaguauuguuguguuuuguggcaccucagguacauauggaacaggcucauggccugauggggcggacaucaaucucaugccuauauaa

SEQ ID NO: 56606 - RNA, 1410 nt, Artificial Sequence
  derived and/or modified CDS sequence (wt) from neuraminidase__InfluenzaA__AHL90077
augaauccaaaucaaaagauaauaacgauuggcucuguuucucucaccauuuccacaauaugcuucuucaugcaaauugccaucuugauaacuacuguaacauugcauuucaagcaauaugaauucaacucccccccaaacaaccaagugaugcugugugaaccaacaauaauagaaagaaacauaacagagauaguguaucugaccaacaccaccauagagaaggaaauaugccccaaacuagcagaauacagaaauuggucaaagccgcaaugugacauuacaggauuugcaccuuuuucuaaggacaauucgauuaggcuuuccgcugguggggacaucugggugacaagagaaccuuaugugucaugcgauccugacaaguguuaucaauuugcccuuggacagggaacaacacuaaacaacgugcauucaaaugacacaguacgugauaggaccccuuaucggacccuauugaugaaugaguuagguguuccuuuucaucuggggaccaagcaagugugcauagcaugguccagcucaaguugucacgauggaaaagcauggcugcauguuuguauaacgggggaugauaaaaaugcaacugcuagcuucauuuacaaugggaggcuuguggauaguauuguuucaugguccaaagaaauccucaggacccaggagucagaaugcguuuguaucaauggaacuuguacaguaguaaugacugaugggagugcuucaggaaaagcugauacuaaaauacuauucauuaaggaggggaaaaucguucauacuagcacauugucaggaagugcucagcaugucgaggagugcuccugcuauccucgauauccugguguuagaugugucugcagagacaacuggaaagguuccaauaggcccaucguagauauaaacauaaaggaucauagcauuguuuccaguuauguguguucaggacuuguuggagacacacccagaaaaaacgacagcuccagcaguagccauuguuuggauccuaacaaugaagaagguggucauggagugaaaggcugggccuuugaugauggaaaugacguguggaugggaagaacgaucagcgagaagucacgcuuaggguaugaaaccuucaaagucauugaaggcugguccaacccuaaguccaaauugcagauaaauaggcaagucauaguugacagagguaauagguccgguuauucugguauuuucucuguugaaggcaaaagcugcaucaaucggugcuuuuauguggaguugauaaggggaagaaaagaggaaacugaagucuuguggaccucaaacaguauuguuguguuuuguggcacuucagguacauauggaacaggcucauggccugauggggcggacaucaaucucaugccuauauaa

SEQ ID NO: 56607 - RNA, 1410 nt, Artificial Sequence
  derived and/or modified CDS sequence (wt) from neuraminidase__InfluenzaA__AHL90089
augaauccaaaucaaaagauaauaacgauuggcucuguuucucucaccauuuccacaauaugcuucuucaugcaaacugccaucuugauaacuacuguaacauugcauuucaagcaauaugaauucaacuccccuccaaacaaccaagugaugcugugugaaccaacaauaauagaaagaaacauaacagagauaguguaucugaccaacaccaccauagagaaggaaauaugccccaaacuagcagaauacagaaauuggucaaagccgcaaugugacauuacaggauuugcaccuuuuucuaaggacaauucgauuaggcuuuccgcugguggggacaucugggugacaagagaaccuuaugugucaugcgauccugacaaguguuaucaauuugcccuuggacagggaacaacacuaaacaacgugcauucaaaugacacaguacgcgauaggaccccuuaucggacccuauugaugaaugaguuagguguuccuuuucaucuggggaccaagcaagugugcauagcaugguccagcucaaguugucacgauggaaaagcauggcugcauguuuguauaacgggggaugauaaaaaugcaacugcuagcuucauuuacaaugggaggcuuguagauaguauuguuucaugguccaaagaaauccucaggacccaggagucagaaugcguuuguaucaauggaacuuguacaguaguaaugacugaugggagugcuucaggaaaagcugauacuaaaauacuauucauugaggaggggaaaaucguucauacuagcacauugucaggaagugcucagcaugucgaggagugcuccugcuauccucgauauccuggugucagaugugucugcagagacaacuggaaaggcuccaauaggcccaucguagauauaaacauaaaggaucauaguauuguuuccaguuauguguguucaggacuuguuggagacacacccagaaaaaacgacagcuccagcaguagccauuguuuggauccuaacaaugaagaagguggucauggagugaaaggcugggccuuugaugauggaaaugacguguggaugggaagaacgaucagcgagaagucacgcuuaggguaugaaaccuucaaagucauugaaggcugguccaacccuaaguccaaauugcagauaaauaggcaagucauaguugacagagguaauagguccgguuauucugguauuuucucuguugaaggcaaaagcugcaucaaucggugcuuuuauguggaguugauaaggggaagaaaagaggaaacugaagucuuguggaccucaaacaguauuguuguguuuuguggcaccucagguacauauggaacaggcucauggccugauggggcggacaucaaucucaugccuauauaa

SEQ ID NO: 56608 - RNA, 1410 nt, Artificial Sequence; identical to SEQ ID NO: 48755
  derived and/or modified CDS sequence (wt) from neuraminidase__InfluenzaA__AHL90101

SEQ ID NO: 56609 - RNA, 1410 nt, Artificial Sequence; identical to SEQ ID NO: 56593
  derived and/or modified CDS sequence (wt) from neuraminidase__InfluenzaA__AHL90113

SEQ ID NO: 56610 - RNA, 1413 nt, Artificial Sequence
  derived and/or modified CDS sequence (wt) from neuraminidase__InfluenzaA__AHL90125
augaacccaaaucaaaagauaauaaccauuggaucaaucaguauagcaaucggaauaauuagucuaauguugcaaauaggaaauauuauuucaauaugggcuagucacucaauccaaacuggaagucaaaacaacacuggaauaugcaaccaaagaaucaucacauaugaaaacagcaccugggugaaucacacauauguuaauauuaacaacacuaauguuguugcuggagaggacaaaacuucagugacauuggccggcaauucaucucuuuguucuaucaguggaugggcuauauacacaaaagacaacagcauaagaauuggcuccaaaggagauguuuuugucauaagagaaccuuucauaucauguucucacuuggaaugcagaaccuuuuuucugacccaaggcgcucuauuaaaugacaaacauucaaaugggaccguaaaggacagaaguccuuauagggccuuaaugagcuguccucuaggugaagcuccguccccauacaauucaaaguucgaaucaguugcauggucagcaagcgcaugccaugauggcaugggcugguuaacaauuggaauuucugguccagacaauggagcuguggcuguacuaaaauacaacggaauaauaacuggaaccauaaaaaguuggaaaaagcaaauauuaagaacacaagagucugaaugugucuguaugaacgggucauguuucaccauaaugaccgauggcccgaguaauaaggccgccucguacaaaauuuucaagaucgaaaaggggaagguuacuaaaucaauagaguugaaugcacccaauuuucauuaugaggaauguuccuguuacccagacacuggcauagugauguguguaugcagggacaauuggcaugguucaaaucgaccuugggugucuuuuaaucaaaacuuggauuaucaaauaggauacaucugcaguggaguguucggugacaauccgcgucccgaagauggagagggcagcugcaauccagugacuguugauggagcaaacggaguaaaaggguuuucauacaaauaugauaaugguguuuggauaggaaggaccaaaaguaacagacuuagaaagggguuugagaugaucugggauccuaauggauggacaaauaccgacagugauuucucagugaaacaggauguuguagcaauaacugauuggucaggguacagcggaaguuucguccaacauccugaguuaacaggauuggacuguauaagaccuugcuucuggguugaguuagucagagggcugccuagagaaaauacaacaaucuggacuagugggagcagcauuucuuuuuguggcguuaauagugauacugcaaacuggucuuggccagacggugcugaguugccguucaccauugacaaguag

SEQ ID NO: 56611 - RNA, 1413 nt, Artificial Sequence
  derived and/or modified CDS sequence (wt) from neuraminidase__InfluenzaA__AHL90136
augaacccaaaucaaaagauaauaaccauuggaucaaucaguauagcaaucggaauaauuagucuaauguugcaaauaggaaauauuauuucaauaugggcuagucacucaauccaaacuggaagucaaaacaacacuggaauaugcaaccaaagaaucaucacauaugaaaacagcaccugggugaaucacacauauguuaauauuaacaacacuaauguuguugcuggagaggacaaaacuucagugacauuggccggcaauucaucucuuuguucuaucaguggaugggcuauauacacaaaagacaacagcauaagaauuggcuccaaaggagauguuuuugucauaagagaaccuuucauaucauguucucacuuggaaugcagaaccuuuuuucugacccaaggcgcucuauuaaaugacaaacauucaaaugggaccguaaaggacagaaguccuuauagggccuuaaugagcuguccucuaggugaagcuccguccccauacaauucaaaguucgaaucaguugcauggucagcaagcgcaugccaugauggcaugggcugguuaacaaucggaauuucugguccagacaauggagcuguggcuguacuaaaauacaacggaauaauaacuggaaccauaaaaaguuggaaaaagcaaauauuaagaacacaagagucugaaugugucuguaugaacgggucauguuucaccauaaugaccgauggcccgaguaauaaggccgccucguacaaaauuuucaagaucgaaaaggggaagguuacuaaaucaauagaguugaaugcacccaauuuuuauuaugaggaaugcuccuguuacccagacucuggcauggugauguguguaugcagggacaacuggcaugguucaaaucgaccuugggugucuuuuaaucaaaacuuggauuaucaaauaggauacaucugcaguggaguguuuggugacaauccgcgucccgaagauggagagggcagcugcaauccagugacuguugauggagcaaacggaguaaaaggguuuucauacaaauaugguaaugguguuuggauaggaaggaccaaaaguaacagacuuaggaagggguuugagaugauuugggauccuaauggauggacaaauaccgacagugauuucucagugaaacaggauguuguagcaauaacugauuggucaggguacagcggaaguuucguccaacauccugaguuaacaggauuggacuguauaagaccuugcuucuggguugaguuagucagagggcugccuagagaaaauacaacaaucuggacuagugggagcagcauuucuuuuuguggcguuaauagugauacugcaaacuggucuuggccagacggugcugaguugccguucaccauugacaaguag

SEQ ID NO: 56612 - RNA, 1413 nt, Artificial Sequence
  derived and/or modified CDS sequence (wt) from neuraminidase__InfluenzaA__AHL90160
augaacccaaaucaaaagauaauaaccauuggaucaaucaguauagcaaucggaauaauuagucuaauguugcaaauaggaaauauuauuucaauaugggcuagucacucaauccaaacuggaagucaaaacaacacuggaauaugcaaccaaagaaucaucacauaugaaaacagcaccugggugaaucacacauauguuaauauuaacaacacuaauguuguugcuggagaggacaaaacuucagugacauuggccggcaauucaucucuuuguucuaucaguggaugggcuauauacacaaaagacaacagcauaagaauuggauccaaaggagauguuuuugucauaagagaaccuuucauaucauguucucacuuggaaugcagaaccuuuuuucugacccaaggcgcucuauuaaaugacaaacauucaaaugggaccguaaaggacagaaguccuuauagggccuuaaugagcuguccucuaggugaagcuccguccccauacaauucaaaguucgaaucaguugcauggucagcaagcgcaugccaugauggcaugggcugguuaacaaucggaauuucugguccagacaauggagcuguggcuguacuaaaauacaacggaauaauaacuggaaccauaaaaaguuggaaaaagcaaauauuaagaacacaagagucugaaugugucuguaugaacgggucauguuucaccauaaugaccgauggcccgaguaauaaggccgccucguacaaaauuuucaagaucgaaaaggggaagguuacuaaaucaauagaguugaaugcacccaauuuucauuaugaggaauguuccuguuacccagacacuggcauagugauguguguaugcagggacaacuggcaugguucaaaucgaccuugggugucuuuuaaucaaaacuuggauuaucaaauaggauacaucugcaguggaguguucggugacaauccgcgucccgaagauggagagggcagcugcaauccagugacuguugauggagcaaacggaguaaaaggguuuucauacaaauaugauaaugguguuuggauaggaaggaccaaaaguaacagacuuagaaagggguuugagaugaucugggauccuaauggauggacaaauaccgacagugauuucucagugaaacaggauguuguagcaauaacugauuggucaggauacagcggaaguuucguccaacauccugaguuaacaggauuggacuguauaagaccuugcuucuggguugaguuagucagagggcugccuagagaaaauacaacaaucuggacuagugggagcagcauuucuuuuuguggcguuaauagugauacugcaaacuggucuuggccagacggugcugaguugccguucaccauugacaaguag

SEQ ID NO: 56613 - RNA, 1413 nt, Artificial Sequence
  derived and/or modified CDS sequence (wt) from neuraminidase__InfluenzaA__AHL90172
augaacccaaaucaaaagauaauaaccauuggaucaaucaguauagcaaucggaauaauuagucuaauguugcaaauaggaaauauuauuucaauaugggcuagucacucaauccaaacuggaagucaaaacaacacuggaauaugcaaccaaagaaucaucacauaugaaaacagcaccugggugaaucacacauauguuaauauuaacaacacuaauguuguugcuggggaggacaaaacuucagugacauuggccggcaauucaucucuuuguucuaucaguggaugggcuauauacacaaaagacaacagcauaagaauuggcuccaaaggagauguuuuugucauaagagaaccuuucauaucauguucucacuuggaaugcagaaccuuuuuucugacccaaggcgcucuauuaaaugacaaacauucaaaugggaccguaaaggacagaaguccuuauagggccuuaaugagcuguccucuaggugaagcuccuuccccauacaauucaaaguucgaaucaguugcauggucagcaagcgcaugccaugauggcaugggcugguuaacaauuggaauuucugguccagacaauggagcuguggcuguacuaaaauacaacggaauaauaacuggaaccauaaaaaguuggaaaaagcaaauauuaagaacacaagagucugaaugugucuguaugaacgggucauguuucaccauaaugaccgauggcccgaguaauaaggccgccucguacaaaauuuucaagaucgaaaaggggaagguuacuaaaucaauagaguugaaugcacccaauuuucauuaugaggaauguuccuguuacccagacacuggcauagugauguguguaugcagggacaauuggcaugguucaaaucgaccuugggugucuuuuaaucaaaacuuggauuaucaaauaggauacaucugcaguggaguguucggugacaauccgcgucccgaagauggagagggcaacugcaauccagugacuguugauggagcaaacggaguaaaaggguuuucauacaaauaugguaaugguguuuggauaggaaggaccaaaaguaacagacuuagaaagggguuugagaugaucugggauccuaauggauggacaaauaccgacagugauuucucagugaaacaggauguuguagcaauaacugauuggucaggguacagcggaaguuucguccaacauccugaguuaacaggauuggacuguauaagaccuugcuucuggguugaguuagucagagggcugccuagagaaaauacaacaaucuggacuagugggagcagcauuucuuuuuguggcguuaauagugauacugcaaacuggucuuggccagacggugcugaguugccguucaccauugacaaguag

SEQ ID NO: 56614 - RNA, 1413 nt, Artificial Sequence
  derived and/or modified CDS sequence (wt) from neuraminidase__InfluenzaA__AHL90184
augaacccaaaucaaaagauaauaaccauuggaucaaucaguauagcaaucggaauaauuagucuaauguugcaaauaggaaauauuauuucaauaugggcuagucacucaauccaaacuggaagucaaaacaacacuggaauaugcaaccaaagaaucaucacauaugaaaacagcaccugggugaaucacacauauguuaauauuaacaacacuaauguuguugcuggagaggacaaaacuucagugacauuagcuggcaauucaucucuuuguucuaucaguggaugggcuauauacacaaaagacaacagcauaagaauuggcuccaaaggagauguuuuugucauaagagaaccuuucauaucauguucucacuuggaaugcagaaccuuuuuucugacccaaggcgcucuauuaaaugacaaacauucaaaugggaccguaaaggacagaaguccuuauagggccuuaaugagcuguccucuaggugaagcuccguccccauacaauucaaaguucgaaucaguugcauggucagcaagcgcaugccaugauggcaugggcugguuaacaaucggaauuucugguccagacaauggagcuguggcuguacuaaaauacaacggaauaauaacuggaaccauaaaaaguuggaaaaagcaaauauuaagaacacaagagucugaaugugucuguaugaacgggucauguuucaccauaaugaccgauggcccgaguaauaaggccgccucguacaaaauuuucaagaucgaaaaggggaagguuacuaaaucaauagaguugaaugcacccaauuuucauuaugaggaauguuccuguuacccagacacuggcauagugauguguguaugcagggacaacuggcaugguucaaaucgaccuugggugucuuuuaaucaaaacuuggauuaucaaauaggauacaucugcaguggaguguucggugacaauccgcgucccgaagauggagagggcagcugcaauccagugacuguugauggagcaaacggaguaaaaggguuuucauacaaauaugauaaugguguuuggauaggaaggaccaaaaguaacagacuuagaaagggguuugagaugauuugggauccuaauggauggacaaauaccgacagugauuucucagugaaacaggauguuguagcaauaacugauuggucaggauacagcggaaguuucguccaacauccugaguuaacaggauuggacuguauaagaccuugcuucuggguugaguuagucagagggcugccuagagaaaauacaacaaucuggacuagugggagcagcauuucuuuuuguggcguuaauagugauacugcaaacuggucuuggccagacggugcugaguugccguucaccauugacaaguag

SEQ ID NO: 56615 - RNA, 1413 nt, Artificial Sequence
  derived and/or modified CDS sequence (wt) from neuraminidase__InfluenzaA__AHL90196
augaacccaaaucaaaagauaauaaccauuggaucaaucaguauagcaaucggaauaauuagucuaauguugcaaauaggaaauauuauuucaauaugggcuagucacucaauccaaacuggaagucaaaacaacacuggaauaugcaaccaaagaaucaucacauaugaaaacagcaccugggugaaucacacauauguuaauauuaacaacacuaauguuguugcuggagaggacaaaacgucagugacauuggccggcaauucaucucuuuguucuaucaguggaugggcuauauacacaaaagacaacagcauaagaauuggcuccaaaggagauguuuuugucauaagagaaccuuucauaucauguucucacuuggaaugcagaaccuuuuuucugacccaaggcgcucuauuaaaugacaaacauucaaaugggaccguaaaggacagaaguccuuauagggccuuaaugagcuguccucuaggugaagcuccguccccauacaauucaaaguucgaaucaguugcauggucagcaagcgcaugccaugauggcaugggcugguuaacaaucggaauuucugguccagacaauggagcuguggcuguacuaaaauacaacggaauaauaacuggaaccauaaaaaguuggaaaaagcaaauauuaagaacacaagagucugaaugugucuguaugaacgggucauguuucaccauaaugaccgauggcccgaguaauaaaaccgccucguacaaaauuuucaagaucgaaaaggggaagguuacuaaaucaauagaguugaaugcacccaauuuuuauuaugaggaaugcuccuguuacccagacacuggcauagugauguguguaugcagggacaacuggcaugguucaaaucgaccuugggugucuuuuaaucaaaauuuggauuaucaaauaggauacaucugcaguggaguguuuggugacaauccgcgucccgaagauggagagggcagcugcaauccagugacuguugauggagcaaacggaguaaaaggguuuucauacaaauaugguaaugguguuuggauaggaaggaccaaaaguaacagacuuagaaagggguuugagaugauuugggauccuaauggauggacaaauaccgacagugauuucucagugaaacaggauguuguagcaauaacugauuggucaggguacagcggaaguuucguccaacauccugaguugacaggauuggacuguauaagaccuugcuucuggguugaguuagucagagggcugccuagagaaaauacaacaaucuggacuagugggagcagcauuucuuuuuguggcguuaauagugauacugcaaacuggucuuggccagacggugcugaguugccguucaccauugacaaguag

SEQ ID NO: 56616 - RNA, 1413 nt, Artificial Sequence
  derived and/or modified CDS sequence (wt) from neuraminidase__InfluenzaA__AHL90220
augaacccaaaucaaaagauaauaaccauuggaucaaucaguauagcaaucggaauaauuagucuaauguugcaaauaggaaauauuauuucaauaugggcuagucauucaauccaaacuggaagucaaaacaacacuggaauaugcaaccaaagaaucaucacauaugaaaacagcaccugggugaaucacacauauguuaauauuaacaacacuaauguuguugcuggagaggacaaaacuucagugacauuggcuggcaauucaucucuuuguucuaucaguggaugggcuauauacacaaaagacaacagcauaagaauuggcuccaaaggagauguuuuugucauaagagaaccuuucauaucauguucucacuuggaaugcagaaccuuuuuucugacccaaggcgcucuauuaaaugacaaacauucaaaugggaccguaaaggacagaaguccuuauagggccuuaaugagcuguccucuaggugaagcuccguccccauacaauucaaaguucgaaucaguugcauggucagcaagcgcaugccaugauggcaugggcugguuaacaaucggaauuucugguccagacaauggagcuguggcuguacuaaaauacaacggaauaauaacuggaaccauaaaaaguuggaaaaagcaaauauuaagaacacaagagucugaaugugucuguaugaacgggucauguuucaccauaaugaccgauggcccgaguaauaaggccgccucguacaaaauuuucaagaucgaaaaggggaagguuacuaaaucaauagaguugaaugcacccaauuuucauuaugaggaauguuccuguuacccagacacuggcauagugauguguguaugcagggacaacuggcaugguucaaaucgaccuugggugucuuuuaaucaaaacuuggauuaucaaauaggauacaucugcaguggaguguucggugacaacccgcgucccgaagauggagagggcagcugcaauccagugacuguugauggagcaaacggaguaaaaggguuuucauacaaauaugauaaugguguuuggauaggaaggaccaaaaguaacagacuuagaaagggguuugagaugauuugggauccuaauggauggacaaauaccgacagugauuucucagugaaacaggauguuguagcaauaacugauuggucaggguacagcggaaguuucguccaacauccugaguuaacaggauuggacuguauaagaccuugcuucuggguugaguuagucagagggcugccuagagaaaauacaacaaucuggacuagugggagcagcauuucuuuuuguggcguuaauagugauacugcaaacuggucuuggccagacggugcugaguugccguucaccauugacaaguag

SEQ ID NO: 56617 - RNA, 1413 nt, Artificial Sequence
  derived and/or modified CDS sequence (wt) from neuraminidase__InfluenzaA__AHL90232
augaacccaaaucaaaagauaauaaccauuggaucaaucaguauagcaaucggaauaauuagucuaauguugcaaauaggaaauauuauuucaauaugggcuagucauucaauccaaacuggaagucaaaacaacacuggaauaugcaaccaaagaaucaucacauaugaaaacagcaccugggugaaucacacauauguuaauauuaacaacacuaauguuguugcuggagaggacaaaacuucagugacauuggcuggcaauucaucucuuuguucuaucaguggaugggcuauauacacaaaagacaacagcauaagaauuggcuccaaaggagauguuuuugucauaagagaaccuuucauaucauguucucacuuggaaugcagaaccuuuuuucugacccaaggcgcucuauuaaaugacaaacauucaaaugggaccguaaaggacagaaguccuuauagggccuuaaugagcuguccucuaggugaagcuccguccccauacaauucaaaguucgaaucaguugcauggucagcaagcgcaugccaugauggcaugggcugguuaacaaucggaauuucugguccagacaauggagcuguggcuguacuaaaauacaacggaauaauaacuggaaccauaaaaaguuggaaaaagcaaauauuaagaacacaagagucugaaugugucuguaugaacgggucauguuucaccauaaugaccgauggcccgaguaauaaggccgccucguacaaaauuuucaagaucgaaaaggggaagguuacuaaaucaauagaguugaaugcacccaauuuucauuaugaggaauguuccuguuacccagacacuggcauagugauguguguaugcagggacaacuggcaugguucaaaucgaccuugggugucuuuuaaucaaaacuuggauuaucaaauaggauacaucugcaguggaguguucggugacaacccgcgucccgaagauggagagggcagcugcaauccagugacuguuaauggagcaaacggaguaaaaggguuuucauacaaauaugauaaugguguuuggauaggaaggaccaaaaguaacagacuuagaaagggguuugagaugauuugggauccuaauggauggacaaauaccgacagugauuucucagugaaacaggauguuguagcaauaacugauuggucaggguacagcggaaguuucguccaacauccugaguuaacaggauuggacuguauaagaccuugcuucuggguugaguuagucagagggcugccuagagaaaauacaacaaucuggacuagugggagcagcauuucuuuuuguggcguuaauagugauacugcaaacuggucuuggccagacggugcugaguugccguucaccauugacaaguag

SEQ ID NO: 56618 - RNA, 1413 nt, Artificial Sequence
  derived and/or modified CDS sequence (wt) from neuraminidase__InfluenzaA__AHL90244
augaacccaaaucaaaagauaauaaccauuggaucaaucaguauagcaaucggaauaauuagucuaauguugcaaauaggaaauauuauuucaauaugggcuagucacucaauccaaacuggaagucaaaacaacacuggaauaugcaaccaaagaaucaucacauaugaaaacagcaccugggugaaucacacauauguuaauauuaacaacacuaauguuguugcuggagaggacaaaacuucagugacauuggccggcaauucaucucuuuguucuaucaguggaugggcuauauacacaaaagacaacagcauaagaauuggcuccaaaggagauguuuuugucauaagagaaccuuucauaucauguucucacuuggaaugcagaaccuuuuuucugacccaaggcgcucuauuaaaugacaaacauucaaaugggaccguaaaggacagaaguccuuauagggccuuaaugagcuguccucuaggugaagcuccguccccauacaauucaaaguucgaaucaguugcauggucagcaagcgcaugccaugauggcaugggcugguuaacaaucggaauuucugguccagacaauggagcuguggcuguacuaaaauacaacggaauaauaacuggaaccauaaaaaguuggaaaaagcaaauauuaagaacacaagagucugaaugugucuguaugaacgggucauguuucaccauaaugaccgauggcccgaguaauaaggccgccucguacaaaauuuucaagaucgaaaaggggaagguuacuaaaucaauagaguuaaaugcacccaauuuucauuaugaggaauguuccuguuacccagacacuggcauagugauguguguaugcagggacaacuggcaugguucaaaucgaccuugggugucuuuuaaucaaaacuuggauuaucaaauaggauacaucugcaguggaguguucggugacaauccgcgucccgaagauggagagggcagcugcaauccaaugacuguugauggagcaaacggaguaaaaggguuuucauacaaauaugauaaugguguuuggauaggaaggaccaaaaguaacagacuuagaaagggguuugagaugauuugggauccuaauggauggacaaauaccgacagugauuucucagugaaacaggauguuguagcaauaacugauuggucaggguacagcggaaguuucguccaacauccugaguuaacaggauuggacuguauaagaccuugcuucuggguugaguuagucagagggcuaccuagagaaaauacaacaaucuggacuagugggagcagcauuucuuuuuguggcguuaauagugauacugcaagcuggucuuggccagacggugcugaguugccguucaccauugacaaguag

SEQ ID NO: 56619 - RNA, 1413 nt, Artificial Sequence
  derived and/or modified CDS sequence (wt) from neuraminidase__InfluenzaA__AHL90256
augaacccaaaucaaaagauaauaaccauuggaucaaucaguauagcaaucggaauaauuagucuaauguugcaaauaggaaauauuauuucaauaugggcuagucacucaauccaaacuggaagucaaaacaacacuggaauaugcaaccaaagaaucaucacauaugaaaacagcaccugggugaaucacacauauguuaauauuaacaacacuaauguuguugcuggagaggacaaaacgucagugacauuggccggcaauucaucucuuuguucuaucaguggaugggcuauauacacaaaagacaacagcauaagaauuggcuccaaaggagauguuuuugucauaagagaaccuuucauaucauguucucacuuggaaugcagaaccuuuuuucugacccaaggcgcucuauuaaaugacaaacauucaaaugggaccguaaaggacagaaguccuuauagggccuuaaugagcuguccucuaggugaagcuccguccccauacaauucaaaguucgaaucaguugcauggucagcaagcgcaugccaugauggcaugggcugguuaacaaucggaauuucugguccagacaauggagcuguggcuguacuaaaauacaacggaauaauaacuggaaccauaaaaaguuggaaaaagcaaauauuaagaacacaagagucugaaugugucuguaugaacgggucauguuucaccauaaugaccgauggcccgaguaauaaggccgccucguacaaaauuuucaagaucgaaaaggggaagguuacuaaaucaauagaguugaaugcacccaauuuuuauuaugaggaaugcuccuguuacccagacacuggcauagugauguguguaugcagggacaacuggcaugguucaaaucgaccuugggugucuuuuaaucaaaacuuggauuaucaaauaggauacaucugcaguggaguguuuggugacaauccgcgucccgaagauggagagggcagcugcaauccagugacuguugauggagcaaacggaguaaaaggguuuucauacaaauaugguaaugguguuuggauaggaaggaccaaaaguaacagacuuagaaagggguuugagaugauuugggauccuaauggauggacaaauaccgacagugauuucucagugaaacaggauguuguagcaauaacugauuggucaggguacagcggaaguuucguccaacauccugaguuaacaggauuggacuguauaagaccuugcuucuggguugaguuagucagagggcugccuagagaaaauacaacaaucuggacuagugggagcagcauuucuuuuuguggcguuaauagugauacugcaaacuggucuuggccagacggugcugaguugccguucaccauugacaaguag

SEQ ID NO: 56620 - RNA, 1413 nt, Artificial Sequence
  derived and/or modified CDS sequence (wt) from neuraminidase__InfluenzaA__AHL90268
augaacccaaaucaaaagauaauaaccauuggaucaaucaguauagcaaucggaauaauuagucuaauguugcaaauaggaaauauuauuucaauaugggcuagucacucaauccaaacuggaagucaaaacaacacuggaauaugcaaccaaagaaucaucacauaugaaaacagcaccugggugaaucacacauauguuaauauuaacaacacuaauguuguugcuggagaggacaaaacuucagugacauuggccggcaauucaucucuuuguucuaucaguggaugggcuauauacacaaaagacaacagcauaagaauuggcuccaaaggagauguuuuugucauaagagaaccuuucauaucauguucucauuuggaaugcagaaccuuuuuucugacccaaggugcucuauuaaaugacaaacauucaaaugggaccguaaaggacagaaguccuuauagggccuuaaugagcuguccucuaggugaagcuccguccccauacaauucaaaguucgaaucaguugcauggucagcaagcgcaugccaugauggcaugggcugguuaacaaucggaauuucugguccagacaauggagcuguggcuguacuaaaauacaacggaauaauaacuggaaccauaaaaaguuggaaaaagcaaauauuaagaacacaagagucugaaugugucuguaugaacgggucauguuucaccauaaugaccgauggcccgaguaauaaggccgccucguacaaaauuuucaagaucgaaaaggggaagguuacuaaaucaauagaguugaaugcacccaauuuucauuaugaggaauguuccuguuacccagacacuagcauagugauguguguaugcagggacaacuggcaugguucaaaucgaccuugggugucuuuuaaucaaaacuuggauuaucaaauaggauacaucugcaguggaguguuuggugacaauccgcgucccgaagauggagagggcagcugcaauccagugacuguugauggagcaaacgggguaaaaggguuuucauacaaauaugauaaugguguuuggauaggaaggaccaaaaguaacagacuuagaaagggguuugagaugauuugggauccuaauggauggacaaauaccgaccgugauuucucagugaaacaggauguuguagcaauaacugauuggucaggguacagcggaaguuucguccaacauccugaguuaacaggauuggacuguauaagaccuugcuucuggguugaguuagucagagggcugccuagggaaaauacaacaaucuggacuagugggagcagcauuucuuuuuguggcguuaauagugauacugcaaacuggucuuggccagacggugcugaguugccguucaccauugacaaguag

SEQ ID NO: 56621 - RNA, 1413 nt, Artificial Sequence
  derived and/or modified CDS sequence (wt) from neuraminidase__InfluenzaA__AHL90280
augaacccaaaucaaaagauaauaaccauuggaucaaucaguauagcaaucggaauaauuagucuaauguugcaaauaggaaauauuauuucaauaugggcuagucacucaauccaaacuggaagucaaaacaacacuggaauaugcaaccaaagaaucaucacauaugaaaacagcaccugggugaaucacacauauguuaauauuaacaacacuaauguuguugcuggagaggacaaaacgucagugacauuggccggaaauucaucucuuuguucuaucaguggaugggcuauauacacaaaagacaacagcauaagaauuggcuccaaaggagauguuuuugucauaagagaaccuuucauaucauguucucacuuggaaugcagaaccuuuuuucugacccaaggcgcucuauuaaaugacaaacauucaaaugggaccguaaaggacagaaguccuuauagggccuuaaugagcuguccucuaggugaagcuccguccccauacaauucaaaguucgaaucaguugcauggucagcaagcgcaugccaugauggcaugggcugguuaacaaucggaauuucugguccagacaauggagcuguggcuguacuaaaauacaacggaauaauaacuggaaccauaaaaaguuggaaaaagcaaauauuaagaacacaagagucugaaugugucuguaugaacgggucauguuucaccauaaugaccgauggcccgaguaauaaagccgccucguacaaaauuuucaagaucgaaaaggggaagguuacuaaaucaauagaguugaaugcacccaauuuuuauuaugaggaaugcuccuguuacccagacacuggcauagugauguguguaugcagggacaacuggcaugguucaaaucgaccuugggugucuuuuaaucaaaauuuggauuaucaaauaggauacaucugcaguggaguguuuggugacaauccgcgucccgaagauggagagggcagcugcaauccagugacuguugauggagcaaacggaguaaaaggguuuucauacaaauaugguaaugguguuuggauaggaaggaccaaaaguaacagacuuagaaagggguuugagaugauuugggauccuaauggauggacaaauaccgacagugauuucucagugaaacaggauguuguagcaauaacugauuggucaggguacagcggaaguuucguccaacauccugaguugacaggauuggacuguauaagaccuugcuucuggguugaguuagucagagggcugccuagagaaaauacaacaaucuggacuagugggagcagcauuucuuuuuguggcguuaauagugauacugcaaacuggucuuggccagacggugcugaguugccguucaccauugacaaguag

SEQ ID NO: 56622 - RNA, 1413 nt, Artificial Sequence
  derived and/or modified CDS sequence (wt) from neuraminidase__InfluenzaA__AHL90304
augaacccaaaucaaaagauaauaaccauuggaucaaucaguauagcaaucggaauaauuagucuaauguugcaaauaggaaauauuauuucaauaugggcuagucacucaauccaaacuggaagucaaaacaacacugaaauaugcaaccaaagaaucaucacauaugaaaacagcaccugggugaaucacacauauguuaauauuaacaacacuaauguuguugcuggagaggacaaaacuucagugacauuggccggcaauucaucucuuuguucuaucaguggaugggcuauauacacaaaagacaacagcauaagaauuggcuccaaaggagauguuuuugucauaagagaaccuuucauaucauguucucacuuggaaugcagaaccuuuuuucugacccaaggcgcucuauuaaaugacaaacauucaaaugggaccguaaaggacagaaguccuuauagggccuuaaugagcuguccucuaggugaagcuccguccccauacaauucaaaguucgaaucaguugcauggucagcaagcgcaugccaugauggcaugggcugguuaacaaucggaauuucugguccagacaauggagcuguggcuguacuaaaauacaacggaauaauaacuggaaccauaaaaaguuggaaaaagcaaauauuaagaacacaagagucugaaugugucuguaugaacgggucauguuucaccauaaugaccgauggcccgaguaauaaggccgccucguacaaaauuuucaagaucgaaaaggggaagguuacuaaaucaauagaguugaaugcacccaauuuucauuaugaggaauguuccuguuacccagacacuggcauagugauguguguaugcagggacaacuggcaugguucaaaucgaccuugggugucuuuuaaucaaaacuuggauuaucaaauaggauacaucugcaguggaguguucggugacaauccgcgucccgaagauggagagggcagcugcaauccagugacuguugauggagcaaacggaguaaaaggguuuucauacaaauaugauaaugguguuuggauaggaaggaccaaaaguaacagacuuagaaagggguuugagaugauuugggauccuaauggauggacaaauaccgacagugauuucucagugaaacaggauguuguagcaauaacugauuggucaggguacagcggaaguuucguccaacauccugaguuaacaggauuggacuguauaagaccuugcuucuggguugaguuagucagagggcugccuagagaaaauacaacaaucuggacuagugggagcagcauuucuuuuuguggcguuaauagugauaccgcaaacuggucuuggccagacggugcugaguugccguucaccauugacaaguag

SEQ ID NO: 56623 - RNA, 1413 nt, Artificial Sequence
  derived and/or modified CDS sequence (wt) from neuraminidase__InfluenzaA__AHL90316
augaacccaaaucaaaagauaauaaccauuggaucaaucaguauagcaaucggaauaauuagucuaauguugcaaauaggaaauauuauuucaauaugggcuagucacucaauccaaacuggaagucaaaacaacacuggaauaugcaaccaaagaaucaucacauaugaaaacagcaccugggugaaucacacauauguuaauauuaacaacacuaauguuguugcuggagaggacaaaacuucagugacauuggccggcaauucaucucuuuguucuaucaguggaugggcuauauacacaaaagacaacagcauaagaauuggcuccaaaggagauguuuuugucauaagagaaccuuucauaucauguucucacuuggaaugcagaaccuuuuuucugacccaaggcgcucuauuaaaugacaaacauucaaaugggaccguaaaggacagaaguccuuauagggccuuaaugagcuguccucuaggugaagcuccguccccauacaauucaaaguucgaaucaguugcauggucagcaagcgcaugccaugauggcaugggcugguuaacaaucggaauuucugguccagacaauggagcuguggcuguacuaaaauacaacggaauaauaacuggaaccauaaaaaguuggaaaaagcaaauauuaagaacacaagagucugaaugugucuguaugaacgggucauguuucaccauaaugaccgauggcccgaguaauaaggccgccucguacaaaauuuucaagaucgaaaaggggaagguuacuaaaucaauagaguugaaugcacccaauuuucauuaugaggaauguuccuguuacccagacacuggcauagugauguguguaugcagggacaacuggcaugguucaaaucgaccuugggugucuuuuaaucaaaacuuggauuaucaaauaggauacaucugcaguggaguguuuggugacaauccgcgucccgaagauggagagggcagcugcaauccagugacuguugauggagcaaauggaguaaaaggguuuucauacaaauaugauaaugguguuuggauaggaaggaccaaaaguaacagacuuagaaagggguuugagaugauuugggauccuaauggauggacaaauaccgacagugauuucucagugaaacaggauguuguagcaauaacugauuggucaggguacaguggaaguuucguccaacauccugaguuaacaggacuggacuguauaagaccuugcuucuggguugaguuagucagagggcugccuagagaaaauacaacaaucuggacuagugggagcagcauuucuuuuuguggcguuaauagugauacugcaaacuggucuuggccagacggugcugaguugccguucaccauugacaaguag

SEQ ID NO: 56624 - RNA, 1413 nt, Artificial Sequence
  derived and/or modified CDS sequence (wt) from neuraminidase__InfluenzaA__AHL90328
augaacccaaauaaaaagauaauaaccauuggaucaaucaguauagcaaucggaauaauuagucuaauguugcaaauaggaaauauuauuucaauaugggcuagucacucaauccaaacuggaagucaaaacaacacuggaauaugcaaccaaagaaucaucacauaugaaaacagcaccugggugaaucacacauauguuaauauuaacaacacuaauguuguugcuggagaggacaaaacuucagugacauuggccggcaauucaucucuuuguucuaucaguggaugggcuauauacacaaaagacaacagcauaagaauuggcuccaaaggagauguuuuugucauaagagaaccuuucauaucauguucucacuuggaaugcagaaccuuuuuucugacccaaggcgcucuauuaaaugacaaacauucaaaugggaccguaaaggacagaaguccuuauagggccuuaaugagcuguccucuaggugaagcuccguccccauacaauucaaaguucgaaucaguugcauggucagcaagcgcaugccaugauggcaugggcugguuaacaaucggaauuucugguccagacaauggagcuguggcuguacuaaaauacaacggaauaauaacuggaaccauaaaaaguuggaaaaagcaaauauuaagaacacaagagucugaaugugucuguaugaacgggucauguuucaccauaaugaccgauggcccgaguaauaaggccgccucguacaaaauuuucaagaucgaaaaggggaagguuacuaaaucaauagaguugaaugcacccaauuuucauuaugaggaauguuccuguuacccagacacuggcauagugauguguguaugcagggacaacuggcaugguucaaaucgaccuugggugucuuuuaaucaaaacuuggauuaucaaauaggauacaucugcaguggaguguuuggugacaauccgcgucccgaagauggagagggcagcugcaauccagugacuguugauggagcaaauggaguaaaaggguuuucauacaaauaugauaaugguguuuggauaggaaggaccaaaaguaacagacuuagaaagggguuugagaugauuugggauccuaauggauggacaaauaccgacagugauuucucagugaaacaggauguuguagcaguaacugauuggucaggguacaguggaaguuucguccaacauccugaguuaacaggacuggacuguauaagaccuugcuucuggguugaguuagucagagggcugccuagagaaaauacaacaaucuggacuagugggagcagcauuucuuuuuguggcguuaauagugauacugcaaacuggucuuggccagacggugcugaguugccguucaccauugacaaguag

SEQ ID NO: 56625 - RNA, 1413 nt, Artificial Sequence; identical to SEQ ID NO: 56623
  derived and/or modified CDS sequence (wt) from neuraminidase__InfluenzaA__AHL90340

SEQ ID NO: 56626 - RNA, 1413 nt, Artificial Sequence
  derived and/or modified CDS sequence (wt) from neuraminidase__InfluenzaA__AHL90352
augaacccaaaucaaaagauaaugaccauuggaucaaucaguauagcaaucggaauaauuagucuaauguugcaaauaggaaauauuauuucaauaugggcuagucacucaauccaaacuggaagucaaaacaacacuggaauaugcaaccaaagaaucaucacauaugaaaacagcaccugggugaaccacacauaugucaauauuaacaacacuaauguuguugcuggagaggacaaaacuucagugacauuggccggcaauucaucucuuuguucuaucaguggaugggcuauauacacaaaagacaacagcauaagaauuggcuccaaaggagauguuuuugucauaagagaaccuuucauaucauguucucacuuggaaugcagaaccuuuuuucugacccaaggcgcucuauuaaaugacaaacauucaaaugggaccguaaaggacagaaguccuuauagggccuuaaugagcuguccucuaggugaagcuccauccccauacaauucaaaguucgaaucaguugcauggucagcaagcgcaugccaugauggcaugggcugguuaacaaucggaauuucugguccagacaauggagcuguggcuguacuaaaauacaacggaauaauaacuggaaccauaaaaaguuggaaaaagcaaauauuaagaacacaagagucugaaugugucuguaugaacgggucauguuucaccauaaugaccgauggcccgaguaauaaggccgccucguacaaaauuuucaagaucgaaaaggggaagguuacuaaaucaauagaguugaaugcacccaauuuucauuaugaggaauguuccuguuacccagacacuggcauagugauguguguaugcagggacaacuggcaugguucaaaucgaccuugggugucuuuuaaucaaaacuuggauuaucaaauaggauacaucugcaguggaguguuuggugauaauccgcgucccgaagauggagagggcagcugcaguccagugacuguugauggagcaaacggaguaaaaggguuuucauacaaauaugauaaugguguuuggauaggaaggaccaaaaguaacagacuuagaaagggguuugagaugauuugggauccuaauggauggacaaauaccgacagugauuucucagugaaacaggauguuguagcaauaacugauuggucaggguacagcggaaguuucguccaacauccugaguuaacaggauuggacuguauaagaccuugcuucuggguugaguuagucagagggaugccuagagaaaauacaacaaucuggacuagugggagcagcauuucuuuuuguggcguuaauagugauacugcaaacuggucuuggccagacggugcugaguugccguucaccauugacaaguag

SEQ ID NO: 56627 - RNA, 1413 nt, Artificial Sequence
  derived and/or modified CDS sequence (wt) from neuraminidase__InfluenzaA__AHL90364
augaacccaaaucaaaagauaauaaccauuggaucaaucaguauagcaaucggaauaauuagucuaauguugcaaauaggaaauauuauuucaauaugggcuagucacucaauccaaacuggaagucaaaacaacacuggaauaugcaaccaaagaaucaucacauaugaaaacagcaccugggugaaucacacauauguuaauauuaacaacacuaauguuguugcuggagaggacaaaacuucagugacauuggccggcaauucaucucuuuguucuaucaguggaugggcuauauacacaaaagacaacagcauaagaauuggcuccaaaggagauguuuuugucauaagagaaccuuucauaucauguucucacuuggaaugcagaaccuuuuuucugacccaaggcgcucuauuaaaugacaaacauucaaaugggaccguaaaggacagaaguccuuauagggccuuaaugagcuguccucuaggugaagcuccguccccauacaauucaaaguucgaaucaguugcauggucagcaagcgcaugccaugauggcaugggcugguuaacaaucggaauuucugguccagacaauggagcuguggcuguacuaaaauacaacggaauaauaacuggaaccauaaaaaguuggaaaaagcaaauauuaagaacacaagagucugaaugugucuguaugaacgggucauguuucaccauaaugaccgauggcccgaguaauaagaccgccucguacaaaauuuucaagaucgaaaaggggaagguuacuaaaucaauagaguugaaugcacccaauuuucauuaugaggaauguuccuguuacccagacacuggcauagugauguguguaugcagggacaacuggcaugguucaaaucgaccuugggugucuuuuaaucaaaacuuggauuaucaaauaggauacaucugcaguggaguguuuggugacaauccgcgucccgaagauggagagggcagcugcaauccagugacuguugauggagcaaauggaguaaaaggguuuucauacaaauaugauaaugguguuuggauaggaaggaccaaaaguaacagacuuagaaagggguuugagaugauuugggauccuaauggauggacaaauaccgacagugauuucucagugaaacaggauguuguagcaauaacugauuggucaggguacaguggaaguuucguccaacauccugaguuaacaggacuggacuguauaagaccuugcuucuggguugaguuagucagagggcugccuagagaaaauacaacaaucuggacuagugggagcagcauuucuuuuuguggcguuaauagugauacugcaaacuggucuuggccagacggugcugaguugccguucaccauugacaaguag

SEQ ID NO: 56628 - RNA, 1413 nt, Artificial Sequence
  derived and/or modified CDS sequence (wt) from neuraminidase__InfluenzaA__AHL90376
augaacccaaaucaaaagauaauaaccauuggaucaaucaguauagcaaucggaauaauuagucuaauguugcaaauaggaaauauuauuucaauaugggcuagucacucaauccaaacuggaagucaaaacaacacuggaauaugcaaccaaagaaucaucacauaugaaaacagcaccugggugaaucacacauauguuaauauuaacaacacuaauguuguugcuggagaggacaaaacgucagugacauuggccggcaauucaucucuuuguucuaucaguggaugggcuauauacacaaaagacaacagcauaagaauuggcuccaaaggagauguuuuugucauaagagaaccuuucauaucauguucucacuuggaaugcagaaccuuuuuucugacccaaggcgcucuauuaaaugacaaacauucaaaugggaccguaaaggacagaaguccuuauagggccuuaaugagcuguccucuaggugaagcuccguccccauacaauucaaaguucgaaucaguugcauggucagcaagcgcaugccaugauggcaugggcugguuaacaaucggaauuucugguccagacaauggagcuguggcuguacuaaaauacaacggaauaauaacuggaaccauaaaaaguuggaaaaagcaaauauuaagaacacaagagucugaaugugucuguaugaacgggucauguuucaccauaaugaccgauggcccgaguaauaaagccgccucguacaaaauuuucaagaucgaaaaggggaagguuacuaaaucaauagaguugaaugcacccaauuuuuauuaugaggaaugcuccuguuacccagacacuggcauagugauguguguaugcagggacaacuggcaugguucaaaucgaccuugggugucuuuuaaucaaaauuuggauuaucaaauaggauacaucugcaguggaguguuuggugacaauccgcgucccgaagauggagagggcaguugcaauccagugacuguugauggagcaaacggaguaaaaggguuuucauacaaauaugguaaugguguuuggauaggaaggaccaaaaguaacagacuuagaaagggguuugagaugauuugggauccuaauggauggacaaauaccgacagugauuucucagugaaacaggauguuguagcaauaacugauuggucaggguacagcggaaguuucguccaacauccugaguugacaggauuggacuguauaagaccuugcuucuggguugaguuagucagagggcugccuagagaaaauacaacaaucuggacuagugggagcagcauuucuuuuuguggcguuaauagugauacugcaaacuggucuuggccagacggugcugaguugccguucaccauugacaaguag

SEQ ID NO: 56629 - RNA, 1410 nt, Artificial Sequence
  derived and/or modified CDS sequence (wt) from neuraminidase__InfluenzaA__AHL90388
augaauccaaaucaaaagauaauaacgauuggcucuguuucucucaucauuuccacaauaugcuucuucaugcaaauugccaucuugauaacuacuguaacauugcauuucaagcaauaugaauucaacuccuccccaaacaaccaagugaugcugugugaaccaacaauaauagaaagaaacauaacagagauaguguaucugaccaacaccaucauagagaaggaaauaugccccaaacuagcagaauacagaaauuggucaaagccgcaaugugacauuacaggauuugcaccuuuuucuaaggacaauucgauuaggcuuuccgcugguggggacaucugggugacaagagaaccuuaugugucaugcgauccugacaaguguuaucaauuugcccuuggacagggaacaacacuaaacaacgugcauucaaauaacacaguacgugauaggaccccuuaucggacccuauugaugaaugaguuagguguuccuuuucaucuggggaccaagcaagucugcauagcaugguccagcucaaguugucacgauggaaaagcauggcugcauguuuguauaacgggggaugauaaaaaugcaacugcuagcuucauuuacaaugggaggcuuguagauaguauuguuucaugguccaaagaaauccucaggacccaggagucagaaugcguuuguaucaauggaacuuguacaguaguaaugacugaugggagugcuucaggaaaagcugauacuaaaauacuauucauugaggaggggaaaaucguucauacuagcacauugucaggaagugcucagcaugucgaggagugcuccugcuauccucgauauccuggugucagaugugucugcagagacaacuggaaaggcuccaauaggcccaucguagauauaaacauaaaggaucauagcauuguuuccaguuauguguguucaggacuuguuggagacacacccagaaaaaacgacagcuccagcaguagccauuguuuggauccuaacaaugaagaagguggucauggagugaaaggcugggccuuugaugauggaaaugacguguggaugggaagaacgaucagcgagaagucacgcuuaggguaugaaaccuucaaagucauugaaggcugguccaacccuaaguccaaauugcagauaaauaggcaagucauaguugacagagguaauagguccgguuauucugguauuuucucuguugaaggcaaaagcugcaucaaucggugcuuuuauguggaguugauaaggggaagaaaagaggaaacugaagucuuguggaccucaaacaguauuguuguguuuuguggcaccucagguacauauggaacaggcucauggccugauggggcggacaucaaucucaugccuauauaa

SEQ ID NO: 56630 - RNA, 1410 nt, Artificial Sequence
  derived and/or modified CDS sequence (wt) from neuraminidase__InfluenzaA__AHL90400
augaauccaaaucaaaagauaauaacgauuggcucuguuucucucaccauuuccacaauaugcuucuucaugcaaauugccaucuugauaacuacuguaacauugcauuucaagcaauaugaauucaacucccccccaaacaaccaagugaugcugugugaaccaacaauaauagaaagaaacauaacagagauaguguaucugaccaacaccaccauagagaaggaaauaugccccaaacuagcagaauacagaaauuggucaaagccgcagugugacauuacaggauuugcaccuuuuucuaaggacaauucgauuaggcuuuccgcugguggggacaucugggugacaagagaaccuuaugugucaugcgauccugacaaguguuaucaauuugcccuuggacagggaacaacacuaaacaacgugcauucaaaugacacaguacgugauaggaccccuuaucggacccuauugaugaaugaguuagguguuccuuuucaucuggggaccaagcaagugugcauagcaugguccagcucaaguugucacgauggaaaagcauggcugcauguuuguauaacgggggaugauaaaaaugcaacugcuagcuucauuuacaaugggaggcuuguagauaguguuguuucaugguccaaagaaauccucaggacccaggagucagaaugcguuuguaucaauggaacuuguacaguaguaaugacugaugggagugcuucaggaaaagcugauacuaaaauacuauucauugaggaggggaaaaucguucauacuagcacauugucaggaagugcucagcaugucgaggagugcuccugcuauccucgauauccuggugucagaugugucugcagagacaacuggaaaggcuccaauaggcccaucguagauauaaacauaaaggaucauagcauuguuuccaguuauguguguucaggacuuguuggagacacacccagaaaaaacgacagcuccagcaguagccauuguuuggauccuaacaaugaagaagguggucauggagugaaaggcugggccuuugaugauggaaaugacguguggaugggaagaacgaucagcgagaagucacgcuuaggguaugaaaccuucaaagucauugaaggcugguccaacccuaaguccaaauugcagauaaauaggcaagucauaguugacagagguaauagguccgguuauucugguauuuucucuguugaaggcaaaagcugcaucaaucggugcuuuuauguggaguugauaaggggaagaaaagaggaaacugaagucuuguggaccucaaacaguauuguuguguuuuguggcaccucagguacauauggaacaggcucauggccugauggggcggacaucaaucucaugccuauauaa

SEQ ID NO: 56631 - RNA, 1410 nt, Artificial Sequence; identical to SEQ ID NO: 49271
  derived and/or modified CDS sequence (wt) from neuraminidase__InfluenzaA__AHL90413

SEQ ID NO: 56632 - RNA, 1410 nt, Artificial Sequence
  derived and/or modified CDS sequence (wt) from neuraminidase__InfluenzaA__AHL90425
augaauccaaaucaaaagauaauaacgauuggcucuguuucucucaccauuuccacaauaugcuucuucaugcaaacugccaucuugauaacuacuguaacauugcauuucaagcaguaugaauucaacucccccccaaacaaccaagugaugcugugugaaccaacaauaauagaaagaaacauaacagagauaguguaucugaccaacaccaccauagaaaaggaaauaugccccaaacuagcagaauacagaaauuggucaaagccgcaaugugacauuacaggauuugcaccuuuuucuaaggacaauucgauuaggcuuuccgcugguggggacaucugggugacaagagaaccuuaugugucaugcgauccugacaaguguuaucaauuugcccucggacagggaacaacacuaaacaacgugcauucaaaugacacaguacaugauaggaccccuuaucggacccuauugaugaaugaguuagguguuccuuuucaucuggggaccaagcaagugugcauagcaugguccagcucaaguugucacgauggaaaagcauggcugcauguuuguauaacgggggaugauaaaaaugcaacugcuagcuucauuuacaaugggaggcuuguagauaguauuguuucaugguccaaagaaauccucaggacccaggagucagaaugcguuuguaucaauggaacuuguacaguaguaaugacugaugggagugcuucaggaaaagcugauacuaaaauacuauucauugaggaggggaaaaucguucauacuagcacauugucaggaagugcucagcaugucgaggagugcuccugcuauccucgauauccuggugucagaugugucugcagagacaacuggaaaggcuccaauaggcccaucguagauauaaacauaaaggaucauagcauuguuuccaguuauguguguucaggacuuguuggagacacacccagaaaaaacgacagcuccagcaguagccauuguuuggauccuaacaaugaagaagguggucauggagugaaaggcugggccuuugaugauggaaaugacguguggaugggaagaacgaucagcgagaagucacgcuuaggguaugaaaccuucaaagucauugaaggcugguccaacccuaaguccaaauuacagauaaauaggcaagucauaguugacagaggugauagguccgguuauucugguauuuucucuguugaaggcaaaagcugcaucaaucggugcuuuuauguggaguugauaaggggaagaaaagaggaaacugaagucuuguggaccucaaacaguauuguuguguuuuguggcaccucagguacauauggaacaggcucauggccugauggggcggacaucaaucucaugccuauauaa

SEQ ID NO: 56633 - RNA, 1410 nt, Artificial Sequence
  derived and/or modified CDS sequence (wt) from neuraminidase__InfluenzaA__AHL90437
augaauccaaaucaaaagauaauaacgauuggcucuguuucucucaccauuuccacaauaugcuucuucaugcaaauugccaucuugauaacuacuguaacauugcauuucaagcaauaugaauucaacucccccccaaacaaccaagugaugcugugugaaccaacaauaauagaaagaaacauaacagagauaguguaucugaccaacaccaccauagagaaggaaauaugccccaaacuagcagaauacagaaauuggucaaagccgcaaugugacauuacaggauuugcaccuuuuucuaaggacaauucgauuaggcuuuccgcugguggggacaucugggugacaagagaaccuuaugugucaugcgauccugacaaguguuaucaauuugcccuuggacagggaacaacacuaaacaacgugcauucaaauaacacaguacgugauaggaccccuuaucggacccuauugaugaaugaguuagguguuccuuuucaucuggggaccaagcaagugugcauagcaugguccagcucaaguugucacgauggaaaagcauggcugcauguuuguauaacgggggaugauaaaaaugcaacugcuagcuucauuuacaaugggaggcuuguagauaguguuguuucaugguccaaagaaauccucaggacccaggagucagaaugcguuuguaucaauggaacuuguacaguaguaaugacugaugggagugcuucaggaaaagcugauacuaaaauacuauucauugaggaggggaaaaucguucauacuagcacauugucaggaagugcucagcaugucgaggagugcuccugcuauccucgauauccuggugucagaugugucugcagagacaacuggaaaggcuccaauaggcccaucguagauauaaacauaaaggaucauagcauuguuuccaguuauguguguucaggacuuguuggagacacacccagaaaaaacgacagcuccagcaguagccauuguuuggauccuaacaaugaagaagguggucauggagugaaaggcugggccuuugaugauggaaaugacguguggaugggaagaacgaucagcgagaagucacgcuuaggguaugaaaccuucaaagucauugaaggcugguccaacccuaaguccaaauugcagauaaauaggcaagucauaguugacagagguaauagguccgguuauucugguauuuucucuguugaaggcaaaagcugcaucaaucggugcuuuuauguagaguugauaaggggaagaaaagaggaaacugaagucuuguggaccucaaacaguauuguuguguuuuguggcaccucagguacauauggaacaggcucauggccugauggggcggacaucaaucucaugccuauauaa

SEQ ID NO: 56634 - RNA, 1410 nt, Artificial Sequence; identical to SEQ ID NO: 48526
  derived and/or modified CDS sequence (wt) from neuraminidase__InfluenzaA__AHL90449

SEQ ID NO: 56635 - RNA, 1410 nt, Artificial Sequence; identical to SEQ ID NO: 49271
  derived and/or modified CDS sequence (wt) from neuraminidase__InfluenzaA__AHL90461

SEQ ID NO: 56636 - RNA, 1410 nt, Artificial Sequence
  derived and/or modified CDS sequence (wt) from neuraminidase__InfluenzaA__AHL90473
augaauccaaaucaaaagauaauaacgauuggcucuguuucucucaccauuuccacaauaugcuucuucaugcaaauugccaucuugauaacuacuguaacauugcauuucaagcaauaugaauucaacucccccccaaacaaccaagugaugcugugugaaccaacaauaauagaaagaaacauaacagagauaguguaucugaccaacaccaccauagagaaggaaauaugccccaaacuagcagaauacagaaauuggucaaagccgcaaugugacauuacaggauuugcaccuuuuucuaaggacaauucgauuaggcuuuccgcugguggggacaucugggugacaagagaaccuuaugugucaugcgauccugacaaguguuaucaauuugcccuuggacagggaacaacacuaaacaacgugcauucaaaugacacaguacgugauaggaccccuuaucggacccuauugaugaaugaguuagguguuccuuuucaucuggggaccaagcaagugugcauagcaugguccagcucaaguugucacgauggaaaagcauggcugcauguuuguauaacgggggaugauaaaaaugcaacugcuagcuucauuuacaaugggaggcuuguagauaguguuguuucaugguccaaagaaauccucaggacccaggagucagaaugcguuuguaucaauggaacuuguacaguaguaaugacugaugggagugcuucaggaaaagcugauacuaaaauacuauucauugaggaggggaaaaucguucauacuagcacauugucaggaagugcucagcaugucgaggagugcuccugcuauccucgauauccuggugucagaugugucugcagagacaacuggaaaggcuccaauaggcccaucguagauauaaacauaaaggaucauagcauuguuuccaguuauguguguucaggacuuguuggagacacacccagaaaaaacgacagcuccagcaguagccauuguuuggauccuaacaaugaagaagguggucauggagugaaaggcugggccuuugaugauggaaaugacguguggaugggaagaacgaucagcgagaagucacgcuuaggguaugaaaccuucaaagucauugaaggcugguccaacccuaaauccaaauugcagauaaauaggcaagucauaguugacagagguaauagguccgguuauucugguauuuucucuguugaaggcaaaagcugcaucaaucggugcuuuuauguggaguugauaaggggaagaaaagaggaaacugaagucuuguggaccucaaacaguauuguuguguuuuguggcaccucagguacauauggaacaggcucauggccugauggggcggacaucaaucucaugccuauauaa

SEQ ID NO: 56637 - RNA, 1410 nt, Artificial Sequence; identical to SEQ ID NO: 48526
  derived and/or modified CDS sequence (wt) from neuraminidase__InfluenzaA__AHL90485

SEQ ID NO: 56638 - RNA, 1410 nt, Artificial Sequence; identical to SEQ ID NO: 48648
  derived and/or modified CDS sequence (wt) from neuraminidase__InfluenzaA__AHL90497

SEQ ID NO: 56639 - RNA, 1410 nt, Artificial Sequence; identical to SEQ ID NO: 48648
  derived and/or modified CDS sequence (wt) from neuraminidase__InfluenzaA__AHL90509

SEQ ID NO: 56640 - RNA, 1410 nt, Artificial Sequence
  derived and/or modified CDS sequence (wt) from neuraminidase__InfluenzaA__AHL90521
augaauccaaaucaaaagauaauaacgauuggcucuguuucucucaccauuuccacaauaugcuucuucuugcaaauugccaucuugauaacuacuguaacauugcauuucaagcaauaugaauucaauucccccccaaacaaccaagugaugcugugugaaccaacaauaauagaaagaaacauaacagagauaguguaucugaccaacaccaccauagagaaggaaauaugccccaaacuagcagaauacagaaauuggucaaagccgcaaugugacauuacaggauuugcaccuuuuucuaaggacaauucgauuaggcuuuccgcugguggggacaucugggugacaagagaaccuuaugugucaugcgauccugacaaguguuaucaauuugcccuuggacagggaacgacacuaaacaacgugcauucaaauaacacaguacgugauaggaccccuuaucggacccuauugaugaaugaguuagguguuccuuuucaucuggggaccaagcaagugugcauagcaugguccagcucaaguugucacgauggaaaagcauggcugcauguuuguauaacaggggaugauaaaaaugcaacugcuagcuucauuuacaaugggaggcuuguagauaguauuguuucaugguccaaagaaauccucaggacccaggagucagaaugcguuuguaucaauggaacuuguacaguaguaaugacugaugggagugcuucaggaaaagcugauacuaaaauacuauucauugaggaggggaaaaucguucauacuagcacauugucaggaagugcucagcauguugaggagugcuccugcuauccucgauauccuggugucagaugugucugcagagacaacuggaaaggcuccaauaggcccaucguagauauaaacauaaaggaucauagcauuguuuccaguuauguguguucaggacuuguuggagacacacccagaaaaaacgacagcuccagcaguagccauuguuuggauccuaacaaugaagaagguggucauggagugaaaggcugggccuuugaugauggaaaugacguguggaugggaagaacgaucagcgagaagucacgcuuaggguaugaaaccuuuaaagucauugaaggcugguccaacccuaaguccaaauugcagauaaauaggcaagucauaguugacagagguaauagguccgguuauucugguauuuucucuguugaaggcaaaagcugcaucaaucggugcuuuuauguggaguugauaaggggaagaaaagaggaaacugaagucuuguggaccucaaacaguauuguuguguuuuguggcaccucagguacauaugggacaggcucauggccugauggggcggacaucaaucucaugccuauauaa

SEQ ID NO: 56641 - RNA, 1410 nt, Artificial Sequence
  derived and/or modified CDS sequence (wt) from neuraminidase__InfluenzaA__AHL90533
augaauccaaaucaaaagauaauaacgauuggcucuguuucucucaccauuuccacaauaugcuucuucaugcaaacugccaucuugauaacuacuguaacauugcauuucaagcaauaugaauucaacucccccccaaacaaccaagugaugcugugugaaccaacaauaauagaaagaaacauaacagagauaguguaucugaccaacaccaccauagagaaggaaauaugccccaaacuagcagaauacagaaauuggucaaagccgcaaugugacauuacaggauuugcaccuuuuucuaaggacaauucgauuaggcuuuccgcugguggggacaucugggugacaagagaaccuuaugugucaugcgauccugacaaguguuaucaauuugcccucggacagggaacaacacuaaacaacgugcauucaaaugacacaguacgugauaggaccccuuaucggacccuauugaugaaugaguuagguguuccuuuucaucuggggaccaagcaagugugcauagcaugguccagcucaaguugucacgauggaaaagcauggcugcauguuuguauaacgggggaugauaaaaaugcaacugcuagcuucauuuacaaugggaggcuuguagauaguauuguuucaugguccaaagaaauucucaggacccaggagucagaaugcguuuguaucaauggaacuuguacaguaguaaugacugaugggagugcuucaggaaaagcugauacuaaaauacuauucauugaggaggggaaaaucguucauacuagcacauugucaggaagugcucagcaugucgaggagugcuccugcuauccucgauauccuggugucagaugugucugcagagacaacuggaaaggcuccaauaggcccaucguagauauaaacauaaaggaucauagcauuguuuccaguuauguguguucaggacuuguuggagacacacccagaaaaaacgacagcuccagcaguagccauuguuuggauccuaacaaugaagaagguggucauggagugaaaggcugggccuuugaugauggaaaugacguguggaugggaagaacgaucagcgagaagucacgcuuaggguaugaaaccuucaaagucauugaaggcugguccaacccuaaguccaaauugcagauaaauaggcaagucauaguugaaagaggugauagguccgguuauucugguauuuucucuguugaaggcaaaagcugcaucaaucggugcuuuuauguggaguugauaaggggaagaaaagaggaaacugaagucuuguggaccucaaacaguauuguuguguuuuguggcaccucagguacauauggaacaggcucauggccugauggggcggacaucaaucucaugccuauauaa

SEQ ID NO: 56642 - RNA, 1410 nt, Artificial Sequence
  derived and/or modified CDS sequence (wt) from neuraminidase__InfluenzaA__AHL90545
augaauccaaaucaaaagauaauaacgauuggcucuguuucucucaccauuuccacaauaugcuucuucaugcaaauugccaucuugauaacuacuguaacauugcauuucaagcaauaugaauucaacucccccccaaacaaccaagugaugcugugugaaccaacaauaauagaaagaaacauaacagagauaguguaucugaccaacaccaccauagagaaggaaauaugccccaaacuagcagaauacagaaauuggucaaagccgcaaugugacauuacaggauuugcaccuuuuucuaaggacaauucgauuaggcuuuccgcugguggggacaucugggugacaagagaaccuuaugugucaugcgauccugacaaguguuaucaauuugcccuuggacagggaacaacacuaaacaacgugcauucaaaugacacaguacgugauaggaccccuuaucggacccuauugaugaaugaguuagguguuccuuuucaucuggggaccaagcaagugugcauagcaugguccagcucaaguugucacgauggaaaagcauggcugcauguuuguauaacgggggaugauaaaaaugcaacugcuagcuucauuuacaaugggaggcuuguagauaguguuguuucaugguccaaagaaauccucaggacccaggagucagaaugcguuuguaucaauggaacuuguacaguaguaaugacugaugggagugcuucaggaaaagcugauacuaaaauacuauucauugaggaggggaaaaucguucauacuagcacauugucaggaagugcucagcaugucgaggagugcuccugcuauccucgauauccuggugucagaugugucugcagagacaacuggaaaggcuccaauaggcccaucguagauauaaacauaaaggaucauagcauuguuuccaguuauguguguucaggacuuguuggagacacacccagaaaaaacgacagcuccagcaguagccauuguuuggauccuaacaaugaagaagguggucauggagugaaaggcugggccuuugaugauggaaaugacguguggaugggaagaacgaucagcgagaagucacgccuaggguaugaaaccuucaaagucauugaaggcugguccaacccuaaguccaaauugcagauaaauaggcaagucauaguugacagaggcaauagguccgguuauucugguauuuucucuguugaaggcaaaagcugcaucaaucggugcuuuuauguggaguugauaaggggaagaaaagaggaaacugaagucuuguggaccucaaacaguauuguuguguuuuguggcaccucagguacauauggaacaggcucauggccugauggggcggacaucaaucucaugccuauauaa

SEQ ID NO: 56643 - RNA, 1410 nt, Artificial Sequence
  derived and/or modified CDS sequence (wt) from neuraminidase__InfluenzaA__AHL90557
augaauccaaaucaaaagauaauaacgauuggcucuguuucucucaccauuuccacaauaugcuucuucaugcaaauugccaucuugauaacuacuguaacauugcauuucaagcaauaugaauucaacucccccccaaacaaccaagugaugcugugugaaccaacaauaauagaaagaaacauaacagagauaguguaucugaccaacaccaccauagagaaggaaauaugccccaaacuagcagaauacagaaauuggucaaagccgcaaugugacauuacaggguuugcaccuuuuucuaaggacaauucgauuaggcuuuccgcugguggggacaucugggugacaagagaaccuuaugugucaugcgauccugacaaguguuaucaauuugcccuuggacagggaacaacacuaaacaacgugcauucaaauaacacaguacgugauaggaccccuuaucggacccuauugaugaaugaguuagguguuccuuuucaucuggggaccaagcaagugugcauagcaugguccagcucaaguugucacgauggaaaagcauggcugcauguuuguauaacgggggaugauaaaaaugcaacugcuagcuucauuuacaaugggaggcuuguagauaguguuguuucaugguccaaagaaauccucaggacccaggagucagaaugcguuuguaucaauggaacuuguacaguaguaaugacugaugggagugcuucaggaaaagcugauacuaaaauacuauucauugaggaggggaaaaucguucauacuagcacauugucaggaagugcucagcaugucgaggagugcuccugcuauccucgauauccuggugucagaugugucugcagagacaacuggaaaggcuccaauaggcccaucguagauauaaacauaaaggaucauagcauuguuuccaguuauguguguucaggacuuguuggagacacacccagaaaaaacgacagcuccagcaguagccauuguuuggauccuaacaaugaagaagguggucauggagugaaaggcugggccuuugaugauggaaaugacguguggaugggaagaacgaucagcgagaagucacgcuuaggguaugaaaccuucaaagucauugaaggcugguccaacccuaaguccaaauugcagauaaauaggcaagucauaguugacagagguaauagguccgguuauucugguauuuucucuguugaaggcaaaagcugcaucaaucggugcuuuuauguggaguugauaaggggaagaaaagaggaaacugaagucuuguggaccucaaacaguauuguuguguuuuguggcaccucagguacauauggaacaggcucauggccugauggggcggacaucaaucucaugccuauauaa

SEQ ID NO: 56644 - RNA, 1410 nt, Artificial Sequence
  derived and/or modified CDS sequence (wt) from neuraminidase__InfluenzaA__AHL90569
augaauccaaaucaaaagauaauaacgauuggcucuguuucucucaccauuuccacaauaugcuucuucaugcaaauugccaucuugauaacuacuguaacauugcauuucaagcaauaugaauucaacucccccccaaacaaccaagugaugcugugugaaccaacaauaauagaaagaaacauaacagagauaguguaucugaccaacaccaccauagagaaggaaauaugccccaaacuagcagaauacagaaauuggucaaagccgcaaugugacauuaaaggauuugcaccuuuuucuaaggacaauucgauuaggcuuuccgcugguggggacaucugggugacaagagaaccuuaugugucaugcgauccugacaaguguuaucaauuugcccuuggacagggaacaacacuaaacaacgugcauucaaauaacacaguacgugauaggaccccuuaucggacccuauugaugaaugaguuagguguuccuuuucaucuggggaccaagcaagugugcauagcaugguccagcucaaguugucacgauggaaaagcauggcugcauguuuguauaacgggggaugauaaaaaugcaacugcuagcuucauuuacaaugggaggcuuguagauaguguuguuucaugguccaaagaaauccucaggacccaggagucagaaugcguuuguaucaauggaacuuguacaguaguaaugacugaugggagugcuucaggaaaagcugauacuaaaauacuauucauugaggaggggaaaaucguucauacuagcacauugucaggaagugcucagcaugucgaggagugcuccugcuauccucgauauccuggugucagaugugucugcagagacaacuggaaaggcuccaauaggcccaucguagauauaaacauaaaggaucauagcauuguuuccaguuauguguguucaggacuuguuggagacacacccagaaaaaacgacagcuccagcaguagccauuguuuggauccuaacaaugaagaagguggucauggagugaaaggcugggccuuugaugauggaaaugacguguggaugggaagaacgaucagcgagaagucacgcuuaggguaugaaaccuucaaagucauugaaggcugguccaacccuaaguccaaauugcagauaaauaggcaagucauaguugacagagguaauagguccgguuauucugguauuuucucuguugaaggcaaaagcugcaucaaucggugcuuuuauguggaguugauaaggggaagaaaagaggaaacugaagucuuguggaccucaaacaguauuguuguguuuuguggcaccucagguacauauggaacaggcucauggccugauggggcggacaucaaucucaugccuauauaa

SEQ ID NO: 56645 - RNA, 1410 nt, Artificial Sequence
  derived and/or modified CDS sequence (wt) from neuraminidase__InfluenzaA__AHL90581
augaauccaaaucaaaagauaauaacgauuggcucuguuucucucaccauuuccacaauaugcuucuucaugcaaauugccaucuugauaacuacuguaacauugcauuucaagcaauaugaauucaacucccccccaaacaaccaagugaugcugugugaaccaacaauaauagaaagaaacauaacagagauaguguaucugaccaacaccaccauagagaaggaaauaugccccaaacuagcagaauacagaaauuggucaaagccgcaaugugacauuacaggauuugcaccuuuuucuaaggacaauucgauuaggcuuuccgcugguggggacaucugggugacaagagaaccuuaugugucaugcgauccugacaaguguuaucaauuugcccuuggacagggaacaacacuaaacaacgugcauucaaauaacacaguacgugauaggaccccuuaucggacccuauugaugaaugaguuagguguuccuuuucaucuggggaccaagcaagugugcauagcaugguccagcucaaguugucacgauggaaaagcauggcugcauguuuguauaacgggggaugauaaaaaugcaacugcuagcuucauuuacaaugggaggcuuguagauaguguuguuucaugguccaaagaaauccucaggacccaggagucagaaugcguuuguaucaauggaacuuguacaguaguaaugacugaugggagugcuucaggaaaagcugauacuaaaauacuauucauugaggaggggaaaaucguucauacuagcacauugucaggaagugcucagcaugucgaggagugcuccugcuauccucgauauccuggugucagaugugucugcagagacaacuggaaaggcuccaauaggcccaucguagauauaaacauaaaggaucauagcauuguuuccaguuauguguguucaggacuuguuggagacacacccagaaaaaacgacagcuccagcaguagccauuguuuggauccuaacaaugaagaagguggucauggagugaaaggcugggccuuugaugauggaaaugacguguggaugggaagaacgaucagcgagaagucacgcuuaggguaugaaaccuucaaagucauugaaggcugguccaacccaaaguccaaauugcagauaaauaggcaagucauaguugacagagguaauagguccgguuauucugguauuuucucuguugaaggcaaaagcugcaucaaucggugcuuuuauguggaguugauaaggggaagaaaagaggaaacugaagucuuguggaccucaaacaguauuguuguguuuuguggcaccucagguacauauggaacaggcucauggccugauggggcggacaucaaucucaugccuauauaa

SEQ ID NO: 56646 - RNA, 1410 nt, Artificial Sequence; identical to SEQ ID NO: 48648
  derived and/or modified CDS sequence (wt) from neuraminidase__InfluenzaA__AHL90593

SEQ ID NO: 56647 - RNA, 1410 nt, Artificial Sequence
  derived and/or modified CDS sequence (wt) from neuraminidase__InfluenzaA__AHL90605
augaauccaaaucaaaagauaauaacgauuggcucuguuucucucaccauuuccacaauaugcuucuucaugcaaauugccaucuugauaacuacuguaacauugcauuucaagcaauaugaauucaacucccccccaaacaaccaagugaugcugugugaaccaacaauaauagaaagaaacauaacagagauaguguaucugaccaacaccaccauagagaaggaaauaugccccaaacuagcagaauacagaaauuggucaaagccgcaaugugacauuacaggauuugcaccuuuuucuaaggacaauucgauuaggcuuuccgcugguggggacaucugggugacaagagaaccuuaugugucaugcgauccugacaaguguuaucaauuugcccuuggacagggaacaacacuaaacaacgugcauucaaauaacacaguacgugauaggaccccuuaucggacccuauugaugaaugaguuagguguuccuuuucaucuggggaccaagcaagugugcauagcaugguccagcucaaguugucacgauggaaaagcauggcugcauguuuguauaacgggggaugauaaaaaugcaacugcuagcuucauuuacaaugggaggcuuguagauaguguuguuucaugguccaaagaaauccucaggacccaggagucagaaugcguuuguaucaauggaacuuguacaguaguaaugacugaugggagugcuucaggaaaagcugauacuaaaauacuauucauugaggaggggaaaaucguucauacuagcacauugucaggaagugcucagcaugucgaggagugcuccugcuauccucgauauccuggugucagaugugucugcagagacaacuggaaaggcuccaauaggcccaucguagauauaaacauaaaggaucauagcauuguuuccaguuauguguguucaggacuuguuggagacacacccagaaaaaacgacagcuccagcaguagccauuguuuggauccuaacaaugaagaagguggucauggagugaaaggcugggccuuugaugauggaaaugacguguggaugggaagaacgaucagcgagaagucacgcuuaggguaugaaaccuucaaagucauugaaggcugguccaacccuaaguccaaauugcagauaaauaggcaagucauaguugacagagguaauagguccgguuauucugguauuuucucuguugaaggcaaaagcugcaucaaucggugcuuuuauguggaguugauaaggggaagaaaagaggaaacugaagucuuguggaccucaaacaguauuguuguguuuuguggcaccucagguacauauggaacaggcucauggccugauggggcgaacaucaaucucaugccuauauaa

SEQ ID NO: 56648 - RNA, 1410 nt, Artificial Sequence; identical to SEQ ID NO: 48611
  derived and/or modified CDS sequence (wt) from neuraminidase__InfluenzaA__AHL90629

SEQ ID NO: 56649 - RNA, 1410 nt, Artificial Sequence; identical to SEQ ID NO: 48611
  derived and/or modified CDS sequence (wt) from neuraminidase__InfluenzaA__AHL90641

SEQ ID NO: 56650 - RNA, 1410 nt, Artificial Sequence; identical to SEQ ID NO: 48526
  derived and/or modified CDS sequence (wt) from neuraminidase__InfluenzaA__AHL90653

SEQ ID NO: 56651 - RNA, 1410 nt, Artificial Sequence
  derived and/or modified CDS sequence (wt) from neuraminidase__InfluenzaA__AHL90665
augaauccaaaucaaaagauaauaacgauuggcucuguuucucucaccauuuccacaauaugcuucuucaugcaaauugccaucuugauaacuacuguaacauugcauuucaagcaauaugaauucaacucccccccaaacaaccaagugaugcugugugaaccaacaauaauagaaagaaacauaacagagauaguguaucugaccaacaccaccauagagaaggaaauaugccccaaacuagcagaauacagaaauuggucaaagccgcaaugugacauuacaggauuugcaccuuuuucuaaggacaauucgauuaggcuuuccgcugguggggacaucugggugacaagagaaccuuaugugucaugcgauccugacaaguguuaucaauuugcccuuggacagggaacaacacuaaacaacgugcauucaaauaacacaguacgugauaggaccccuuaucggacccuauugaugaaugaguuagguguuccuuuucaucuggggaccaagcaagugugcauagcaugguccagcucaaguugucacgauggaaaagcauggcugcauguuuguauaacgggggaugauaaaaaugcaacugcuagcuucauuuacaaugggaggcuuguagauaguguuguuucaugguccaaagaaauccucaggacccaggagucagaaugcguuuguaucaauggaacuuguacaguaguaaugacugaugggagugcuucaggaaaagcugauacuaaaauacuauucauugaggaggggaaaaucguucauacuagcacauugucaggaagugcucagcaugucgaggagugcuccugcuauccucgauauccuggugucagaugugucugcagagacaacuggaaaggcuccaauaggcccaucguagauauaaacauaaaggaucauagcauuguuuccaguuauguguguucaggacuugucggagacacacccagaaaaaacgacagcuccagcaguagccauuguuuggauccuaacaaugaagaagguggucauggagugaaaggcugggccuuugaugauggaaaugacguguggaugggaagaacgaucagcgagaagucacgcuuaggguaugaaaccuucaaagucauugaaggcugguccaacccuaaguccaaauugcagauaaauaggcaagucauaguugacagagguaauagguccgguuauucugguauuuucucuguugaaggcaaaagcugcaucaaucggugcuuuuauguggaguugauaaggggaagaaaagaggaaacugaagucuuguggaccucaaacaguauuguuguguuuuguggcaccucagguacauauggaacaggcucauggccugauggggcggacaucaaucucaugccuauauaa

SEQ ID NO: 56652 - RNA, 1410 nt, Artificial Sequence
  derived and/or modified CDS sequence (wt) from neuraminidase__InfluenzaA__AHL90677
augaauccaaaucaaaagauaauaacgauuggcucuguuucucucaccauuuccacaauaugcuucuucaugcaaacugccaucuugauaacuacuguaacauugcauuucaagcaauaugaauucaacucccccccaaacaaccaagugaugcugugugaaccaacaauaauagaaagaaacauaacagagauaguguaucugaccaacaccaccauagagaaggaaauaugccccaaacuagcagaauacagaaauuggucaaagccgcaaugugacauuacaggauuugcaccuuuuucuaaggacaauucgauuaggcuuuccgcugguggggacaucugggugacaagagaaccuuaugugucaugcgauccugacaaguguuaucaauuugcccuuggacagggaacaacacuaaacaacguacauucaaauaacacaguacgugauaggaccccuuaucggacccuauugaugaaugaguuagguguuccuuuucaucuggggaccaagcaagugugcauagcaugguccagcucaaguugucacgauggaaaagcauggcugcauguuuguauaacgggggaugauaaaaaugcaacugcuagcuucauuuacaaugggaagcuuguagauaguauuguuucaugguccaaagaaauccucaggacccaggagucagaaugcguuuguaucaauggaacuuguacaguaguaaugacugaugggagugcuucaggaaaagcugauacuaaaauacuauucauugaggaggggaaaaucguucauacuagcacauugucaggaagugcucagcaugucgaggagugcuccugcuauccucgauauccuggugucagaugugucugcagagacaacuggaaaggcuccaauaggcccaucguagauauaaacauaaaggaucauagcauuguuuccaguuauguguguucaggacuuguuggagacacacccagaaagaacgacagcuccagcaguagccauuguuuggauccuaacaaugaagaagguggucauggagugaaaggcugggccuuugaugauggaaaugacguauggaugggaagaacgaucagcgagaagucacgcuuaggguaugaaaccuucaaagucauugaaggcugguccaacccuaaguccaaauugcagauaaauaggcaagucauaguugacagagguaauagauccgguuauucugguauuuucucuguugaaggcaaaagcugcaucaaucggugcuuuuauguggaguugauaaggggaagaaaagaggaaacugaagucuuguggaccucaaacaguauuguuguguuuuguggcaccucagguacauauggaacaggcucauggccugauggagcggacaucaaucucaugccuauauaa

SEQ ID NO: 56653 - RNA, 1410 nt, Artificial Sequence
  derived and/or modified CDS sequence (wt) from neuraminidase__InfluenzaA__AHL90689
augaauccaaaucaaaagauaauaacgauuggcucuguuucucucaccauuuccacaauaugcuucuucaugcaaauugccaucuugauaacuacuguaacauugcauuucaagcaauaugaauucaacucccccccaaacaaccaagugaugcugugugaaccaacaauaauagaaagaaacauaacagagauaguguaucugaccaacaccaccauagagaaggaaauaugccccaaacuagcagaauacagaaauuggucaaagccgcaaugugacauuacaggauuugcaccuuuuucuaaggacaauucgauuaggcuuuccgcugguggggacaucugggugacaagagaaccuuaugugucaugcgauccugacaaguguuaucaauuugcccuuggacagggaacaacacugaacaacgugcauucaaauaacacaguacgugauaggaccccuuaucggacccuauugaugaaugaguuagguguuccuuuucaucuggggaccaagcaagugugcauagcaugguccagcucaaguugucacgauggaaaagcauggcugcauguuuguauaacgggggaugauaaaaaugcaacugcuagcuucauuuacaaugggaggcuuguagauaguguuguuucaugguccaaagaaauccucaggacccaggagucagaaugcguuuguaucaauggaacuuguacaguaguaaugacugaugggagugcuucaggaaaagcugauacuaaaauacuauucauugaggaggggaaaaucguucauacuagcacauugucaggaagugcucagcaugucgaggagugcuccugcuauccucgauauccuggugucagaugugucugcagagacaacuggaaaggcuccaauaggcccaucguagauauaaacauaaaggaucauagcauuguuuccaguuauguguguucaggacuuguuggagacacacccagaaaaaacgacagcuccagcaguagccauuguuuggauccuaacaaugaagaagguggucauggagugaaaggcugggccuuugaugauggaaaugacguguggaugggaagaacgaucagcgagaagucacgcuuaggguaugaaaccuucaaagucauugaaggcugguccaacccuaaguccaaauugcagauaaauaggcaagucauaguugacagagguaauagguccgguuauucugguauuuucucuguugaaggcaaaagcugcaucaaucggugcuuuuauguggaguugauaaggggaagaaaagaggaaacugaagucuuguggaccucaaacaguauuguuguguuuuguggcaccucagguacauauggaacaggcucauggccugauggggcggacaucaaucucaugccuauauaa

SEQ ID NO: 56654 - RNA, 1410 nt, Artificial Sequence
  derived and/or modified CDS sequence (wt) from neuraminidase__InfluenzaA__AHL90701
augaauccaaaucaaaagauaauaacgauuggcucuguuucucucaccauuuccacaauaugcuucuucaugcaaauugccaucuugauaacuacuguaacauugcauuucaagcaauaugaauucaacucccccccaaacaaccaagugaugcugugugaaccaacaauaauagaaagaaacauaacagagauaguguaucugaccaacaccaccauagagaaggaaauaugccccaaacuagcagaauacagaaauuggucaaagccgcaaugugacauuacaggauuugcaccuuuuucuaaggacaauucgauuaggcuuuccgcuggugggggcaucugggugacaagagaaccuuaugugucaugcgauccugacaaguguuaucaauuugcccuuggacagggaacaacacuaaacaacgugcauucaaauaacacaguacgugauaggaccccuuaucggacccuauugaugaaugaguuagguguuccuuuucaucuggggaccaagcaagugugcauagcaugguccagcucaaguugucacgauggaaaagcauggcugcauguuuguauaacgggggaugauaaaaaugcaacugcuagcuucauuuacaaugggaggcuuguagauaguguuguuucaugguccaaagauauccucaggacccaggagucagaaugcguuuguaucaauggaacuuguacaguaguaaugacugaugggagugcuucaggaaaagcugauacuaaaauacuauucauugaggaggggaaaaucguucauacuagcacauugucaggaagugcucagcaugucgaggagugcuccugcuauccucgauauccuggugucagaugugucugcagagacaacuggaaaggcuccaauaggcccaucguagauauaaacauaaaggaucauagcauuguuuccaguuauguguguucaggacuuguuggagacacacccagaaaaaacgacagcuccagcaguagccauuguuuggauccuaacaaugaagaagguggucauggagugaaaggcugggccuuugaugauggaaaugacguguggaugggaagaacgaucagcgagaagucacgcuuaggguaugaaaccuucaaagucauugaaggcugguccaacccuaaguccaaauugcagauaaauaggcaagucauaguugacagagguaauagguccgguuauucugguauuuucucuguugaaggcaaaagcugcaucaaucggugcuuuuauguggaguugauaaggggaagaaaagaggaaacugaaguauuguggaccucaaacaguauuguuguguuuuguggcaccucagguacauauggaacaggcucauggccugauggggcggacaucaaucucaugccuauauaa

SEQ ID NO: 56655 - RNA, 1410 nt, Artificial Sequence
  derived and/or modified CDS sequence (wt) from neuraminidase__InfluenzaA__AHL90713
augaauccaaaucaaaagauaauaacgauuggcucuguuucucucaccauuuccacaauaugcuucuucaugcaaauugccaucuugauaacuacuguaacauugcauuucaagcaauaugaauucaacucccccccaaacaaccaagugaugcugugugaaccaacaauaauagaaagaaacauaacagagauaguguaucugaccaacaccaccauagagaaggaaauaugccccaaacuagcagaauacagaaauuggucaaagccgcaaugugacauuacaggauuugcaccuuuuucuaaggacaauucgauuaggcuuuccgcugguggggacaucugggugacaagagaaccuuaugugucaugcgacccugacaaguguuaucaauuugcccuuggacagggaacaacacuaaacaacgugcauucaaauaacacaguacgugauaggaccccuuaucggacccuauugaugaaugaguuagguguuccuuuucaucuggggaccaagcaagugugcauagcaugguccagcucaaguugucacgauggaaaagcauggcugcauguuuguauaacgggggaugauaaaaaugcaacugcuagcuucauuuacaaugggaggcuuguagauaguguuguuucaugguccaaagauauccucaggacccaggagucagaaugcguuuguaucaauggaacuuguacaguaguaaugacugaugggagugcuucaggaaaagcugauacuaaaauacuauucauugaggaggggaaaaucguucauacuagcacauugucaggaagugcucagcaugucgaggagugcuccugcuauccucgauauccuggugucagaugugucugcagagacaacuggaaaggcuccaauaggcccaucguagauauaaacauaaaggaucauagcauuguuuccaguuauguguguucaggacuuguuggagacacacccagaaaaaacgacagcuccagcaguagccauuguuuggauccuaacaaugaagaagguggucauggagugaaaggcugggccuuugaugauggaaaugacguguggaugggaagaacgaucagcgagaagucacgcuuaggguaugaaaccuucaaagucauugaaggcugguccaacccuaaguccaaauugcagauaaauaggcaagucauaguugacagagguaauagguccgguuauucugguauuuucucuguugaaggcaaaagcugcaucaaucggugcuuuuauguggaguugauaaggggaagaaaagaggaaacugaaguauuguggaccucaaacaguauuguuguguuuuguggcaccucagguacauauggaacaggcucauggccugauggggcggacaucaaucucaugccuauauaa

SEQ ID NO: 56656 - RNA, 1413 nt, Artificial Sequence; identical to SEQ ID NO: 51949
  derived and/or modified CDS sequence (wt) from neuraminidase__InfluenzaA__AHL90725

SEQ ID NO: 56657 - RNA, 1413 nt, Artificial Sequence; identical to SEQ ID NO: 52253
  derived and/or modified CDS sequence (wt) from neuraminidase__InfluenzaA__AHL90749

SEQ ID NO: 56658 - RNA, 1413 nt, Artificial Sequence; identical to SEQ ID NO: 52230
  derived and/or modified CDS sequence (wt) from neuraminidase__InfluenzaA__AHL90761

SEQ ID NO: 56659 - RNA, 1413 nt, Artificial Sequence
  derived and/or modified CDS sequence (wt) from neuraminidase__InfluenzaA__AHL90773
augaacccaaaucaaaagauaauaaccauuggaucaaucaguauagcaaucggaauaauuagucuaaugcugcaaauaggaaauauuauuucaauaugggcuagucacucaauucaaacuggaagucaaaacaacacuggaauaugcaaccaaagaaucaucacauaugaaaacagcaccugggugaaucacacauauguuaauauuaacaacacuaauguuguugcuggagaggacaaaacuucaaugacauuggccggcaauucaucucuuuguucuaucaguggaugggcuauauacacaaaagacaacagcauaagaauuggcuccaaaggagauguuuuugucauaagagaaccuuucauaucauguucucacuuggaaugcagaaccuuuuuucugacccaaggcgcucuauuaaaugacaaacauucaaaugggaccguaaaggacagaaguccuuauagggccuuaaugagcuguccucuaggugaagcuccguccccauacaauucaaaguucgaaucaguugcauggucagcaagcgcaugccaugauggcaugggcugguuaacaaucggaauuucugguccagacaauggagcuguggcuguacuaaaauacaacggaauaauaacuggaaccauaaaaaguuggaaaaagcaaauauuaagaacacaagagucugaaugugucuguaugaacgggucauguuucaccauaaugaccgauggcccgaguaauaaggccgccucguacaaaauuuucaagaucgaaaaggggaagguuacuaaaucaauagaguugaaugcacccaauuuuuauuaugaggaaugcuccuguuacccagacacuggcauagugauguguguaugcagggacaacuggcaugguucaaaucgaccuugggugucuuuuaaucaaaacuuggauuaucaaauaggauacaucugcaguggaguguuuggugacaauccgcgucccgaagauagagagggcagcugcaauccagugacuguugauggagcaaacggaguaaaaggauuuucauacaaauaugguaaugguguuuggauaggaaggaccaaaaguaacagacuuagaaagggguuugagaugauuugggauccuaauggauggacaaauaccgacagugauuucucagugaaacaggauguuguagcaauaacugauuggucaggguacagcggaaguuucguccaacauccugaguuaacaggauuggacuguauaagaccuugcuucuggguugaguuagucagagggcugccuagagaaaauacaacaaucuggacuagugggagcagcauuucuuuuuguggcguuaauagugauacugcaaacuggucuuggccagacggugcugaguugccguucaccaucgacaaguag

SEQ ID NO: 56660 - RNA, 1413 nt, Artificial Sequence
  derived and/or modified CDS sequence (wt) from neuraminidase__InfluenzaA__AHL90785
augaacccaaaucaaaagauaauaaccauuggaucaaucaguauagcaaucggaauaauuagucuaauguugcaaauaggaaauauuauuucaauaugggcuagucacucaauccaaacuggaagucaaaacaacacuggaauaugcaaccaaagaaucaucacauaugaaaacagcaccugggugaaucacacauauguuaauauuaacaacacuaauguuguugcuggagaggacaaaacgucagugacauuggccggcaauucaucucuuuguucuaucaguggaugggcuauauacacaaaagacaacagcauaagaauuggcuccaaaggagauguuuuugucauaagagaaccuuucauaucauguucucacuuggaaugcagaaccuuuuuucugacccaaggcgcucuauuaaaugacaaacauucaaaugggaccguaaaggacagaaguccuuauagggccuuaaugagcuguccucuaggugaagcuccguccccauacaauucaaaguucgaaucaguugcauggucagcaagcgcaugccaugauggcaugggcugguugacaaucggaauuucugguccagacaauggagcuguggcuguacuaaaauacaacggaauaauaacuggaaccauaaaaaguuggaaaaagcaaauauuaagaacacaagagucugaaugugucuguaugaacgggucauguuucaccauaaugaccgauggcccgaguaauaaagccgccucguacaaaauuuucaagaucgaaaaggggaagguuacuaaaucaauagaguugaaugcacccaauuuuuauuacgaggaaugcuccuguuacccagacacuggcauagugauguguguaugcagggacaacuggcaugguucaaaucgaccuugggugucuuuuaaucaaaauuuggauuaucaaauaggauacaucugcaguggaguguuuggugacaauccgcgucccgaagauggagagggcagcugcaauccagugacuguuaauggagcagacggaguaaaaggguuuucauacaaauaugguaaugguguuuggauaggaaggaccaaaaguaacagacuuagaaagggguuugagaugauuugggauccuaauggauggacaaauaccgacagugauuucucagugaaacaggauguuguagcaauaacugauuggucaggguacagcggaaguuucguccaacauccugaguugacaggauuggacuguauaagaccuugcuucuggguugaguuagucagagggcugccuagagaaaauauaacaaucuggacuagugggagcagcauuucuuuuuguggcguuaauagugauacugcaaacuggucuuggccagacggugcugaguugccguucaccauugacaaguag

SEQ ID NO: 56661 - RNA, 1413 nt, Artificial Sequence
  derived and/or modified CDS sequence (wt) from neuraminidase__InfluenzaA__AHL90797
augaacccaaaucaaaagauaauaaccauuggaucaaucaguauagcaaucggaauaauuagucuaauguugcaaauaggaaauauuauuucaauaugggcuagucacucaauccaaacuggaagucaaaacaacacuggaauaugcaacaaaaggaucaucacauaugaaaacagcaccugggugaaucacacauauguuaauauuaacaacacuaauguuguugcuggagaggacaaaacuucagugacauuggccggcaauucaucucuuuguucuaucaguggaugggcuauauacacaaaagacaacagcauaagaauuggcuccaaaggagauguuuuugucauaagagaaccuuucauagcauguucucacuuggaaugcagaaccuuuuuucugacccaaggcgcucuauuaaaugacaaacauucaaaugggaccguaaaagacagaaguccuuauagggccuuaaugagcuguccucuaggugaagcuccguccccauacaauucaaaguucgaaucaguugcauggucagcaagcgcaugccaugauggcaugggcugguuaacaaucggaauuucugguccugacaauggagcuguggcuguacuaaaauacaacggaauaauaacuggaaccauaaaaaguuggaaaaagcaaauauuaagaacacaagagucugaaugugucuguaugaacgggucauguuucaccauaaugaccgauggcccgagugauaaggccgccucguacaaaauuuucaagaucgaaaaggggaagguuacuaaaucaauagaguugaaugcacccaauuuucauuaugaggaauguucuuguuacccagacacuggcauagugauguguguaugcagggacaacuggcaugguucaaaucgaccuugggugucuuuuaaucaaaacuuggauuaucaaauaggauacaucugcaguggaguguuuggugacaauccgcgucccgaagauggagagggcagcugcaguccagugacuguugauggagcaaacggaguaaaaggguuuucauacaaauaugauaaugguguuuggauaggaaggaccaaaaguaacagacuuagaaagggguuugaggugauuugggauccuaauggauggacaaauaccgacagugauuucucagugaaacaggauguuguagcaauaacugauuggucaggguacaguggaaguuucguccaacauccugaguuaacaggauuggacuguauaagaccuugcuucuggguugaguuagucagagggcugccuagagaaaauacaacaaucuggacuagugggagcagcauuucuuuuuguggcguuaauagugauacugcaaauuggucuuggccagacggugcugaguugccguucaccauugacaaguag

SEQ ID NO: 56662 - RNA, 1413 nt, Artificial Sequence; identical to SEQ ID NO: 52230
  derived and/or modified CDS sequence (wt) from neuraminidase__InfluenzaA__AHL90809

SEQ ID NO: 56663 - RNA, 1413 nt, Artificial Sequence
  derived and/or modified CDS sequence (wt) from neuraminidase__InfluenzaA__AHL90821
augaacccaaaucaaaggauaauaaccauuggaucaaucaguauagcaaucggaauaauuagucuaauguugcaaauaggaaauauuauuucaauaugggcuagucacucaauccaaacuggaagucaaaacaacacuggaauaugcaaccaaagaaucaucacauaugaaaacagcaccugggugaaucauacauauguuaauauuaacaacacuaacguuguugcuggagaggacaaaacgucagugacauuggccggcaauucaucucuuuguucuaucaguggaugggcuauauacacaaaagacaacagcauaagaauuggcuccaaaggagauguuuuugucauaagagaaccuuucauaucauguucucacuuggaaugcagaaccuuuuuucugacccaaggcgcucuauuaaaugacaaacauucaaaugggaccgcaaaggacagaaguccuuauagggccuuaaugagcuguccucuaggugaagcuccguccccauacaauucaaaguuugaaucaguugcauggucagcaagcgcaugccaugauggcaugggcugguuaacaaucggaauuucugguccagacaauggagcuguggcuguacuaaaauacaacggaauaauaacuggaaccauaaaaaguuggaaaaagcaaauauuaagaacacaagagucugaaugugucuguaugaacgggucauguuucaccauaaugaccgauggcccgaguaauaaggccgccucguacaaaauuuucaagaucgaaaaggggaagguuacuaaaucaauagaguugaaugcacccaauuuuuauuaugaggaaugcuccuguuacccagacacuggcauagugauguguguaugcagggacaacuggcaugguucaaaucgaccuugggugucuuuuaaucaaaacuuggauuaucaaauaggauacaucugcaguggaguguuuggugacaauccgcgucccgaagauggagagggcagcugcaauccggugacuguugauggagcaaacggaguaaaaggguuuucauacaaauaugguaaugguguuuggauaggaaggaccaaaaguaacagacuuagaaagggguuugagaugauuugggauccuaauggauggacaaauaccgacagugauuucucagugaaacaggauguuguagcaauaacugauuggucaggguacagcggaaguuucguccaacacccugaguuaacaggauuggacuguauaagaccuugcuucuggguugaguuagucagagggcugccuagagaaaauacaacaaucuggacuagugggagcagcauuucuuuuuguggcgucaauagugauacugcaaacuggucuuggccagacggugcugaguugccguucaccauugacaaguag

SEQ ID NO: 56664 - RNA, 1413 nt, Artificial Sequence
  derived and/or modified CDS sequence (wt) from neuraminidase__InfluenzaA__AHL90833
augaacccaaaucaaaggauaauaaccauuggaucaaucaguauagcaaucggaauaauuagucuaauguugcaaauaggaaauauuauuucaauaugggcuagucacucaauccaaacuggaagucaaaacaacacuggaauaugcaaccaaagaaucaucacauaugaaaacagcaccugggugaaucauacauauguuaauauuaacaacacuaauguuguugcuggagaggacaaaacgucagugacauuggccggcaauucaucucuuuguucuaucaguggaugggcuauauacacaaaagacaacagcauaagaauuggcuccaaaggagauguuuuugucauaagagaaccuuucauaucauguucucacuuggaaugcagaaccuuuuuucugacccaaggcgcucuauuaaaugacaaacauucaaaugggaccgcaaaggacagaaguccuuauagggccuuaaugagcuguccucuaggugaagcuccguccccauacaauucaaaguucgaaucaguugcauggucagcaagcgcaugccaugauggcaugggcugguuaacaaucggaauuucugguccagacaauggagcuguggcuguacuaaaauacaacggaauaauaacuggaaccauaaaaaguuggaaaaagcaaauauuaagaacacaagagucugaaugugucuguaugaacgggucauguuucaccauaaugaccgauggcccgaguaauaaggccgccucguacaaaauuuucaagaucgaaaaggggaagguuacuaaaucaauagaguugaaugcacccaauuuuuauuaugaggaaugcuccuguuacccagacacuggcauagugauguguguaugcagggacaacuggcaugguucaaaucgaccuugggugucuuuuaaucaaaacuuggauuaucaaaugggauacaucugcaguggaguguuuggugacaauccgcgucccgaagauggagagggcagcugcaauccggugacuguugauggagcaaacggaguaaaaggguuuucauacaaauaugguaaugguguuuggauaggaaggaccaaaaguaacagacuuagaaagggguuugagaugauuugggauccuaauggauggacaaauaccgacagugauuucucagugaaacaggauguuguagcaauaacugauuggucaggguacagcggaaguuucguccaacacccugaguuaacaggauuggacuguauaagaccuugcuucuggguugaguuagucagagggcugccuagagaaaauacaacaaucuggacuagugggagcagcauuucuuuuuguggcguuaauagugauacugcaaacuggucuuggccagacggugcugaguugccguucaccauugacaaguag

SEQ ID NO: 56665 - RNA, 1413 nt, Artificial Sequence
  derived and/or modified CDS sequence (wt) from neuraminidase__InfluenzaA__AHL90845
augaacccaaaucaaaagauaauaaccauuggaucaaucaguauagcaaucggaauaauuagucuaauguugcaaauaggaaauauuauuucaauaugggcuagucacucaauccaaacuggaagucaaaacaacacuggaauaugcaaccaaagaaucaucacauaugaaaacagcaccugggugaaucacacauauguuaauauuaacaacacuaauguuguugcuggagaggacaaaacgucagugacauuggccggcaauucaucucuuuguucuaucaguggaugggcuauauacacaaaagacaacagcauaagaauuggcuccaaaggagauguuuuugucauaagagaaccuuucauaucauguucucacuuggaaugcagaaccuuuuuucugacccaaggcgcucuauuaaaugacaaacauucaaaugggaccguaaaggacagaaguccuuauagggccuuaaugagcuguccucuaggugaagcuccguccccauacaauucaaaguucgaaucaguugcauggucagcaagcgcaugccaugauggcaugggcugguuaacaaucggaauuucugguccagacaauggagcuguggcuguacuaaaauacaacggaauaauaacuggaaccauaaaaaguuggaaaaagcaaauauuaagaacacaagagucugaaugugucuguaugaacgggucaugcuucaccauaaugaccgauggcccgaguaauaaagccgccucguacaaaauuuucaagaucgaaaaggggaagguuacuaaaucaauagaguugaaugcacccaauuuuuauuaugaggaaugcuccuguuacccagacacuggcauagugauguguguaugcagggacaacuggcaugguucaaaucgaccuugggugucuuuuaaucaaaauuuggauuaucaaauaggauacaucugcaguggaguguuuggugacaauccgcgucccgaagauggagagggcagcugcaauccagugacuguugauggagcaaacggaguaaaaggguuuucauacaaauaugguaaugguguuuggauaggaaggaccaaaaguaacagacuuagaaagggguuugagaugauuugggauccuaauggauggacaaauaccgacagugauuucucagugaaacaggauguuguagcaauaacugauuggucaggguacagcggaaguuucguccaacauccugaguugacaggauuggacuguauaagaccuugcuucuggguugaguuagucagagggcugccuagagaaaauacaacaaucuggacuagugggagcagcauuucuuuuuguggcguuaauagugauacugcaaacuggucuuggccagacggugcugaguugccguucaccauugacaaguag

SEQ ID NO: 56666 - RNA, 1413 nt, Artificial Sequence; identical to SEQ ID NO: 52253
  derived and/or modified CDS sequence (wt) from neuraminidase__InfluenzaA__AHL90857

SEQ ID NO: 56667 - RNA, 1413 nt, Artificial Sequence; identical to SEQ ID NO: 56665
  derived and/or modified CDS sequence (wt) from neuraminidase__InfluenzaA__AHL90869

SEQ ID NO: 56668 - RNA, 1413 nt, Artificial Sequence
  derived and/or modified CDS sequence (wt) from neuraminidase__InfluenzaA__AHL90881
augaacccaaaucaaaagauaauaaccauuggaucaaucaguauagcaaucggaauaauuaguacaauguugcaaauaggaaguauuauuucaauaugggcuagucacucaauccaaacuggaagucaaaacaacacuggaauaugcaaccaaagaaucaucacauaugaaaacagcaccugggugaaucacacauauguuaauauuaacaacacuaauguuguugcuggagaggacaaaacgucagugacauuggccggcaauucaucucuuuguucuaucaguggaugggcuauauacacaaaagacaacagcauaagaauuggcuccaaaggagauguuuuugucauaagagaaccuuucauaucauguucucacuuggaaugcagaaccuuuuuucugacccaaggcgcucuauuaaaugacaaacauucaaaugggaccguaaaggacagaaguccuuauagggccuuaaugagcuguccucuaggugaagcuccguccccauacaauucaaaguucgaaucaguugcauggucagcaagcgcaugccaugauggcaugggcugguuaacaaucggaauuucugguccagacaauggagcuguggcuguacuaaaauacaacggaauaauaacuggaaccauaaaaaguuggaaaaagcaaauauuaagaacacaagagucugaaugugucuguaugaacgggucauguuucaccauaaugaccgauggcccgaguaauaaagccgccucguacaaaauuuucaagaucgaaaaggggaagguuacuaaaucaauagaguugaaugcacccaauuuuuauuaugaggaaugcuccuguuacccagacacuggcauagugauguguguaugcagggacaacuggcaugguucaaaucgaccuugggugucuuuuaaucaaaauuuggauuaucaaauaggauacaucugcaguggaguguuuggugacaauccgcgucccgaagauggagagggcagcugcaauccagugacuguagauggagcaaacggaguaaaaggguuuucauacaaauaugguaaugguguuuggauaggaaggaccaaaaguaacagacuuauaaagggguuugagaugauuugggauccuaauggauggacaaauaccgacagugauuucucagugaaacaggauguuguagcaauaacugauuggucaggguacagcggaaguuucguccaacauccugaauugacaggauuggacuguauaagaccuugcuucuggguugaguuagucagagggcugccuagagaaaauacaacaaucuggacuagugggagcagcauuucuuuuuguggcguuaauagugauacugcaaacuggucuuggccagacggugcugaguugccguucaccauugacaaguag

SEQ ID NO: 56669 - RNA, 1413 nt, Artificial Sequence; identical to SEQ ID NO: 51949
  derived and/or modified CDS sequence (wt) from neuraminidase__InfluenzaA__AHL90893

SEQ ID NO: 56670 - RNA, 1413 nt, Artificial Sequence; identical to SEQ ID NO: 52253
  derived and/or modified CDS sequence (wt) from neuraminidase__InfluenzaA__AHL90905

SEQ ID NO: 56671 - RNA, 1413 nt, Artificial Sequence
  derived and/or modified CDS sequence (wt) from neuraminidase__InfluenzaA__AHL90917
augaacccaaaucaaaagauaauaaccauuggaucaaucaguauagcaaucggaauaauuagucuaacguugcaaauaggaaauauuauuucaauaugggcuagucacucaauccaaacuggaagucaaaacaacacuggaauaugcaaccaaagaaucaucacauaugaaaacagcaccugggugaaucacacauauguuaauauuaacaacacuaauguuguugcuggagaggacaaaacgucagugacauuggccggcaauucaucucuuuguucuaucaguggaugggcuauauacacaaaagacaacagcauaagaauuggcuccaaaggagauguuuuugucauaagagaaccuuucauaucauguucucacuuggaaugcagaaccuuuuuucugacccaaggcgcucuauuaaaugacaaacauucaaaugggaccguaaaggacagaaguccuuauagggccuuaaugagcuguccucuaggugaagcuccguccccauacaauucaaaguucgaaucaguugcauggucagcaagcgcaugccaugauggcaugggcugguuaacaaucggaauuucugguccagacaauggagcuguggcuguacuaaaauacaacggaauaauaacuggaaccauaaaaaguuggaaaaagcaaauauuaagaacacaagagucugaaugugucuguaugaacgggucauguuucaccauaaugaccgauggcccgaguaauaaagccgccucguacaaaauuuucaagaucgaaaaggggaagguuacuaaaucaauagaguugaaugcacccaauuuuuauuaugaggaaugcuccuguuacccagacacuggcauagugauguguguaugcagggacaacuggcaugguucaaaucgaccuugggugucuuuuaaccaaaauuuggauuaucaaauaggauacaucugcaguggaguguuuggugacaauccgcgucccgaagauggagagggcagcugcaauccagugacuguugauggagcaaacggaguaaaaggguuuucauacaaauaugguaaugguguuuggauaggaaggaccaaaaguaacagacuuagaaagggguuugagaugauuugggauccuaauggauggacaaauaccgacagugauuucucagugaaacaggauguuguagcaauaacugauuggucaggguacagcggaaguuucguccaacauccugaguugacaggauuggacuguauaagaccuugcuucuggguugaguuagucagagggcugccuagagaaaauacaacaaucuggacuagugggagcagcauuucuuuuuguggcguuaauagugauacugcaaacuggucuuggccagacggugcugaguugccguucaccauugacaaguag

SEQ ID NO: 56672 - RNA, 1413 nt, Artificial Sequence
  derived and/or modified CDS sequence (wt) from neuraminidase__InfluenzaA__AHL90929
augaacccaaaucaaaagauaauaaccauuggaucaaucaguauagcaaucggaauaauuagucuaauguugcaaauaggaaauauuauuucaauaugggcuagucacucaauucaaacuggaagucaaaacaacacuggaauaugcaaccaaagaaucaucacauaugaaaacagcaccugggugaaucacacauauguuaauauuaacaacacuaauguuguugcuggagaggacaaaacuucaaugacauuggccggcaauucaucucuuuguucuaucaguggaugggcuauauacacaaaagacaacagcauaagaauuggcuccaaaggagauguuuuugucauaagagaaccuuucauaucauguucccacuuggaaugcagaaccuuuuuucugacccaaggcgcucuauuaaaugacaaacauucaaaugggaccguaaaggacagaaguccuuauagggccuuaaugagcuguccucuaggugaagcuccguccccauacaauucaaaguucgaaucaguugcauggucagcaagcgcaugccaugauggcaugggcugguuaacaaucggaauuucugguccagacaauggagcuguggcuguacuaaaauacaacggaauaauaacuggaaccauaaaaaguuggaaaaagcaaauauuaagaacacaagagucugaaugugucuguaugaacgggucauguuucaccauaaugaccgauggcccgaguaauaaggccgccucguacaaaauuuucaagaucgaaaaggggaagguuacuaaaucaauagaguugaaugcacccaauuuuuauuaugaggaaugcuccuguuacccagacacuggcauagugauguguguaugcagggacaacuggcaugguucaaaucgaccuugggugucuuuuaaucaaaacuuggauuaucaaauaggauacaucugcaguggaguguuuggugacaauccgcgucccgaagauggagagggcagcugcaauccagugacuguugauggagcaaacggaguaaaaggauuuucauacaaauaugguaaugguguuuggauaggaaggaccaaaaguaacagacuuagaaagggguuugagaugauuugggauccuaauggauggacaaauaccgacagugauuucucagugaaacaggauguuguagcaauaacugauuggucaggguacagcggaaguuucguccaacauccugaguuaacaggauuggacuguauaagaccuugcuucuggguugaguuagucagagggcugccuagagaaaauacaacaaucuggacuagugggagcagcauuucuuuuuguggcguuaauagugauacugcaaacuggucuuggccagacggugcugaguugccguucaccaucgacaaguag

SEQ ID NO: 56673 - RNA, 1413 nt, Artificial Sequence; identical to SEQ ID NO: 52253
  derived and/or modified CDS sequence (wt) from neuraminidase__InfluenzaA__AHL90941

SEQ ID NO: 56674 - RNA, 1413 nt, Artificial Sequence; identical to SEQ ID NO: 52253
  derived and/or modified CDS sequence (wt) from neuraminidase__InfluenzaA__AHL90953

SEQ ID NO: 56675 - RNA, 1413 nt, Artificial Sequence; identical to SEQ ID NO: 52253
  derived and/or modified CDS sequence (wt) from neuraminidase__InfluenzaA__AHL90965

SEQ ID NO: 56676 - RNA, 1413 nt, Artificial Sequence
  derived and/or modified CDS sequence (wt) from neuraminidase__InfluenzaA__AHL90977
augaacccaaaucaaaagauaauaaccauuggaucaaucaguauagcaaucggaauaauuagucuaauguugcaaauaggaaauauuauuucaauaugggcuagucacucaauccaaacuggaagucaaaacaacacuggaauaugcaaccaaagaaucaucacauaugaaaacagcaccugggugaaucacacauauguuaauauuaacaacacuaauguuguugcuggagaggacaaaacuucagugacauuggccggcaauucaucucuuuguucuaucaguggaugggcuauauacacaaaagacaacagcauaagaauuggcuccaaaggagauguuuuugucauaagagaaccuuucauaucauguucucacuuggaaugcagaaccuuuuuucugacccaaggcgcucuauuaaaugacaaacauucaaaugggaccguaaaggacagaaguccuuauagggccuuaaugagcuguccucuaggugaagcuccguccccauacaauucaaaguucgaaucaguugcauggucagcaagcgcaugccaugauggcaugggcugguuaacaaucggaauuucugguccagacaauggagcuguggcuguacuaaaauacaacggaauaauaacuggaaccauaaaaaguuggaaaaagcaaauauuaaggacacaagagucugaaugugucuguaugaacgggucauguuucaccauaaugaccgauggcccgaguaauaaggcugccucguacaaaauuuucaagaucgaaaaggggaagguuacuaaaucaauagaguugaaugcacccaauuuuuauuaugaggaaugcuccuguuacccagacacuggcauagugauguguguaugcagggacaacuggcaugguucaaaucgaccuugggugucuuuuaaucaaaacuuggauuaucaaauaggauacauaugcaguggaguguuuggugacaauccgcgucccgaagauggagaaggcagcugcaauccagugacuguugauggagcaaauggaguaaaaggguuuucauacaaauaugguaaugggguuuggauaggaaggaccaaaaguaacagacuuagaaagggguuugagaugauuugggauccuaauggauggacaaauaccgacagugauuucucagugaaacaggauguuguagcaauagcugauuggucaggguacagcggaaguuucguccaacauccugaguuaacaggauuggacuguauaagaccuugcuucuggguugaguuagucagagggcugccuagagaaaauacaacaaucuggacuagugggagcagcauuucuuuuuguggcguuaauagugauacugcaaacuggucuuggccagacggugcugaguugccguucaccaucgacaaguag

SEQ ID NO: 56677 - RNA, 1413 nt, Artificial Sequence; identical to SEQ ID NO: 52216
  derived and/or modified CDS sequence (wt) from neuraminidase__InfluenzaA__AHL90989

SEQ ID NO: 56678 - RNA, 1413 nt, Artificial Sequence
  derived and/or modified CDS sequence (wt) from neuraminidase__InfluenzaA__AHL91001
augaacccaaaucaaaagauaauaaccauuggaucaaucaguauagcaaucggaauaauuagucuaauguugcaaauaggaaauauuauuucaauaugggcuagucacucaauucaaacuggaagucaaaacaacacuggaauaugcaaccaaagaaucaucacauaugaaaacagcaccugggugaaucacacauauguuaauauuaacaacacuaauguuguugcuggagaggacaaaacuucaaugacauuggccggcaauucaucucuuuguucuaucaguggaugggcuauauacacaaaagacaacagcauaagaauuggcuccaaaggagauguuuuugucauaagagaaccuuucauaucauguucucacuuggaaugcagaaccuuuuuucugacccaaggcgcucuauuaaaugacaaacauucaaaugggaccguaaaggacagaaguccuuauagggccuuaaugagcuguccucuaggugaagcuccguccccauacaauucaaaguucgaaucaguugcauggucagcaagcgcaugccaugauggcaugggcugguuaacaaucggaauuucugguccagacaauggagcuguggcuguacuaaaauacaacggaauaauaacuggaaccauaaaaaguuggaaaaagcaaauauuaagaacacaagagucugaaugugucuguaugaacgggucauguuucaccauaaugaccgauggcccgaguaauaaggccgccucguacaaaauuuucaagaucgaaaaggggaagguuacuaaaucaauagaguugaaugcacccaauuuuuauuaugaggaaugcuccuguuacccagacacuggcauagugauguguguaugcagggacaacuggcaugguucaaaucgaccuugggugucuuuuaaucaaaacuuggauuaucaaauaggauacaucugcaguggaguguuuggugacaauccgcgucccgaagauggagagggcagcugcaauccagugacuguugauggagcaaacggaguaaaaggauuuucauacaaauaugguaaugguguuuggauaggaaggaccaaaaguaacagacuuagaaagggguuugagaugauuugggauccuaauggauggacaaauaccgacagugauuucucagugaaacaggauguuguagcaauaacugauuggucaggguacagcggaaguuucguccaacauccugaguuaacaggauuggacuguauaagaccuugcuucuggguugaguuagucagagggcugccuagagaaaauacaacaaucuggacuagugggagcagcauuucuuuuuguggcguuaauagugauacugcaaacuggucuuggccagacggugcugaguugccguucaccaucgacaaguag

SEQ ID NO: 56679 - RNA, 1413 nt, Artificial Sequence
  derived and/or modified CDS sequence (wt) from neuraminidase__InfluenzaA__AHL91013
augaacccaaaucaaaagauaauaaccauuggaucaaucaguauagcaaucggaauaauuagucuaauguugcaaauaggaaauauuauuucaauaugggcuagucacucaauucaaacuggaagucaaaacaacacuggaauaugcagccaaagaaucaucacauaugaaaacagcaccugggugaaucacacauauguuaauauuaacaacacuaauguuguugcuggagaggacaaaacuucaaugacauuggccggcaauucaucucuuuguucuaucaguggaugggcuauauacacaaaagacaacagcauaagaauuggcuccaaaggagauguuuuugucauaagagaaccuuucauaucauguucucacuuggaaugcagaaccuuuuuucugacccaaggcgcucuguuaaaugacaaacauucaaaugggaccguaaaggacagaaguccuuauagggccuuaaugagcuguccucuaggugaagcuccguccccauacaauucaaaguucgaaucaguugcauggucagcaagcgcaugccaugauggcaugggcugguuaacaaucggaauuucugguccagacaauggagcuguggcuguacuaaaauacaacggaauaauaacuggaaccauaagaaguuggaaaaagcaaauauuaagaacacaagagucugaaugugucuguaugaacgggucauguuucaccauaaugaccgauggcccgaguaauaaggccgccucguacaaaauuuucaagaucgaaaaggggaagguuacuaaaucaauagaguugaaugcacccaauuuuuauuaugaggaaugcuccuguuacccagacacuggcauagugauguguguaugcagggacaacuggcaugguucaaaucgaccuugggugucuuuuaaucaaaacuuggauuaucaaauaggauacaucugcaguggaguguuuggugacaauccgcgucccgaagauggagagggcagcugcaauccagugacuguugauggagcaaacggaguaaaaggauuuucauacaaauaugguaaugguguuuggauaggaaggaccaaaaguaacagacuuagaaagggguuugagaugauuugggauccuaauggauggacaaauaccgacagugauuucucagugaaacaggauguuguagcaauaacugauuggucaggguacagcggaaguuucguccaacauccugaguuaacaggauuggacuguauaagaccuugcuucuggguugaguuagucagagggcugccuagagaaaauacaacaaucuggacuagugggagcagcauuucuuuuuguggcguuaauagugauacugcaaacuggucuuggccagacggugcugaguugccguucaccaucgacaaguag

SEQ ID NO: 56680 - RNA, 1413 nt, Artificial Sequence; identical to SEQ ID NO: 56678
  derived and/or modified CDS sequence (wt) from neuraminidase__InfluenzaA__AHL91025

SEQ ID NO: 56681 - RNA, 1410 nt, Artificial Sequence
  derived and/or modified CDS sequence (wt) from neuraminidase__InfluenzaA__AHL91037
augaauccaaaucaaaagauaauaacgauuggcucuguuucucucaccauuuccacaauaugcuucuucaugcaaauugccaucuugauaacuacuguaacauugcauuucaagcaauaugaauucaacucccccccaaacaaccaagugaugcugugugaaccaacaauaauagaaagaaacauaacagagauaguguaucugaccaacaccaccauagagaaggaaauaugccccaaacuagcagaauacagaaauuggucaaagccgcaaugugacauuacaggauuugcaccuuuuucuaaggacaauucgauuaggcuuuccgcugguggggacaucugggugacaagagaaccuuaugugucaugcgauccugacaaguguuaucaauuugcccuuggacagggaacaacacugaacaacgugcauucaaauaacacaguacgugauaggaccccuuaucggacccuauugaugaaugaguuagguguuccuuuucaucuggggaccaagcaagugugcauagcaugguccagcucaaguugucacgauggaaaagcauggcugcauguuuguauaacgggggaugauaaaaaugcaacugcuagcuucauuuacaaugggaggcuuguagauaguguuguuucaugguccaaagaaauccucaggacccaggagucagaaugcgucuguaucaauggaacuuguacaguaguaaugacugaugggagugcuucaggaaaagcugauacuaaaauacuauucauugaggaggggaaaaucguucauacuagcacauugucaggaagugcucagcaugucgaggagugcucuugcuauccucgauauccuggugucagaugugucugcagagacaacuggaaaggcuccaauaggcccaucguagauauaaacauaaaggaucauagcauuguuuccaguuauguguguucaggacuuguuggagacacacccagaaaaaacgacagcuccagcaguagccauuguuuggauccuaacaaugaagaagguggucauggagugaaaggcugggccuuugaugauggaaaugacguguggaugggaagaacgaucagcgagaagucacgcuuaggguaugaaaccuucaaagucauugaaggcugguccaaccauaaguccaaauugcagauaaauaggcaagucauaguugacagagguaauagguccgguuauucugguauuuucucuguugaaggcaaaagcugcaucaaucggugcuuuuauguggaguugauuaggggaagaaaagaggaaacugaagucuuguggaccucaaacaguauuguuguguuuuguggcaccucagguacauauggaacaggcucauggccugauggggcggaccucaaucucaugccuauauaa

SEQ ID NO: 56682 - RNA, 1410 nt, Artificial Sequence
  derived and/or modified CDS sequence (wt) from neuraminidase__InfluenzaA__AHL91049
augaauccaaaucaaaagauaauaacgauuggcucuguuucucucaccauuuccacaauaugcuucuucaugcaaauugccaucuugauaacuacuguaacauugcauuucaagcaauaugaauucaacucccccccaaacaaccaagugaugcugugugaaccaacaauaauagaaagaaacauaacagagauaguguaucugaccaacaccaccauagagaaggaaauaugccccaaacuagcagaauacagaaauuggucaaagccgcaaugugacauuacaggauuugcaccuuuuucuaaggacaauucgauuaggcuuuccgcugguggggacaucugggugacaagagaaccuuaugugucaugcgauccugacaaguguuaucaauuugcccuuggacagggaacaacacuaaacaacgugcauucaaauaacacaguacgugauaggaccccuuaucggacccuauugaugaaugaguuagguguuccuuuucaucuggggaccaagcaagugugcauagcaugguccagcucaaguugucacgauggaaaagcauggcugcauguuuguauaacgggggaugauaaaaaugcaacugcuagcuucauuuacaaugggaggcuuguagauaguguuguuucaugguccaaagaaauccucaggacccaggagucagaaugcguuuguaucaauggaacuuguacaguaguaaugacugaugggagugcuucaggaaaagcugauacuaaaauacuauucauugaggaggggaaaaucguucauacuagcacauugucaggaagugcucagcaugucgaggagugcucuugcuauccucgauauccuggugucagaugugucugcagagacaacuggaaaggcuccaauaggcccaucguagauauaaacauaaaggaucauagcauuguuuccaguuauguguguucaggacuuguuggagacacacccagaaaaaacgacagcuccagcaguagccauuguuuggauccuaacaaugaagaagguggucauggagugaaaggcugggccuuugaugauggaaaugacguguggaugggaagaacgaucaacgagacgucacgcuuaggguaugaaaccuucaaagucauugaaggcugguccaacccuaaguccaaauugcagauaaauaggcaagucauaguugacagagguaauagguccgguuauucugguauuuucucuguugaaggcaaaagcugcaucaaucggugcuuuuauguggaguugauuaggggaagaaaagaggaaacugaagucuuguggaccucaaacaguauuguuguguuuuguggcaccucagguacauauggaacaggcucauggccugauggggcggaccucaaucucaugccuauauaa

SEQ ID NO: 56683 - RNA, 1410 nt, Artificial Sequence
  derived and/or modified CDS sequence (wt) from neuraminidase__InfluenzaA__AHL91061
augaauccaaaucaaaagauaauaacgauuggcucuguuucucucaccauuuccacaauaugcuucuucaugcaaauugccaucuugauaacuacuguaacauugcauuucaagcaauaugaauucaacucccccccaaacaaccaagugaugcuaugugaaccaacaauaauagaaagaaacauaacagagauaguguaucugaccaacaccaccauagagaaggaaauaugccccaaacuagcagaauacagaaauuggucaaagccgcaaugugacauuacaggauuugcaccuuuuucuaaggacaauucgauuaggcuuuccgcugguggggacaucugggugacaagagaaccuuaugugucaugcgauccugacaaguguuaucaauuugcccuuggacagggaacaacacuaaacaacgugcauucaaauaacacaguacgugauaggaccccuuaucggacccuauugaugaaugaguuagguguuccuuuucaucuggggaccaagcaagugugcauagcaugguccagcucaaguugucacgauggaaaagcauggcugcauguuuguauaacgggggaugauaaaaaugcaacugcuagcuucauuuacaaugggaggcuuguagauaguguuguuucaugguccaaagaaauccucaggacccaggagucagaaugcgucuguaucaauggaacuuguacaguaguaaugacugaugggagugcuucaggaaaagcugauacuaaaauacuauucauugaggaggggaaaaucguucauacuagcacauugucaggaagugcucagcaugucgaggagugcucuugcuauccucgguauccuggugucagaugugucugcagagacaacuggaaaggcuccaauaggcccaucguagauauaaacauaaaggaucauagcauuguuuccaguuauguguguucaggacuuguuggagacacacccagaaaaaacgacagcuccagcaguagccauuguuugaauccuaacaaugaagaagguggucauggagugaaaggcugggccuuugaugauggaaaugacguguggaugggaagaacgaucagcgagaagucacgcuuaggguaugaaaccuucaaagucauugaaggcugguccaaccauaaguccaaauugcagauaaauaggcaagucauaguugacagagguaauagguccgguuauucugguauuuucucuguugaaggcaaaagcugcaucaaucggugcuuuuauguggaguugauuaggggaagaaaagaggaaacugaagucuuguggaccucaaacaguauuguuguguuuuguggcaccucagguacauauggaacaggcucauggccugauggggcggaccucaaccucaugccuauauaa

SEQ ID NO: 56684 - RNA, 1410 nt, Artificial Sequence
  derived and/or modified CDS sequence (wt) from neuraminidase__InfluenzaA__AHL91073
augaauccaaaucaaaagauaauaacgauuggcucuguuucucucaccauuuccacaauaugcuucuucaugcaaauugccaucuugauaacuacuguaacauugcauuucaagcaauaugaauucaacucccccccaaacaaccaagugaugcugugugaaccaacaauaauagaaagaaacauaacagagauaguguaucugaccaacaccaccauagagaaggaaauaugccccaaacuagcagaauacagaacuuggucaaagccgcaaugugacauuacaggauuugcaccuuuuucuaaggacaauucgauuaggcuuuccgcugguggggacaucugggugacaagagaaccuuaugugucaugcgauccugacaaguguuaucaauuugcccuuggacagggaacaacacuaaacaacgugcauucaaauaacacaguacgugauaggaccccuuaucggacccuauugaugaaugaguuagguguuccuuuucaucuggggaccaagcaagugugcauagcaugguccagcucaaguugucacgauggaaaagcauggcugcauguuuguauaacgggggaugauaaaaaugcaacugcuagcuucauuuacaaugggaggcuuguagauaguguuguuucaugguccaaagaaauccucaggacccaggagucagaaugcgucuguaucaauggaacuuguacaguaguaaugacugaugggagugcuucaggaaaagcugauacuaaaauacuauucauugaggaggggaaaaucguucauacuagcacauugucaggaagugcucagcaugucgaggagugcucuugcuauccucgauauccuggugucagaugugucugcagagacaacuggaaaggcuccaauaggcccaucguagauauaaacauaaaggaucauagcauuguuuccaguuauguguguucaggacuuguuggagacacacccagaaaaaacgacagcuccagcgguagccauuguuuggauccuaacaaugaagaagguggucauggagugaaaggcugggccuuugaugauggaaaugacguguggaugggaagaacgaucagcgagaagucacgcuuaggguaugaaaccuucaaagucauugaaggcugguccaaccauaaguccaaauugcagauaaauaggcaagucauaguugacagagguaauagguccgguuauucugguauuuucucuguugaaggcaaaagcugcaucaaucggugcuuuuauguggaguugauuaggggaagaaaagaggaaacugaagucuuguggaccucaaacaguauuguuguguuuuguggcaccucagguacauauggaacaggcucauggccugauggggcggaccucaaucucaugccuauauaa

SEQ ID NO: 56685 - RNA, 1410 nt, Artificial Sequence
  derived and/or modified CDS sequence (wt) from neuraminidase__InfluenzaA__AHL91085
augaauccaaaucaaaagauaauaacgauuggcucuguuucucucaccauuuccacaauaugcuucuucaugcaaauugccaucuugauaacuacuguaacauugcauuucaagcaauaugaauucaacucccccccaaacaaccaagugaugcugugugaaccaaaaauaauagaaagaaacauaacagagauaguguaucugaccaacaccaccauagagaaggaaauaugccccaaacuagcagaauacagaaauuggucaaagccgcaaugugacauuacaggguuugcaccuuuuucuaaggacaauucgauuaggcuuuccgcugguggggacaucugggugacaagagaaccuuaugugucaugcgauccugacaaguguuaucaauuugcccuuggacagggaacaacacuaaacaacguacauucaaauaacacaguacgugauaggaccccuuaucggacccuauugaugaaugaguuagguguuccuuuucaucuggggaccaagcaagugugcauagcaugguccagcucaaguugucacgauggaaaagcauggcugcauguuuguauaacgggggaugauaaaaaugcaacugcuagcuucauuuacaaugggaggcuuguagauaguguuguuucaugguccaaagaaauacucaggacccaggagucagaaugcguuuguaucaauggaauuuguaccguaguaaugacugaugggagugcuucaggaaaagcugauacuaaaauacuauucauugaggaggggaaaaucguucauacuagcacauugucaggaagugcucagcaugucgaggagugcuccugcuauccucgauauccuggugucagaugugucugcagagacaacuggaaaggauccaauaggcccaucguagauauaaacauaaaggaucauagcauuguuuccaguuauguguguucaggacuuguuggagacacacccagaaaaaacgacagcuccagcaguagccauuguuuggaucccaacaaugaagaagguggucauggagugaaaggcugggccuuugaugauggaaaugacguguggaugggaagaacgaucagcgagaagucacgcuuaggguaugaaaccuucaaagucauugaaggcugguccaacccuaaguccaaauugcagauaaauaggcaagucauaguugacagagguaauagguccgguuauucugguauuuucucuguugaaggcaaaagcugcaucaaucggugcuuuuauguggaguugauaaggggaagaaaagaggaaacugaagucuuguggaccucaaacaguauuguuguguuuuguggcaccucagguacauauggaacaggcucauggccugauggggcggacaucaaucucaugccuauauaa

SEQ ID NO: 56686 - RNA, 1410 nt, Artificial Sequence
  derived and/or modified CDS sequence (wt) from neuraminidase__InfluenzaA__AHL91097
augaauccaaaucaaaagauaauaacgauuggcucuguuucucucaccauuuccacaauaugcuucuucaugcaaauugccaucuugauaacuacuguaacauugcauuucaagcaauaugaauucaacucccccccaaacaaccaagugaugcugugugaaccaacaauaauagaaagaaacauaacagagauaguguaucugaccaacaccaccauagagaaggaaauaugccccaaacuagcagaauacagaaauuggucaaagccgcaaugugacauuacaggguuugcaccuuuuucuaaggacaauucgauuaggcuuuccgcugguggggacaucugggugacaagagaaccuuaugugucaugcgauccugacaaguguuaucaauuugcccuuggacagggaacaacacuaaacaacguacauucgaauaacacaguacgugauaggaccccuuaucggacccuauugaugaaugaguuagguguuccuuuucaucuggggaccaagcaagugugcauagcaugguccagcucaaguugucacgauggaaaagcauggcugcauguuuguauaacgggggaugauaaaaaugcaacugcuagcuucauuuacaaugggaggcuuguagauaguguuguuucaugguccaaagaaauccucaggacccaggagucagaaugcguuuguaucaauggaacuuguacaguaguaaugacugaugggagugcuucaggaaaagcugauacuaaaauacuauucauugaggaggggaaaaucguucauacuagcacauugucaggaagugcucagcaugucgaggagugcuccugcuauccucgauauccuggugucagaugugucugcagagacaacuggaaaggauccaauaggcccaucguagauauaaacauaaaggaucauagcauugucuccaguuauguguguucaggacuuguuggagacacacccagaaaaaacgacagcuccagcaguagccauuguuuggauccuaacaaugaggaagguggucauggggugaaaggcugggccuuugaugauggaaaugacguguggaugggaagaacgaucagcgagaagucacgcuuaggguaugaaaccuucaaagucauugaaggcugguccaacccuaaguccaaauugcagauaaauaggcaagucauaguugacagagguaauagguccgguuauucugguauuuucucuguugaaggcaaaagcugcaucaaucggugcuuuuauguggaguugauaaggggaagaaaagaggaaacugaagucuuguggaccucaaacaguauuguuguguuuuguggcaccucagguacauauggaacaggcucauggccugauggggcggacaucaaucucaugccuauauaa

SEQ ID NO: 56687 - RNA, 1410 nt, Artificial Sequence
  derived and/or modified CDS sequence (wt) from neuraminidase__InfluenzaA__AHL91109
augaauccaaaucaaaagauaauaacgauuggcucuguuucucucaccauuuccacaauaugcuucuucaugcaaauugccaucuugauaacuacuguaacauugcauuucaagcaauaugaauucaacucccccccaaacaaccaagugaugcugugugaaccaacaauaauagaaagaaacauaacagagauaguguaucugaccaacaccacuauagagaaggaaauaugccccaaacuagcagaauacagaaauuggucaaagccgcaaugugacauuacaggauuugcaccuuuuucuaaggacaauucgauuaggcuuuccgcugguggggacaucugggugacaagagaaccuuaugugucaugcgauccugacaaguguuaucaauuugcccuuggacagggaacaacacuaaacaacgugcauucaaauaacacaguacgugauaggaccccuuaucggacccuauugaugaaugaauuagguguuccuuuucauuuggggaccaagcaagugugcauagcaugguccagcucaaguugucacgauggaaaagcauggcugcauguuuguauaacgggggaugauaaaaaugcaacugcuagcuucauuuacaaugggaggcuuguagauaguguuguuucaugguccaaagaaauccucaggacccaggagucagaaugcgucuguaucaauggaacuuguacaguaguaaugacugaugggagugcuucaggaaaagcugauacuaaaauacuauucauugaggaggggaaaaucguucauacuagcacauugucaggaagugcucagcaugucgaggagugcucuugcuauccucgauauccuggugucagaugugucugcagagacaacuggaaaggcuccaauaggcccaucguagauauaaacauaaaggaucauagcauuguuuccaguuauguguguucaggacuuguuggagacacacccagaaaaaacgacagcuccagcaguagccauuguuuggauccuaacaaugaagaagguggucauggagugaaaggcugggccuuugaugauggaaaugacguguggaugggaagaacgaucagcgagaagucacgcuuaggguaugaaaccuucaaagucauugaaggcugguccaaccauaaguccaaauugcagauaaauaggcaagucauaguugacagagguaauagguccgguuauucugguauuuucucuguugaaggcaaaaguugcaucaaucggugcuuuuauguggaguugauuaggggaagaaaagaggaaacugaagucuuguggaccucaaacaguauuguuguguuuuguggcaccucagguacauauggaacaggcucauggccugauggggcggaccucaauaucaugccuauauaa

SEQ ID NO: 56688 - RNA, 1410 nt, Artificial Sequence
  derived and/or modified CDS sequence (wt) from neuraminidase__InfluenzaA__AHL91121
augaauccaaaucaaaagauaauaacgauuggcucuguuucucucaccauuuccacaauaugcuucuucaugcaaauugccaucuugauaacuacuguaacauugcauuucaagcaauaugaauucaacucccccccaaacaaccaagugaugcugugugaaccaacaauaauagaaagaaacauaacagagauaguguaucugaccaacaccaccauagagaaggaaauaugccccaaacuagcagaauacagaaauuggucaaagccgcaaugugacauuacaggauuugcaccuuuuucuaaggacaauucgauuaggcuuuccgcugguggggacaucugggugacaagagaaccuuaugugucaugcgauccugacaaguguuaucaauuugcccuuggacagggaacaacacuaaacaacgugcauucaaauaacacaguacgugauaggaccccuuaucggacccuauugaugaaugaguuagguguuccuuuucaucuggggaccaagcaagugugcauagcaugguccagcucaaguugucacgauggaaaagcauggcugcauguuuguauaacgggggaugauaaaaaugcaacugcuagcuucauuuacaaugggaggcuuguagauaguguuguuucaugguccaaagaaauccucaggacccaggagucagaaugcgucuguaucaauggaacuuguacaguaguaaugacugaugggagugcuucaggaaaagcugauacuaaaauacuauucauugaggaggggaaaaucguucauacuagcacauugucaggaagugcucagcaugucgaggagugcucuugcuauccucgauauccuggcgucagaugugucugcagagacaacuggaaaggcuccaauaggcccaucguagauauaaacauaaaggaucauagcauuguuuccaguuauguguguucaggacuuguuggagacacacccagaaaaaacgacagcuccagcaguagccauuguuuggauccuaacaaugaagaagguggucauggagugaaaggcugggccuuugaugauggaaaugacguguggaugggaagaacgaucagcgagaagucacgcuuaggguaugaaaccuucaaagucauugaaggcugguccaaccauaaguccaaauugcagauaaauaggcaagucauaguugacagagguaauagguccgguuauucugguauuuucucuguugaaggcaaaagcugcaucaaucggugcuuuuauguggaguugauuaggggaagaaaagaggaaacugaagucuuguggaccucaaacaguauuguuguguuuuguggcaccucagguacauauggaacaggcucauggccugauggggcggaccucaaucucaugccuauauaa

SEQ ID NO: 56689 - RNA, 1410 nt, Artificial Sequence
  derived and/or modified CDS sequence (wt) from neuraminidase__InfluenzaA__AHL91133
augaauccaaaucaaaagauaauaacgauuggcucuguuucucucaccauuuccacaauaugcuucuucaugcaaauugccaucuugauaacuacuguaacauugcauuucaagcaauuugaauucaacucccccccaaacaaccaagugaugcugugugaaccaacaauaauagaaagaaacauaacagagauaguguaucugaccaacaccaccauagagaaggaaauaugccccaaacuagcagaauacagaaauuggucaaagccgcaaugugacauuacaggauuugcaccuuuuucuaaggacaauucgauuaggcuuuccgcugguggggacaucugggugacaagagaaccuuaugugucaugcgauccugacaaguguuaucaauuugcccuuggacagggaacaacacuaaacaacgugcauucaaauaacacaguacgugauaggaccccuuaucggacccuauugaugaaugaguuagguguuccuuuucaucuggggaccaagcaagugugcauagcaugguccagcucaaguugucacgauggaaaagcauggcugcauguuuguauaacgggggaugauaaaaaugcaacugcuagcuucauuuacaaugggaggcuuguagauaguguuguuucaugguccaaagaaauccucaggacccaggagucagaaugcgucuguaucaauggaacuuguacaguaguaaugacugaugggagugcuucaggaaaagcugauacuaaaauacuauucauugaggaggggaaaaucguucauacuagcacauugucaggaagugcucagcaugucgaggagugcucuugcuauccucgauauccuggugucagaugugucugcagagacaacuggaaaggcuccaauaggcccaucguagauauaaacauaaaggaucauagcauuguuuccaguuauguguguucaggacuuguuggagacacacccagaaaaaacgacagcuccagcaguagccauuguuuggauccuaacaaugaagaagguggucauggagugaaaggcugggccuuugaugauggaaaugacguguggaugggaagaacgaucagcgagaagucacgcuuaggguaugaaaccuucaaagucauugaaggcugguccaaccauaaguccaaauugcagauaaauaggcaagucauaguugacagagguaauagguccgguuauucugguauuuucucuguugaaggcaaaagcugcaucaaucggugcuuuuauguggaguugauuaggggaagaaaagaggaaacugaagucuuguggaccucaaacaguauuguuguguuuuguggcaccucagguacauauggaacaggcucauggccugauggggcggaccucaaucucaugccuauauaa

SEQ ID NO: 56690 - RNA, 1410 nt, Artificial Sequence
  derived and/or modified CDS sequence (wt) from neuraminidase__InfluenzaA__AHL91145
augaauccaaaucaaaagauaauaacgauuggcucuguuucucucaccauuuccacaauaugcuucuucaugcaaauugccaucuugauaacuacuguaacauugcauuucaagcaauaugaauucaacucccccccaaacaaccaagugaugcugugugaaccaacaauaauagaaagaaacauaacagagauaguguaucugaccaacaccaccauagagaaggaaauaugucccaaacuagcagaauacagaaauuggucaaagccgcaaugugacauuacaggauuugcaccuuuuucuaaggacaauucgauuaggcuuuccgcugguggggacaucugggugacaagagaaccuuaugugucaugcgauccugacaaguguuaucaauuugcccuuggacagggaacaacacuaaacaacgugcauucaaauaacacaguacgugauaggaccccuuaucggacccuauugaugaaugaguuagguguuccuuuucaucuggggaccaagcaagugugcauagcaugguccagcucaaguugucacgauggaaaagcauggcugcauguuuguauaacgggggaugauaaaaaugcaacugcuagcuucauuuacaaugggaggcuuguagauaguguuguuucaugguccaaagacauccucaggacccaggagucagaaugcguuuguaucaauggaacuuguacaguaguaaugacugaugggagugcuucaggaaaagcugauacuaaaauacuauucauugaggaggggaaaaucguucauacuagcacacugucaggaagugcucagcaugucgaggagugcuccugcuauccucgauauccuggugucagaugugucugcagagacaacuggaaaggcuccaauaggcccaucguagauauaaacauaaaggaucauagcauuguuuccaguuauguguguucaggacuuguuggagacacacccagaaaaaacgacagcuccagcaguagccacuguuuggauccuaacaaugaagaagguggucauggagugaaaggcugggccuuugaugauggaaaugacguguggaugggaagaacgaucagcgagaagucacgcuuaggguaugaaaccuucaaagucauugaaggcugguccaacccuaaguccaaauugcagauaaauaggcaagucauaguugacagagguaauagguccgguuauucugguauuuucucuguugaaggcaaaagcugcaucaaucggugcuuuuauguggaguugauaaggggaagaaaagaggaaacugaagucuuguggaccucaaacaguauuguuguguuuuguggcaccucagguacauauggaacaggcucauggccugauggggcggacaucaaucucaugccuauauaa

SEQ ID NO: 56691 - RNA, 1410 nt, Artificial Sequence; identical to SEQ ID NO: 56690
  derived and/or modified CDS sequence (wt) from neuraminidase__InfluenzaA__AHL91157

SEQ ID NO: 56692 - RNA, 1410 nt, Artificial Sequence; identical to SEQ ID NO: 47744
  derived and/or modified CDS sequence (wt) from neuraminidase__InfluenzaA__AHL91169

SEQ ID NO: 56693 - RNA, 1410 nt, Artificial Sequence; identical to SEQ ID NO: 55866
  derived and/or modified CDS sequence (wt) from neuraminidase__InfluenzaA__AHL94987

SEQ ID NO: 56694 - RNA, 1410 nt, Artificial Sequence; identical to SEQ ID NO: 55866
  derived and/or modified CDS sequence (wt) from neuraminidase__InfluenzaA__AHL94999

SEQ ID NO: 56695 - RNA, 1410 nt, Artificial Sequence
  derived and/or modified CDS sequence (wt) from neuraminidase__InfluenzaA__AHL95011
augaauccaaaucaaaagauaauaacgauuggcucuguuucucucaccauuuccacaauaugcuucuucaugcaaauugccaucuugauaacuacuguaacauugcauuucaagcaauaugaauucaauucccccccaaacaaccaagugaugcugugugaaccaacaauaauagaaagaaacauaacagagauaguguaucuaaccaacaccaccauagagaaggaaauaugccccaaaccagcagaauacagaaauuggucaaagccgcagugugacauuacaggauuugcaccuuuuucuaaggacaauucgauuaggcuuuccgcugguggggacaucugggugacaagagaaccuuaugugucaugcgauccugacaaguguuaucaauuugcucuuggacagggaacaacacuaaacaacgugcauucaaauaacacaguacgugauaggaccccuuaucggacccuauugaugaaugaguuagguguuccuuuucaucuggggaccaagcaagugugcauagcaugguccagcucaaguugucacgauggaaaagcauggcugcauguuuguauaacgggggaugauaaaaaugcaacugcuagcuucauuuacaaugggaggcuuguagauaguguuguuucaugguccaaagaaauccucaggacccaggaaucagaaugcguuuguaucaauggaacuuguacaguaguaaugacugaugggagugcuucaggaaaagcugauacuaaaauacuauucauugaggaggggaaaaucguucauacuagcacauugucaggaagugcucagcaugucgaggagugcucuugcuauccucgauauccuggugucagaugugucugcagagacaacuggaaaggcuccaauaggccuaucguagauauaaacauaaaggaucauagcauuguuuccagguauguguguucaggacuuguuggagacacacccagaaaaaacgacagcucaagcaguagccauuguuuggauccuaacaaugaagaagguggucauggagugaaaggcugggccuucgaugauggaaaugacguguggaugggaagaacgaucaacgagacgucacguuuaggguaugaaaccuucaaagucauugaaggcugguucaacccuaaguccaaauugcagauaaauaggcaggucauaguugacagaggugauagguccgguuauucugguauuuucucuguugaaggcaaaagcugcaucaaucggugcuuuuauguggaguugauuaggggaagaaaagaggaaacugaagucuuguggaccucaaacaguauuguuguguuuuguggcaccucagguacauauggaacaggcucauggccugauggggcggaccucaaucucaugccuauauaa

SEQ ID NO: 56696 - RNA, 1410 nt, Artificial Sequence; identical to SEQ ID NO: 55915
  derived and/or modified CDS sequence (wt) from neuraminidase__InfluenzaA__AHL95023

SEQ ID NO: 56697 - RNA, 1410 nt, Artificial Sequence; identical to SEQ ID NO: 55865
  derived and/or modified CDS sequence (wt) from neuraminidase__InfluenzaA__AHL95035

SEQ ID NO: 56698 - RNA, 1410 nt, Artificial Sequence; identical to SEQ ID NO: 55880
  derived and/or modified CDS sequence (wt) from neuraminidase__InfluenzaA__AHL95047

SEQ ID NO: 56699 - RNA, 1410 nt, Artificial Sequence
  derived and/or modified CDS sequence (wt) from neuraminidase__InfluenzaA__AHL95059
augaauccaaaucaaaagauaauaacgauuggcucuguuucucucaccauuuccacaauaugcuucuucaugcaaauugccaucuugauaacuacuguaacauugcauuucaagcaauaugaauucaacucccccccaaacaaccaagugaugcugugugaaccaacaauaauagaaagaaacauaacagagauaguguauuugaccaacaccaccauagagaaggaaauaugccccaaaccagcagaauacagaaauuggucaaaaccgcaauguggcauuacaggauuugcaccuuucucuaaggacaauucgauuaggcuuuccgcugguggggacaucugggugacaagagaaccuuaugugucaugcgguccugacaaguguuaucaauuugcccuuggacagggaacaacacuaaacaacaugcauucaaauaacacaguacgugauaggaccccuuaucggacucuauugaugaaugaguuggguguuccuuuucaucuggggaccaagcaagugugcauagcaugguccagcucaaguugucacgauggaaaagcauggcugcauguuuguauaacgggggaugauaaaaaugcaacugcuagcuucauuuacaaugggaggcuuguagauaguguuguuucaugguccaaagaaauucucaggacccaggagucagaaugcguuuguaucaauggaacuuguacaguaguaaugacugauggaagugcuucaggaaaagcugauacuaaaauauuauucauugaggaggggaaaaucguucauacuagcacauugucaggaagugcucagcaugucgaagagugcucuugcuauccucgauauccuggugucagaugugucugcagagacaacuggaaaggcuccaaucggcccaucguagauauaaacauaaaggaucauagcauugucuccaguuauguguguucaggacuuguuggagacacacccagaaaaaacgacagcuccagcaguagccauuguuuggauccuaacaaugaagaagguggucauggagugaaaggcugggccuuugaugauggaaaugacguguggaugggaagaacaaucaacgagacgucacgcuuaggguaugaaaccuucaaagucauugaaggcugguccaacccuaaguccaaauugcagauaaauaggcaagucauaguugacagaggugauagguccgguuauucugguauuuucucuguugaaggcaaaagcugcaucaaucggugcuuuuauguggaguugauuaggggaagaaaagaggaaacugaagucuuguggaccucaaacaguauuguuguguuuuguggcaccucagguacauauggaacaggcucauggccugauggggcggaccucaaucucaugccuauauaa

SEQ ID NO: 56700 - RNA, 1410 nt, Artificial Sequence
  derived and/or modified CDS sequence (wt) from neuraminidase__InfluenzaA__AHL95071
augaauccaaaucaaaagauaauaacgauuggcucuguuucucucaccauuuccacaauaugcuucuucaugcaaauugccaucuugauaacuacuguaacauugcauuucaagcaauaugaauucaacucccccccaaacaaccaagugaugcugugugaaccaacaauaauagaaagaaacauaacagagauaguguaucuaaccaacaccaccauagagaaggaaauaugccccaaaccagcagaauacagaaauuggucaaaaccgcaauguggcauuacaggauuugcaccuuucucuaaggacaauucgauuaggcuauccgcugguggggacaucugggugacaagagaaccuuaugugucaugcgauccugacaaguguuaucaauuugcccuuggacagggaacaacacuaaacaacgugcauucaaauaacacaguacgugauaggaccccuuaucggacucuauugaugaaugaguuggguguuccuuuucaucuggggaccaagcaagugugcauagcaugguccagcucaaguugucacgauggaaaagcauggcugcauguuuguauaacgggggaugauaaaaaugcaacugcuagcuuuauuuacaaugggaggcuuguagauaguguuguuucaugguccaaagaaauucucaggacccaggagucagaaugcguuuguaucaauggaacuuguacaguaguaaugacugauggaagugcuucagggaaagcugauacuaaaauacuauucauugaggaggggaaaaucguucauacuagcacauugucaggaagugcucagcaugucgaagagugcucuugcuauccucgauauccuggugucagaugugucugcagagacaacuggaaaggcuccaaucggcccaucguagauauaaacauaaaggaucauagcauuguuuccaguuauguguguucaggacuuguuggagacacacccagaaaaaacgacagcuccagcaguagccauuguuuggauccuaacaaugaagaagguggucauggagugaaaggcugggccuuugaugauggaaaugacguguggaugggaagaacaaucaacgagacgucacgcuuaggguaugaaaccuucaaagucauugaaggcugguccaacccuaaguccaaauugcagauaaauaggcaggucauaguugacagaggugauagguccgguuauucugguauuuucucuguugaaggcaaaagcugcaucaaucggugcuuuuauguggaguugauuaggggaagaaaagaggaaacugaagucuuguggaccucaaacaguauuguuguguuuuguggcaccucagguacauauggaacaggcucauggccugauggggcggaccucaaucucaugccuauauaa

SEQ ID NO: 56701 - RNA, 1410 nt, Artificial Sequence; identical to SEQ ID NO: 55917
  derived and/or modified CDS sequence (wt) from neuraminidase__InfluenzaA__AHL95083

SEQ ID NO: 56702 - RNA, 1410 nt, Artificial Sequence; identical to SEQ ID NO: 55880
  derived and/or modified CDS sequence (wt) from neuraminidase__InfluenzaA__AHL95095

SEQ ID NO: 56703 - RNA, 1410 nt, Artificial Sequence; identical to SEQ ID NO: 55880
  derived and/or modified CDS sequence (wt) from neuraminidase__InfluenzaA__AHL95107

SEQ ID NO: 56704 - RNA, 1410 nt, Artificial Sequence
  derived and/or modified CDS sequence (wt) from neuraminidase__InfluenzaA__AHL95119
augaauccaaaucaaaagauaauaacgauuggcucuguuucucucaccauuuccacaauaugcuucuucaugcaaauugccaucuugauaacuacuguaacauugcauuucaagcaauaugaauucaacucccccccaaacaaccaagugaugcugugugaaccaacaauaauagaaagaaacauaacagagauaguguaucuaaccaauaccaccauagagaaggaaauaugccccaaaccagcagaauacagaaauuggucaaagccgcagugugacauuacaggauuugcaccuuuuucuaaggacaauucgauuaggcuuuccgcugguggggacaucugggugacaagagaaccuuaugugucaugcgauccugacaaguguuaucaauuugcucuuggacagggaacaacacuaaacaacgugcauucaaauaacacaguacgugauaggaccccuuaucggacccuauugaugaaugaguuagguguuccuuuucaucuggggaccaagcaagugugcauagcaugguccagcucaaguugucacgauggaaaagcauggcugcauguuuguauaacgggggaugauaaaaaugcaacugcuagcuucauuuacaaugggaggcuuguagauaguguuguuucaugguccaaagaaauccucaggacccaggaaucagaaugcguuuguaucaauggaacuuguacaguaguaaugacugaugggagugcuucaggaaaagcugauacuaaaauacuauucauugaggaggggaaaaucguucauacuagcacauugucaggaagugcucagcaugucgaggaguguucuugcuauccucgauauccuggugucagaugugucugcagagacaacuggaaaggcuccaacaggccuaucguagauauaaacauaaaggaucauagcauuguuuccagguauguguguucaggacuuguuggagacacacccagaaaaaacgacagcuuaagcaguagccauuguuuggauccuaacaaugaagaagguggucauggagugaaaggcugggccuucgaugauggaaaugacguguggaugggaagaacgaucaacgagacgucacguuuaggguaugaaaccuucaaagucauugaaggcugguccaacccuaaguccaaauugcagauaaauaggcaggucauaguugacagaggugauagguccgguuauucugguauuuucucuguugaaggcaaaagcugcaucaaucggugcuuuuauguggaguugauuaggggaagaaaagaggaaacugaagucuuguggaccucaaacaguauuguuguguuuuguggcaccucagguacauauggaacaggcucauggccugauggagcggaccucaaucucaugccuauauaa

SEQ ID NO: 56705 - RNA, 1410 nt, Artificial Sequence
  derived and/or modified CDS sequence (wt) from neuraminidase__InfluenzaA__AHL95131
augaauccaaaucaaaagauaauaacgauuggcucuguuucucucaccauuuccacaauaugcuucuucaugcaaauugccaucuugauaacuacuguaacauugcauuucaagcaauaugaauucaacucccccccaaacaaccaagugaugcugugugaaccaacaauaauagaaagaaacauaacagagauaguguaucuaaccaacaccaccauagagaaggaaauaugccccaaaccagcagaauacagaaauuggucaaagccgcagugugacauuacaggauuugcaccuuuuucuaaggacaauucgauuaggcuuuccgcugguggggacaucugggugacaagagaaccuuaugugucaugcgauccugacaaguguuaucaauuugcucuuggacagggaacaacacuaaacaacgugcauucaaauaacacaguacgugauaggaccccuuaucggacccuauugaugaaugaguuagguguuccuuuucaucuggggaccaagcaagugugcauagcaugguccagcucaaguugucacgauggaaaagcauggcugcauguuuguauaacgggggaugauaaaaaugcaacugcuagcuucauuuacaaugggaggcuuguagauaguguuguuucaugguccaaagaaauccucaggacccaggagucagaaugcguuuguaucaauggaacuuguacaguaguaaugacugaugggagugcuucaggaaaagcugauacuaaaauacuauucauugaggaggggaaaaucguucauacuagcacauugucaggaagugcucagcaugucgaggagugcucuugcuauccucgauauccuggugucagauguguaugcagagacaacuggaaaggcuccaauaggccuaucguagauauaaacauaaaggaucauagcauuguuuccagguauguguguucaggacuuguuggagacacacccagaaaaaacgacagcuccagcaguagccauuguuuggauccuaacaaugaagaagguggucauggagugaaaggcugggccuucgaugauggaaaugacguguggaugggaagaacgaucaacgagacgucacguuuaggguaugaaaccuucaaagucauugaaggcugguccaacccuaaguccaaauugcagauaaauaggcaggucauaguugacagaggugauagguccgguuauucugguauuuucucuguugaaggcaaaagcugcaucaaucggugcuuuuauguggaguugauuaggggaagaaaagaggaaacugaagucuuguggaccucaaacaguauuguuguguuuuguggcaccucagguacauauggaacaggcucauggccugauggggcggaccucaaucucaugccuauauaa

SEQ ID NO: 56706 - RNA, 1410 nt, Artificial Sequence; identical to SEQ ID NO: 55895
  derived and/or modified CDS sequence (wt) from neuraminidase__InfluenzaA__AHL95143

SEQ ID NO: 56707 - RNA, 1410 nt, Artificial Sequence
  derived and/or modified CDS sequence (wt) from neuraminidase__InfluenzaA__AHL95155
augaauccaaaucaaaagauaauaacgauuggcucuguuucucucaccauuuccacaauaugcuucuucaugcaaauugccaucuugauaacuacuguaacauugcauuucaagcaauaugaauucaacucccccccaaacaaccaagugaugcugugugaaccaacaauaauagaaagaaacauaacagagauaguguaucugaccaacaccaccauagagaaggaaauaugccccaaaccagcagaauacagaaauuggucaaaaccgcaauguggcauuacaggauuugcaccuuucucuaaggacaauucgauuaggcuuuccgcugguggggacaucugggugacaagagaaccuuaugugucaugcgaucccgacaaguguuaucaauuugcccuuggacagggaacaacacuaaacaacgugcauucaaauaacacaguacgugauaggaccccuuaucggacucuauugaugaaugaguuggguguuccuuuucaucuggggaccaagcaagugugcauagcaugguccagcucaaguugucacgauggaaaagcauggcugcauguuuguauaacgggggaugauaaaaaugcaacugcuagcuucauuuacaaugggaggcuuguagauaguguuguuucaugguccaaagaaauucucaggacccaggagucagaaugcguuuguaucaauggaacuuguacaguaguaaugacugauggaagugcuucagggaaagcugauacuaaaauacuauucauugaggaggggaaaaucguucauacuagcacauugucaggaagugcucagcaugucgaagagugcucuugcuauccucgauauccuggugucagaugugucugcagagacaacuggaaaggcuccaaucggcccaucguagauauaaacauaaaggaucauagcauuguuuccaguuauguguguucaggacuuguuggagacacacccagaaaaaacgacagcuccagcaguagccauuguuuggauccuaacaaugaagaagguagucauggagugaaaggcugggccuuugaugauggaaaugacguguggaugggaagaacaaucaacgagacgucacgcuuaggguaugaaaccuucaaagucauugaaggcugguccaacccuaaguccaaauugcagauaaauaggcaagucauaguugacagaggugauagguccgguuauucugguauuuucucuguugaaggcaaaagcugcaucaaucggugcuuuuauguggaguugauuaggggaagaaaagaggaaacugaagucuuguggaccucaaacaguauuguuguguuuuguggcaccucagguacauauggaacaggcucauggccugauggggcggaccucaaucucaugccuauauaa

SEQ ID NO: 56708 - RNA, 1410 nt, Artificial Sequence
  derived and/or modified CDS sequence (wt) from neuraminidase__InfluenzaA__AHL95167
augaauccaaaucaaaagauaauaacgauuggcucuguuucucucaccauuuccacaauaugcuucuucaugcaaauugccaucuugauaacuacuguaacauugcauuucaagcaauaugaauucaauucccccccaaacaaccaagugaugcugugugaaccaacaauaauagaaagaaacauaacagagauaguguaucuaaccaacaccaccauagagaaggaaauaugccccaaaccagcagaauacagaaauuggucaaagccgcagugugacauuacaggauuugcaccuuuuucuaaggacaauucgauuaggcuuuccgcugguggggacaucugggugacaagagaaccuuaugugucaugcgauccugacaaguguuaucaauuugcucuuggacagggaacaacacuaaacaacgugcauucaaauaacacaguacgugauaggaccccuuaucggacccuauugaugaaugaguuagguguuccuuuucaucuggggaccaagcaagugugcauagcaugguccagcucaaguugucacgauggaaaagcauggcugcauguuuguauaacgggggaugauaaaaaugcaacugcuagcuucauuuacaaugggaggcuuguagauaguguuguuucaugguccaaagaaauccucaggacccaggaaucagaaugcguuuguaucaauggaacuuguacaguaguaaugacugaugggagugcuucaggaaaagcugauacuaaaauacuauucauugaggaggggaaaaucguucauacuagcacauugucaggaagugcucagcaugucgaggagugcucuugcuauccucgauauccuggugucagaugugucugcagagacaacuggaaaggcuccaauaggccuaucguagauauaaacauaaaggaucauagcauuguuuccagguauuuguguucaggacuuguuggagacacacccagaaaaaacgacagcucaagcaguagccauuguuuggauccuaacaaugaagaagguggucauggagugaaaggcugggccuucgaugauggaaaugacguguggaugggaagaacgaucaacgagacgucacguuuaggguaugaaaccuucaaagucauugaaggcugguccaacccuaaguccaaauugcagauaaauaggcaggucauaguugacagaggugauagguccgguuauucugguauuuucucuguugaaggcaaaagcugcaucaaucggugcuuuuauguggaguugauuaggggaagaaaagaggaaacugaagucuuguggaccucaaacaguauuguuguguuuuguggcaccucagguacauauggaacaggcucauggccugauggggcggaccucaaucucaugccuauauaa

SEQ ID NO: 56709 - RNA, 1410 nt, Artificial Sequence; identical to SEQ ID NO: 55880
  derived and/or modified CDS sequence (wt) from neuraminidase__InfluenzaA__AHL95179

SEQ ID NO: 56710 - RNA, 1410 nt, Artificial Sequence; identical to SEQ ID NO: 55880
  derived and/or modified CDS sequence (wt) from neuraminidase__InfluenzaA__AHL95191

SEQ ID NO: 56711 - RNA, 1410 nt, Artificial Sequence; identical to SEQ ID NO: 55865
  derived and/or modified CDS sequence (wt) from neuraminidase__InfluenzaA__AHL95203

SEQ ID NO: 56712 - RNA, 1410 nt, Artificial Sequence; identical to SEQ ID NO: 55880
  derived and/or modified CDS sequence (wt) from neuraminidase__InfluenzaA__AHL95215

SEQ ID NO: 56713 - RNA, 1410 nt, Artificial Sequence
  derived and/or modified CDS sequence (wt) from neuraminidase__InfluenzaA__AHL95227
augaauccaaaucaaaagauaauaacgauuggcucuguuucucucaccauuuccacaauaugcuucuucaugcaaauugccaucuugauaacuacuguaacauugcauuucaagcaauaugaauucaacucccccccaaacaaccaagugaugcugugugaaccaacaauaauagaaagaaacauaacagagauaguguauuugaccaacaccaccauagagaaggaaauaugccccaaaccagcagaauacagaaauuggucaaaaccgcaauguggcauuacaggauuugcaccuuucucuaaggacaauucgauuaggcuuuccgcugguggggacaucugggugacaagagaaccuuaugugucaugcgauccugacaaguguuaucaauuugcccuuggacagggaacaacacuaaacaacaugcauucaaauaacacaguacgugauaggaccccuuaucggacucuauugaugaaugaguuggguguuccuuuucaucuggggaccaagcaagugugcauagcaugguccagcucaaguugucacgauggaaaagcauggcugcauguuuguauaacgggggaugauaaaaaugcaacugcuagcuucauuuacaaugggaggcuuguagauaguguuguuucaugguccaaagaaauucucaggacccaggagucagaaugcguuuguaucaauggaacuuguacaguaguaaugacugauggaagugcuucaggaaaagcugauacuaaaauauuauucauugaggaggggaaaaucguucauacuagcacauugucaggaagugcucagcaugucgaagagugcucuugcuauccucgauauccuggugucagaugugucugcagagacaacuggaaaggcuccaaucggcccaucguagauauaaacauaaaggaucauagcauugucuccaguuauguguguucaggacuuguuggagacacacccagagaaaacgacagcuccagcaguagccauuguuuggauccuaacaaugaagaagguggucauggagugaaaggaugggccuuugaugauggaaaugacguguggaugggaagaacaaucaacgagacgucacgcuuaggguaugaaaccuucaaagucauugaaggcugguccaacccuaaguccaaauugcagauaaauaggcaagucauaguugacagaggugauagguccgguuauucugguauuuucucuguugaaggcaaaagcugcaucaaucggugcuuuuauguggaguugauuaggggaagaaaagaggaaacugaagucuuguggaccucaaacaguauuguuguguuuuguggcaccucagguacauauggaacaggcucauggccugauggggcggaccucaaucucaugccuauauaa

SEQ ID NO: 56714 - RNA, 1410 nt, Artificial Sequence
  derived and/or modified CDS sequence (wt) from neuraminidase__InfluenzaA__AHL95239
augaauccaaaucaaaagauaauaacgauuggcucuguuucucucaccauuuccacaauaugcuucuucaugcaaauugccaucuugauaacuacuguaacauugcauuucaagcaauaugaauucaacucccccccaaacaaccaagugaugcugugugaaccaacaauaauagaaagaaacauaacagagauaguguauuugaccaacaccaccauagagaaggaaauaugccccaaaccagcagaauacagaaauuggucaaaaccgcaauguggcauuacaggauuugcaccuuucucuaaggacaauucgauuaggcuuuccgcugguggggacaucugggugacaagagaaccuuaugugucaugcgauccugacaaguguuaucaauuugcccuuggacagggaacaacacuaaacaacaugcauucaaauaacacaguacgugauaggaccccuuaucggacucuauugaugaaugaguuggguguuccuuuucaucuggggaccaagcaagugugcauagcaugguccagcucaaguugucacgauggaaaagcauggcugcauguuuguauaacgggggaugauaaaaaugcaacugcuagcuucauuuacaaugggaggcuuguagauaguguuguuucaugguccaaagaaauucucaggacccaggagucagaaugcguuuguaucaauggaacuuguacaguaguaaugacugauggaagugcuucaggaaaagcugauacuaaaauauuauucauugaggaggggaaaaucguucauacuagcacauugucaggaagugcucagcaugucgaagagugcucuugcuauccucgauauccuggugucagaugugucugcagagacaacuggaaaggcuccaaucggcccaucguagauauaaacauaaaggaucauagcauugucuccaguuauguguguucaggacuuguuggagacacacccagaaaaaacgacagcuccagcaguagccauuguuuggauccuaacaaugaagaagguggucauggagugaaaggcugggccuuugaugauggaaaugacguguggaugggaagaacaaucaaugagacgucacgcuuaggguaugaaaccuucaaagucauugaaggcugguccaacccuaaguccaaauugcagauaaauaggcaagucauaguugacagaggugauagguccgguuauucugguauuuucucuguugaaggcaaaagcugcaucaaucggugcuuuuauguggaguugauuaggggaagaaaagaggaaacugaagucuuguggaccucaaacaguauuguuguguuuuguggcaccucagguacauauggaacaggcucauggccugauggggcggaccucaaucucaugccuauauaa

SEQ ID NO: 56715 - RNA, 1410 nt, Artificial Sequence
  derived and/or modified CDS sequence (wt) from neuraminidase__InfluenzaA__AHL95251
augaauccaaaucaaaagauaauaacgauuggcucuguuucucucaccauuuccacaauaugcuucuucaugcaaauugccaucuugauaacuacuguaacauugcauuucaagcaauaugaauucaacucccccccaaacaaccaagugaugcugugugaaccaacaauaauagaaaggaacauaacagagauaguguaucugaccaacaccaccauagagaaggaaauaugccccaaaccagcagaauacagaaauuggucaaaaccgcaauguggcauuacaggauuugcaccuuucucuaaggacaauucgauuaggcuuuccgcugguggggacaucugggugacaagagaaccuuaugugucaugcgauccugacaaguguuaucaguuugcccuuggacagggaacaacacuaaacaacgugcauucaaauaacacaguacgugauaggaccccuuaucggacucuauugaugaaugaguuggguguuccuuuucaucuggggaccaagcaagugugcauagcaugguccagcucaaguugucacgauggaaaagcauggcugcauguuuguauaacgggggaugauaaaaaugcaacugcuagcuucauuuacaaugggaggcuuguagauaguguuguuucaugguccaaagaaauucucaggacccaggagucagaaugcguuuguaucaauggaacuuguacaguaguaaugacugauggaagugcuucaggaaaagcugauacuaaaauacuauucauuaaggaggggaaaaucguucauacuagcacauugucaggaagugcucagcaugucgaagagugcucuugcuauccucgauauccuggugucagaugugucugcagagacaacuggaaaggcuccaaucggcccaucguagauauaaacauaaaggaucauagcauuguuuccaguuauguguguucaggacuuguuggagacacacccagaaaaaacgacagcuccagcaguagccauuguuuggauccuaacaaugaagaagguggucauggagugaaaggcugggccuuugaugauggaaaugacguguggaugggaagaacaaucaacgagacgucacgcuuaggguaugaaaccuucaaagucauugaaggcugguccaauccuaaguccaaauugcagauaaauaggcaagucauaguugacagaggugauagguccgguuauucugguauuuucucuguugaaggcaaaagcugcaucaaucggugcuuuuauguagaguugauuaggggaagaaaagaggaaacugaagucuuguggaccucaaacaguauuguuguguuuuguggcaccucagguacauauggaacaggcucauggccugauggggcggaccucaaucucaugccuauauaa

SEQ ID NO: 56716 - RNA, 1410 nt, Artificial Sequence; identical to SEQ ID NO: 55865
  derived and/or modified CDS sequence (wt) from neuraminidase__InfluenzaA__AHL95263

SEQ ID NO: 56717 - RNA, 1410 nt, Artificial Sequence
  derived and/or modified CDS sequence (wt) from neuraminidase__InfluenzaA__AHL95275
augaauccaaaucaaaagauaauaacgauuggcucuguuucucucaccauuuccacaauaugcuucuucaugcaaauugccaucuugauaacuacuguaacauugcauuucaagcaauaugaauucaacucccccccaaacaaccaagugaugcugugugaaccaacaauaauagaaagaaacauaacagagauaguguaucugaccaacaucaccauagagaaggaaauaugccccaaaccagcagaauacagaaauuggucaaaaccgcaauguggcauuacaggauuugcaccuuucucuaaggacaauucgauuaggcuuuccgcugguggggacaucugggugacaagagaaccuuaugugucaugcgaucccgacaaguguuaucaauuugcccuuggacagggaacaacacuaaacaacgugcauucaaauaacacaguacgugauaggaccccuuaucggacucuauugaugaaugaguugggcguuccuuuucaucuggggaccaagcaagugugcauagcaugguccagcucaaguugucacgauggaaaagcauggcugcauguuuguauaacgggggaugauaaaaaugcaacugcuagcuucauuuacaaugggaggcuuguagauaguguuguuucaugguccaaagaaauucucaggacccaggagucagaaugcguuuguaucaauggaacuuguacaguaguaaugacugauggaagugcuucaggaaaagcugauacuaaaauacuauucauugaggaggggaaaaucguucauacuagcacauugucaggaagugcucagcaugucgaagagugcucuugcuauccucgauauccuggugucagaugugucugcagagacaacuggaaaggcuccaaucggcccaucguagauauaaacauaaaggaucauagcauuguuuccaguuauguguguucaggacuuguuggagacacacccagaaaaaacgacagcuccagcaguagccauuguuuggauccuaacaaugaagaagguggucauggagugaaaggcugggccuuugaugauggaaaugacguguggaugggaagaacaaucaacgagacgucacgcuuaggguaugaaaccuucaaagucauugaaggcugguccaacccuaaguccaaauugcagauaaauaggcaagucauaguugacagaggugauagguccgguuauucugguauuuucucuguugaaggcaaaagcugcaucaaucggugcuuuuauguggaguugauuaggggaagaaaagaggaaacugaagucuuguggaccucaaacaguauuguuguguuuuguggcaccucagguacauauggaacaggcucauggccugauggggcggaccucaaucucaugccuauauaa

SEQ ID NO: 56718 - RNA, 1410 nt, Artificial Sequence; identical to SEQ ID NO: 55813
  derived and/or modified CDS sequence (wt) from neuraminidase__InfluenzaA__AHL95299

SEQ ID NO: 56719 - RNA, 1410 nt, Artificial Sequence
  derived and/or modified CDS sequence (wt) from neuraminidase__InfluenzaA__AHL95310
augaauccaaaucaaaagauaauaacgauuggcucuguuucucucaccauuuccacaauaugcuucuucaugcaaauugccaucuugauaacuacuguaacauugcauuucaagcaauaugaauucaauucccccccaaacaaccaagugaugcugugugaaccaacaauaauagaaagaaacauaacagagauaguguaucuaaccaacaccaccauagagaaggaaauaugccccaaaccagcagaauacagaaauuggucaaagccgcagugugacauuacaggauuugcaccuuuuucuaaggacaauucgauuaggcuuuccgcugguggggacaucugggugacaagagaaccuuaugugucaugcgauccugacaaguguuaucaauuugcucuuggacagggaacaacacuaaacaacgugcauucaaauaacacaguacgugauaggaccccuuaucggacccuauugaugaaugaguuagguguuccuuuucaucuggggaccaagcaagugugcauagcaugguccagcucaaguugucacgauggaaaagcauggcugcauguuuguauaacgggggaugauaaaaaugcaacugcuagcuucauuuacaaugggaggcuuguagauaguguuguuucaugguccaaagaaauccucaggacccaggaaucagaaugcguuuguaucaauggaacuuguacaguaguaaugacugaugggagugcuucaggaaaagcugauacuaaaauacuauucauugaggaggggaaaaucguucauacuagcacauugucaggaagugcucagcaugucgaggagugcucuugcuauccucgauauccuggugucagaugugucugcagagacaacuggaaaggcuccaauaggccuaucguagauauaaacauaaaggaucauagcauuguuuccagguauguguguucaggacuuguuggagacacacccagaaaaaacgacagcucaagcaguagccauuguuuggauccuaacaaugaagaagguggucauggagugaaaggcugggccuucgaugauggaaaugacguguggaugggaagaacgaucaacgagacgucacguuuaggguaugaaaccuucaaagucauugaaggcugguccaacccuaaguccaaauugcagauaaauaggcaggucauaguugacagaggugauagguccgguuauucugguauuuucucuguugaaggcaaaagcugcaucaaucggugcuuuuauguggaguugauuaggggaagaaaagaggaaacugaagucuuguggaccucaaacaguauuguuguguuuuguggcaccucagguacauauggaacaggcucauggccugauggggcgaaccucaaucucaugccuauauaa

SEQ ID NO: 56720 - RNA, 1410 nt, Artificial Sequence; identical to SEQ ID NO: 55906
  derived and/or modified CDS sequence (wt) from neuraminidase__InfluenzaA__AHL95322

SEQ ID NO: 56721 - RNA, 1410 nt, Artificial Sequence; identical to SEQ ID NO: 55883
  derived and/or modified CDS sequence (wt) from neuraminidase__InfluenzaA__AHL95334

SEQ ID NO: 56722 - RNA, 1410 nt, Artificial Sequence; identical to SEQ ID NO: 55880
  derived and/or modified CDS sequence (wt) from neuraminidase__InfluenzaA__AHL95423

SEQ ID NO: 56723 - RNA, 1410 nt, Artificial Sequence; identical to SEQ ID NO: 56699
  derived and/or modified CDS sequence (wt) from neuraminidase__InfluenzaA__AHL95435

SEQ ID NO: 56724 - RNA, 1410 nt, Artificial Sequence; identical to SEQ ID NO: 55883
  derived and/or modified CDS sequence (wt) from neuraminidase__InfluenzaA__AHL95447

SEQ ID NO: 56725 - RNA, 1410 nt, Artificial Sequence
  derived and/or modified CDS sequence (wt) from neuraminidase__InfluenzaA__AHL95461
augaauccaaaucaaaagauaauaacgauuggcucuguuucucucaccauuuccacaauaugcuucuucaugcaaauugccaucuugauaacuacuguaacauugcauuucaagcaauaugaauucaacccccccccaaacaaccaagugaugcugugugaaccaacaauaauagaaagaaacauaacagagauaguguauuugaccaacaccaccauagagaaggaaauaugccccaaaccagcagaauacagaaauuggucaaaaccgcaauguggcauuacaggauuugcaccuuucucuaaggacaauucgauuaggcuuuccgcugguggggacaucugggugacaagagaaccuuaugugucaugcgguccugacaaguguuaucaauuugcccuuggacagggaacaacacuaaacaacaugcauucaaauaacacaguacgugauaggaccccuuaucggacucuauugaugaaugaguuggguguuccuuuucaucuggggaccaagcaagugugcauagcaugguccagcucaaguugucacgauggaaaagcauggcugcauguuuguauaacgggggaugauaaaaaugcaacugcuagcuucauuuacaaugggaggcuuguagauaguguuguuucaugguccaaagaaauucucaggacccaggaaucagaaugcguuuguaucaauggaacuuguacaguaguaaugacugauggaagugcuucaggaaaagcugauacuaaaauauuauucauugaggaggggaaaaucguucauacuagcacauugucaggaagugcucagcaugucgaagagugcucuugcuauccucgauauccuggugucagaugugucugcagagacaacuggaaaggcuccaaucggcccaucguagauauaaacauaaaggaucauagcauugucuccaguuauguguguucaggacuuguuggagacacacccagaaaaaacgacagcuccagcaguagccauuguuuggauccuaacaaugaagaagguggucauggagugaaaggcugggccuuugaugauggaaaugacguguggaugggaagaacaaucaacgagacgucacgcuuaggguaugaaaccuucaaagucauugaaggcugguccaacccuaaguccaaauugcagauaaauaggcaagucauaguugacagaggugauagguccgguuauucugguauuuucucuguugaaggcaaaagcugcaucaaucgaugcuuuuauguggaguugauuaggggaagaaaagaggaaacugaagucuuguggaccucaaacaguauuguuguguuuuguggcaccucagguacauauggaacaggcucauggccugauggggcggaccucaaucucaugccuauauaa

SEQ ID NO: 56726 - RNA, 1410 nt, Artificial Sequence
  derived and/or modified CDS sequence (wt) from neuraminidase__InfluenzaA__AHL95473
augaauccaaaucaaaagauaauaacaauuggcucuguuucucucaccauuuccacaauaugcuucuucaugcaaauugccaucuugauaacuacuguaacauugcauuucaagcaauaugaauucaacucccccccaaacaaccaagugaugcugugugaaccaacaauaauagaaagaaacauaacagagauaguguaucugaccaacaccaccauagagaaggaaauaugccccaaaccagcagaauacagaaauuggucaaaaccgcaaugugacauuacaggauuugcaccuuuuucuaaggacaauucgauuaggcuuuccgcugguggggacaucugggugacaagagaaccuuaugugucaugcgauccugacaaguguuaucaauuugcccuuggacagggaacaacacuaaacaaugugcauucaaauaacacaguacgugauaggaccccuuaucggacuuuauugaugaaugaguuagguguuccuuuucaucuggggaccaagcaagugugcauagcaugguccagcucaaguugucacgauggaaaagcauggcugcauguuuguauaacgggggaugauaaaaaugcaacugcuagcuucauuuacaaugggaggcuuguagauaguguuguuucaugguccaaagaaauucucaggacccaggagucagaaugcguuuguaucaauggaacuuguacaguaguaaugacugauggaagugcuucaggaaaagcugauacuaaaauacuauucauugaggagggaaaaaucguucauacuagcacauugucaggaagugcucagcaugucgaggagugcucuugcuauccucgauauccuggugucagaugugucugcagagacaacuggaaaggcuccaauaggcccaucguagauauaaacauaaaggaucauagcauugucuccaguuauguguguucaggacuuguuggagacacacccagaaaaaacgacagcuccagcaguagccauuguuuggauccuaacaaugaagaagguggucauggagugaaaggcugggccuuugaugauggaaaugacguguggaugggaagaacaaucaacgagacgucacgcuuaggguaugaaaccuucaaagucauugaaggcugguccaacccuaaguccaaauugcagauaaauaggcaagucauaguugacagaggugauagguccgguuauucugguauuuucucuguugaaggcaaaagcugcaucaaucggugcuuuuauguggaguugauuaggggaagaaaagaggaaacugaagucuuguggaccucaaacaguauuguuguguuuuguggcaccucagguacauauggaacaggcucauggccugauggggcggaccucaaucucaugccuauauaa

SEQ ID NO: 56727 - RNA, 1410 nt, Artificial Sequence; identical to SEQ ID NO: 55865
  derived and/or modified CDS sequence (wt) from neuraminidase__InfluenzaA__AHL95485

SEQ ID NO: 56728 - RNA, 1410 nt, Artificial Sequence; identical to SEQ ID NO: 55865
  derived and/or modified CDS sequence (wt) from neuraminidase__InfluenzaA__AHL95497

SEQ ID NO: 56729 - RNA, 1410 nt, Artificial Sequence
  derived and/or modified CDS sequence (wt) from neuraminidase__InfluenzaA__AHL95509
augaauccaaaucaaaagauaauaacgauuggcucuguuucucucaccauuuccacaauaugcuucuucaugcaaauugccaucuugauaacuacuguaacauugcauuucaagcaauaugaauucaacucccccccaaacaaccaagugaugcugugugaaccaacaauaauagaaagaaacauaacagagauaguguaucugaccaacaccaccauagagaaggaaauaugccccaaaccagcagaauacagaaauuggucaaaaccgcaauguggcauuacaggauuugcaccuuucucuaaggacaauucgauuaggcuuuccgcugguggggacaucugggugacaagagaaccuuaugugucaugcgauccugacaaguguuaucaauuugcccuuggacagggaacaacacuaaacaacgugcauucaaauaacacaguacgugauaggaccccuuaucggacucuauugaugaaugaguuggguguuccuuuucaucuggggaccaagcaagugugcauagcaugguccagcucaaguugucacgauggaaaagcauggcugcauguuuguauaacgggggaugauaaaaaugcaacugcuagcuucauuuacaaugggaggcuuguagauaguguuguuucaugguccaaagaaauucucaggacccaggagucagaaugcguuuguaucaauggaacuuguacaguaguaaugacugauggaagugcuucaggaaaagcugauacuaaaauacuauucauugaggaggggaaaaucguucauacuagcacauugucaggaagugcucagcaugucgaagagugcucuugcuauccucgauauccuggugucagaugugucugcagagacaacuggaaaggcuccaaucggcccaucguagauauaaacauaaagaaucauagcauuguuuccaguuauguguguucaggacuuguuggagacacacccagaaaaaacgacagcuccagcaguagccauuguuuggauccuaacaaugaagaagguggucauggagugaaaggcugggccuuugaugauggaaaugacguguggaugggaagaacaaucaacgagacgucacgcuuaggguaugaaaccuucaaagucauugaaggcugguccaacccuaaguccaaauugcagauaaauaggcaagucauaguugacagaggugauagguccgguuauucugguauuuucucuguugaaggcaaaagcugcaucaaucggugcuuuuauguggaguugauuaggggaagaaaagaggaaacugaagucuuguggaccucaaacaguauuguuguguuuuguggcaccucagguacauauggaacaggcucauggccugauggggcggaccucaaucucaugccuauauaa

SEQ ID NO: 56730 - RNA, 1410 nt, Artificial Sequence; identical to SEQ ID NO: 55880
  derived and/or modified CDS sequence (wt) from neuraminidase__InfluenzaA__AHL95521

SEQ ID NO: 56731 - RNA, 1410 nt, Artificial Sequence; identical to SEQ ID NO: 55880
  derived and/or modified CDS sequence (wt) from neuraminidase__InfluenzaA__AHL95533

SEQ ID NO: 56732 - RNA, 1410 nt, Artificial Sequence; identical to SEQ ID NO: 55880
  derived and/or modified CDS sequence (wt) from neuraminidase__InfluenzaA__AHL95545

SEQ ID NO: 56733 - RNA, 1410 nt, Artificial Sequence
  derived and/or modified CDS sequence (wt) from neuraminidase__InfluenzaA__AHL95557
augaauccaaaucaaaagauaauaacgauuggcucuguuucucucaccauuuccacaauaugcuucuucauucaaauugccaucuugauaacuacuguaacauugcauuucaagcaauaugaauucaacucccccccaaacaaccaagugaugcugugugaaccaacaauaauagaaagaaacauaacagagauaguguauuugaccaacaccaccauagagaaggaaauaugccccaaaccagcagaauacagaaauuggucaaaaccgcaauguggcauuacaggauuugcaccuuucucuaaggacaauucgauuaggcuuuccgcugguggggacaucugggugacaagagaaccuuaugugucaugcgauccugacaaguguuaccaauuugcccuuggacagggaacaacacuaaacaacgugcauucaaauaacacagcacgugauaggaccccuuaucggacucuauugaugaaugaguuggguguuccuuuucaucuggggaccaagcaagugugcauagcaugguccagcucaaguugucacgauggaaaagcauggcugcauguuuguauaacgggggaugauaaaaaugcaacugcuagcuucauuuacaaugggaggcuuguagauaguguuguuucaugguccaaagaaauucucaggacccaggagucagaaugcguuuguaucaauggaacuuguacaguaguaaugacugauggaagugcuucaggaaaagcugauacuaaaauacuauucauugaggaggggaaaaucguucauacuagcacauugucaggaagugcucagcaugucgaagagugcucuugcuauccucgauauccuggugucagauguguuugcagagacaacuggaaaggcuccaaucggcccaucguagauauaaacauaaaggaucauagcauuguuuccaguuauguguguucaggacuuguuggagacacacccagaaaaaacgacaguuccagcaguagccauuguuuggauccuaacaaugaagaagguggucauggagugaaaggcugggccuuugaugauggaaaugacguauggaugggaagaacaaucaacgagacgucacgcuuaggguaugaaaccuucaaagucauugaaggcugguccaacccugaguccaaauugcagauaaauaggcaagucauaguugacagaggugauagguccgguuauucugguauuuucucuguugaaggcaaaagcugcaucaaucggugcuuuuauguggaguugauuaggggaagaaaagaggaaacugaagucuuguggaccucaaacaguauuguuguguuuuguggcaccucagguacauauggaacaggcucauggccugauggggcggaccucaaucucaugccuauauaa

SEQ ID NO: 56734 - RNA, 1410 nt, Artificial Sequence; identical to SEQ ID NO: 55883
  derived and/or modified CDS sequence (wt) from neuraminidase__InfluenzaA__AHL95569

SEQ ID NO: 56735 - RNA, 1410 nt, Artificial Sequence; identical to SEQ ID NO: 55880
  derived and/or modified CDS sequence (wt) from neuraminidase__InfluenzaA__AHL95581

SEQ ID NO: 56736 - RNA, 1410 nt, Artificial Sequence
  derived and/or modified CDS sequence (wt) from neuraminidase__InfluenzaA__AHL95605
augaauccaaaucaaaagauaauaacgauuggcucuguuucucucaccauuuccacaauaugcuucuucaugcaaauugccaucuugauaacuacuguaacauugcauuucaagcaauaugaauucaacucccccccaaacaaccaagugaugcugugugaaccaacaauaauagaaagaaacauaacagagauaguguaucugaccaacaccaccauagagaaggaaauaugccccaaaccagcagaauacagaaauuggucaaaaccgcaauguggcauuacaggauuugcaccuuucucuaaggacaauucgauuaggcuuuccgcugguggggacaucugggugacaagagaaccuuaugugucaugcgaucccgacaaguguuaucaauuugcccuuggacagggaacaacacuaaacaacgugcauucaaauaacacaguacgugauaggaccccuuaucggacucuauugaugaaugaguuggguguuccuuuucaucuggggaccaagcaagugugcauagcaugguccagcucaaguugucacgauggaaaagcauggcugcauguuuguauaacgggggaugauaaaaaugcaacugcuagcuucauuuacaaugggaggcuuguagauaguguuguuucaugguccaaagaaauucucaggacccaggagucagaaugcguuuguaucaauggaacuuguacaguaguaaugacugauggaagugcuucaggaaaagcugauacuaaaauacuauucauugaggaggggaaaaucguucauacuagcacauugucaggaagugcucagcaugucgaagagugcucuugcuauccucgauauccuggugucagaugugucugcagagacaacuggaaaggcuccaaucggcccaucguagauauaaacauaaaggaucauagcauuguuuccaguuauguguguucaggacuuguuggagacacacccagaaaaaacgacaucuccagcaguagccauuguuuggauccuaacaaugaagaagguggucauggagugaaaggcugggccuuugaugauggaaaugacguguggaugggaagaacaaucaacgagacgucacgcuuaggguaugaaaccuucaaagucauugaaggcugguccaacccuaaguccaaauugcagauaaauaggcaagucauaguugacagaggugauagguccgguuauucugguauuuucucuguugaaggcaaaagcugcaucaaucggugcuuuuauguggaguugauuaggggaagaaaagaggaaacugaagucuuguggaccucaaacaguauuguuguguuuuguggcaccucagguacauauggaacaggcucauggccugauggggcggaccucaaucucaugccuauauaa

SEQ ID NO: 56737 - RNA, 1410 nt, Artificial Sequence; identical to SEQ ID NO: 55880
  derived and/or modified CDS sequence (wt) from neuraminidase__InfluenzaA__AHL95617

SEQ ID NO: 56738 - RNA, 1410 nt, Artificial Sequence; identical to SEQ ID NO: 55865
  derived and/or modified CDS sequence (wt) from neuraminidase__InfluenzaA__AHL95629

SEQ ID NO: 56739 - RNA, 1410 nt, Artificial Sequence; identical to SEQ ID NO: 55952
  derived and/or modified CDS sequence (wt) from neuraminidase__InfluenzaA__AHL95641

SEQ ID NO: 56740 - RNA, 1410 nt, Artificial Sequence
  derived and/or modified CDS sequence (wt) from neuraminidase__InfluenzaA__AHL95653
augaauccaaaucaaaagauaauaacgauugguucuguuucccucaccauuuccacaauaugcuucuucaugcaaauugccaucuugauaacuacuguaacauugcauuucaagcaauaugaauucaacucccccccaaacaaccaagugaugcugugugaaccaacaauaauagaaagaaacauaacagagauaguguaucugaccaacaccaccauagagaaggaaauaugccccaaaccagcagaauacagaaauuggucaaaaccgcaauguggcauuacaggauuugcaccuuucucuaaggacaauucgauuaggcuuuccgcugguggggacaucugggugacaagagaaccuuaugugucaugcgaucccgacaaguguuaucaauuugcccuuggacagggaacaacacuaaacaacgugcauucaaacaacacaguacgugauaggaccccuuaucggacucuauugaugaaugaguuggguguuccuuuucaucuggggaccaagcaagugugcauagcaugguccagcucaaguugucacgauggaaaagcauggcugcauguuuguauaacgggggaugauaaaaaugcaacugcuagcuucauuuacaaugggaggcuuguagauaguguuguuucaugguccaaagaaauucucaggacccaggagucagaaugcguuuguaucaauggaacuuguacaguaguaaugacugauggaagugcuucagggaaagcugauacuaaaauacuauucauugaggaggggaaaaucguucauacuagcacauugucaggaagugcucagcaugucgaagagugcucuugcuauccucgauauccuggugucagaugugucugcagagacaacuggaaaggcuccaaucggcccaucguagauauaaacauaaaggaucauagcauuguuuccaguuauguguguucaggacuuguuggagacacacccagaaaaaacgacagcuccagcaguagccauuguuuggauccuaacaaugaagaagguggucauggagugaaaggcugggccuuugaugauggaaaugacguguggaugggaagaacaaucaacgagacgucacgcuuaggguaugaaaccuucaaagucauugaaggcugguccaacccuaaguccaaauugcagauaaauaggcaagucauaguugacagaggugauagguccgguuauucugguauuuucucuguugaaggcaaaagcugcaucaaucggugcuuuuauguggaguugauuaggggaagaaaagaggaaacugaagucuuguggaccucaaacaguauuguuguguuuuguggcaccucagguacauauggaacaggcucauggccugauggggcggaccucaaucucaugccuauauaa

SEQ ID NO: 56741 - RNA, 1410 nt, Artificial Sequence; identical to SEQ ID NO: 56736
  derived and/or modified CDS sequence (wt) from neuraminidase__InfluenzaA__AHL95665

SEQ ID NO: 56742 - RNA, 1410 nt, Artificial Sequence
  derived and/or modified CDS sequence (wt) from neuraminidase__InfluenzaA__AHL95677
augaauccaaaucaaaagauaauaacgauuggcucuguuucucucaccauuuccacaauaugcuucuucaugcaaauugccaucuugauaacuacuguaacauugcauuucaagcaauaugaauucaacucccccccaaacaaccaagugaugcugugugaaccaacaauaauagaaagaaacauaacagagauaguguaucugaccaacaccaccauagagaaggaaauaugccccaaaccagcagaauacagaaauuggucaaaaccgcaauguggcauuacaggauuugcaccuuucucuaaggacaauucgauuaggcuuuccgcugguggggacaucugggugacaagagaaccuuaugugucaugcgauccugacaaguguuaucaauuugcccuuggacagggaacaacacuaaacaacgugcauucaaauaacacaguacgugauaggaccccuuaucggacucuauugaugaaugaguuggguguuccuuuucaucuggggaccaagcaagugugcauagcaugguccagcucaaguugucacgauggaaaagcauggcugcauguuuguauaacgggggaugauaaaaaugcaacugcuagcuucauuuacaaugggaggcuuguagauaguguuguuucaugguccaaagaaauucucaggacccaggagucagaaugcguuuguaucaauggaacuuguacaguaguaaugacugauggaagugcuucaggaaaagcugauacuaaaauacuauucauugaggaggggaaaaucguucauacuagcacauugucaggaagugcucagcaugucgaagagugcucuugcuauccucgauauccuggugucagaugugucugcagagacaacuggaaaggcuccaaucggcccaucguagauauaaacauaaaggaucauagcauuguuuccaguuauguauguucaggacuuguuggagacacacccagaaaaaacgacagcuccagcaguagccauuguuuggauccuaacaaugaagaagguggucauggagugaaaggcugggccuuugaugauggaaaugacguguggaugggaagaacaaucaacgagacgucacgcuuaggguaugaaaccuucaaagucauugaaggcugguccaauccuaaguccaaauugcagauaaauaggcaagucauaguugacagaggugauagguccgguuauucugguauuuucucuguugaaggcaaaagcugcaucaaucggugcuuuuauguggaguugauuaggggaagaaaagaggaaacugaagucuuguggaccucaaacaguauuguuguguuuuguggcaccucagguacauauggaacaggcucauggccugauggggcggaucucaaucucaugccuauauaa

SEQ ID NO: 56743 - RNA, 1410 nt, Artificial Sequence
  derived and/or modified CDS sequence (wt) from neuraminidase__InfluenzaA__AHL95689
augaauccaaaucaaaagauaauaacgauuggcucuguuucucucaccauuuccacaauaugcuucuucaugcaaauugccaucuugauaacuacuguaacauugcauuucaagcaauaugaauucgauucccccccaaacaaccaagugaugcugugugaaccaacaauaauagaaagaaacauaacagagauaguguaucugaccaacaccaccauagagaaggaaauaugccccaaaccagcagaauacagaaauuggucaaaaccgcaauguggcauuacaggauuugcaccuuucucuaaggacaauucgauuaggcuuuccgcugguggggacaucugggugacaagagaaccuuaugugucaugcgauccugacaaguguuaucaauuugcccuuggacagggaacaacacuaaacaacgugcauucaaauaacacaguacgugauaggaccccuuaucggacucuauugaugaaugaguuggguguuccuuuucaucuggggaccaagcaagugugcauagcaugguccagcucaaguugucacgauggaaaagcauggcugcauguuuguauaacgggggaugauaaaaaugcaacugcuagcuucauuuacaaugggaggcuuguagauaguguuguuucaugguccaaagaaauucucaggacccaggagucagaaugcguuuguaucaauggaacuuguacaguaguaaugacugauggaagugcuucaggaaaagcugauacuaaaauacuauucauugaggaggggaaaaucguucauacuagcacauugucaggaagugcucagcauguugaagagugcucuugcuauccucgauauccuggugucagaugugucugcagagacaacuggaaaggcuccaaucggcccaucguagauauaaacauaaaggaucauagcauuguuuccaguuauguguguucaggacuuguuggagacacacccagaaaaaacgacagcuccagcaguagccauuguuuggauccuaacaaugaggaagguggucauggagugaaaggcugggccuuugaugauggaaaugacguguggaugggaagaacaaucaacgagacgucacgcuuaggguaugaaaccuucaaagucauugaaggcugguccaacccuaaguccaaauugcagauaaauaggcaagucauaguugacagaggugauagguccgguuauucugguauuuucucuguugaaggcaaaagcugcaucaaucggugcuuuuauguggaguugauuaggggaagaaaagaggaaacugaagucuuguggaccucaaacaguauuguuguguuuuguggcaccucagguacauauggaacaggcucauggccugauggggcgaaccucaaccucaugccuauauaa

SEQ ID NO: 56744 - RNA, 1410 nt, Artificial Sequence; identical to SEQ ID NO: 55869
  derived and/or modified CDS sequence (wt) from neuraminidase__InfluenzaA__AHL95701

SEQ ID NO: 56745 - RNA, 1410 nt, Artificial Sequence; identical to SEQ ID NO: 55880
  derived and/or modified CDS sequence (wt) from neuraminidase__InfluenzaA__AHL95713

SEQ ID NO: 56746 - RNA, 1410 nt, Artificial Sequence
  derived and/or modified CDS sequence (wt) from neuraminidase__InfluenzaA__AHL95725
augaauccaaaucaaaagauaauaacgauuggcucuguuucucucaccauuuccacaauaugcuucuucaugcaaauugccaucuugauaacuacuguaacauugcauuucaagcaauaugaauucgacccccccccaaacaaccaagugaugcugugugaaccaacaauaauagaaagaaacauaacagagauaguguaucugaccaacaccaccauagagaaggaaauaugccccaaaccagcagaauacagaaauuggucaaaaccgcaauguggcauuacaggauuugcaccuuucucuaaggacaauucgauuaggcuuuccgcugguggggacaucugggugacaagagaaccuuaugugucaugcgauccugacaaguguuaucaauuugcccuuggacagggaacaacacuaaacaacgugcauucaaauaacacaguacgugauaggaccccuuaucggacucuauugaugaaugaguuggguguuccuuuucaucuggggaccaagcaagugugcauagcaugguccagcucaaguugucacgauggaaaagcauggcugcauguuuguauaacgggggaugauaaaaaugcaacugcuagcuucauuuacaaugggaggcuuguagauaguguuguuucaugguccaaagaaauucucaggacccaggagucagaaugcguuuguaucaauggaacuuguacaguaguaaugacugauggaagugcuucaggaaaagcugauacuaaaauacuauucauugaggaggggaaaaucguucauacuagcacauugucaggaagugcucagcauguugaagagugcucuugcuauccucgauauccuggugucagaugugucugcagagacaacuggaaaggcuccaaucggcccaucguagauauaaacauaaaggaucauagcauuguuuccaguuauguguguucaggacuuguuggagacacacccagaaaaaacgacagcuccagcaguagccauuguuuggauccuaacaaugaagaagguggucauggagugaaaggcugggccuuugaugauggaaaugacguguggaugggaagaacaaucaacgagacgucacgcuuaggguaugaaaccuucaaagucauugaaggcugguccaacccuaaguccaaauugcagauaaauaggcaagucauaguugacagaggugauagguccgguuauucugguauuuucucuguugaaggcaaaagcugcaucaaucggugcuuuuauguggaguugauuaggggaagaaaagaggaaauugaagucuuguggaccucaaacaguauuguuguguuuuguggcaccucagguacauauggaacaggcucauggccugauggggcggaccucaaccucaugccuauauaa

SEQ ID NO: 56747 - RNA, 1410 nt, Artificial Sequence
  derived and/or modified CDS sequence (wt) from neuraminidase__InfluenzaA__AHL95737
augaauccaaaucaaaagauaauaacgauuggcucuguuucucucaccauuuccacaauaugcuucuucaugcaaauugccaucuugauaacuacuguaacauugcauuucaagcaauaugaauucaacucccccccaaacaaccaagugaugcugugugaaccaacaauaauagaaagaaacauaacagagauaguguauuugaccaacaccaccauagagaaggaaauaugccccaaaccagcagaauacagaaauuggucaaaaccgcaauguggcauuacaggauuugcaccuuucucuaaggacaauucgauuaggcuuuccgcugguggggacaucugggugacaagagaaccuuaugugucaugcgauccugacaaguguuaucaauuugcccuuggacagggaacaacacuaaacaacaugcauucaaauaacacaguacgugauaggaccccuuaucggacucuauugaugaaugaguuggguguuccuuuucaucuggggaccaagcaagugugcauagcaugguccagcucaaguugucacgauggaaaagcauggcugcauguuuguauaacgggggaugauaaaaacgcaacugcuagcuucauuuacaaugggaggcuuguagauaguguuguuucaugguccaaagaaauucucaggacccaggagucagaaugcguuuguaucaauggaacuuguacaguaguaaugacugauggaagugcuucaggaaaagcugauacuaaaauauuauucauugaggaggggaaaaucguucauacuagcacauugucaggaagugcucagcaugucgaagagugcucuugcuauccucgauauccuggugucagaugugucugcagagacaacuggaaaggcuccaaucggcccaucguagauauaaacauaaaggaucauagcauugucuccaguuauguguguucaggacuuguuggagacacacccagaaaaaacgacagcuccagcaguagccauuguuuggauccuaacaaugaagaagguggucauggagugaaaggcugggccuuugaugauggaaaugacguguggaugggaagaacaaucaacgagacgucacgcuuaggguaugaaaccuucaaagucauugaaggcugguccaacccuaaguccaaauugcagauaaauaggcaagucauaguugacagaggugauagguccgguuauucugguauuuucucuguugaaggcaaaagcugcaucaaucggugcuuuuauguggaguugauuaggggaagaaaagaggaaacugaagucuuguggaccucaaacaguauuguuguguuuuguggcaccucagguacauauggaacaggcucauggccugauggggcggaccucaaucucaugccuauauaa

SEQ ID NO: 56748 - RNA, 1410 nt, Artificial Sequence
  derived and/or modified CDS sequence (wt) from neuraminidase__InfluenzaA__AHL95749
augaauccaaaucaaaagauaauaacgauuggcucuguuucucucaccauuuccacaauaugcuucuucaugcaaauugccaucuugauaacuacuguaacauugcauuucaagcaauaugaauucaacucccccccaaacaaccaagugaugcugugugaaccaacaauaauagaaagaaacauaacagagauaguguauuugaccaacaccaccauagagaaggaaauaugccccaaaccagcagaauacagaaauuggucaaaaccgcaauguggcauuacaggauuugcaccuuucucuaaggacaauucgauuaggcuuuccgcugguggggacaucugggugacaagagaaccuuaugugucaugcgauccugacaaguguuaucaauuugcccuuggacagggaacaacacuaaacaacgugcauucaaauaacacagcacgugauaggaccccuuaucggacucuauugaugaaugaguuggguguuccuuuucaucuggggaccaagcaagugugcauagcaugguccagcucaaguugucacgauggaaaagcauggcugcauguuuguauaacgggggaugauaaaaaugcaacugcuagcuucauuuacaaugggaggcuuguagauaguguuguuucaugguccaaagaaauucuaaggacccaggagucagaaugcguuuguaucaauggaacuuguacaguaguaaugacugauggaagugcuucaggaaaagcugauacuaaaauacuauucauugaggaggggaaaaucguucauacuagcacauugucaggaagugcucagcaugucgaagagugcucuugcuauccucgauauccuggugucagaugugucugcagagacaacuggaaaggcuccaaucggcccaucguagauauaaacauaaaggaucauagcauuguuuccaguuauguguguucaggacuuguuggagacacacccagaaaaaacgacagcuccagcaguagccauuguuuggauccuaacaaugaagaagguggucauggagugaaaggcugggccuuugaugauggaaaugacguauggaugggaagaacaaucaacgagacaucacgcuuaggguaugaaaccuucaaagucauugaaggcugguccaacccuaaguccaaauugcagauaaauaggcaagucauaguugacagaggugauagguccgguuauucugguauuuucucuguugaaggcaaaagcugcaucaaucggugcuuuuauguggaguugauuaggggaagaaaagaggaaacugaagucuuguggaccucaaacaguauuguuguguuuuguggcaccucagguacauauggaacaggcucauggccugauggggcggaccucaaucucaugccuauauaa

SEQ ID NO: 56749 - RNA, 1410 nt, Artificial Sequence
  derived and/or modified CDS sequence (wt) from neuraminidase__InfluenzaA__AHL95761
augaauccaaaucaaaagauaauaacgauuggcucuguuucucucaccauuuccacaauaugcuucuucaugcaaauugccaucuugauaacuacuguaacauugcauuucaagcaauaugaauucaacucccccccaaacaaccaagugaugcugugugaaccaacaauaauagaaagaaacauaacagagauaguguaucuaaccaacaccaccauagagaaggaaauaugccccaaaccagcagaauacagaaauuggucaaaaccgcaauguggcauuacaggauuugcaccuuucucuaaggacaauucgauuaggcuauccgcugguggggacaucugggugacaagagaaccuuaugugucaugcgauccugacaaguguuaucaauuugcccuuggacagggaacaacacuaaacaacgugcauucaaauaacacaguacgugauaggaccccuuaucggacucuauugaugaaugaguuggguguuccuuuucaucuggggaccaagcaagugugcauagcaugguccagcucaaguugucacgauggaaaagcauggcugcauguuuguauaacgggggaugauaaaaaugcaacugcuagcuuuauuuacaaugggaggcuuguagauaguguuguuucaugguccaaagaaauucucagaacccaggagucagaaugcguuuguaucaauggaacuuguacaguaguaaugacugauggaagugcuucagggaaagcugauacuaaaauacuauucauugaggaggggaaaaucguucauacuagcacauugucaggaagugcucaacaugucgaagagugcucuugcuauccucgauauccuggugucagaugugucugcagagacaacuggaaaggcuccaaucggcccaucguagauauaaacauaaaggaucauagcauuguuuccaguuauguguguucaggacuuguuggagacacacccagaaaaaacgacagcuccagcaguagccauuguuuggacccuaacaaugaagaagguggucauggagugaaaggcugggccuuugaugauggaaaugacguguggaugggaagaacaaucaacgagacgucacgcuuaggguaugaaaccuucaaagucauugaaggcugguccaacccuaaguccaaauugcagauaaauaggcaggucauaguugacagaggugauagguccgguuauucugguauuuucucuguugaaggcaaaagcugcaucaaucggugcuuuuauguggaguugauuaggggaagaaaagaggaaacugaagucuuguggaccucaaacaguauuguuguguuuuguggcaccucagguacauauggaacaggcucauggccugauggggcggaccucaaucucaugccuauauaa

SEQ ID NO: 56750 - RNA, 1410 nt, Artificial Sequence; identical to SEQ ID NO: 55880
  derived and/or modified CDS sequence (wt) from neuraminidase__InfluenzaA__AHL95773

SEQ ID NO: 56751 - RNA, 1410 nt, Artificial Sequence
  derived and/or modified CDS sequence (wt) from neuraminidase__InfluenzaA__AHL95785
augaauccaaaucaaaagauaauaacgauuggcucuguuucucucaccauuuccacaauaugcuucuucaugcaaauugccaucuugauaacuacuguaacauugcauuucaaacaauaugaauucaacucccccccaaacaaccaagugaugcugugugaaccaacaauaauagaaagaaacauaacagagauaguguaucugaccaacaccaccauagagaaggaaauaugccccaaaccagcagaauacagaaauuggucaaaaccgcaaugugacauuacaggguuugcaccuuucucuaaggacaauucgguuaggcuuuccgcugguggggacaucugggugacaagagaaccuuaugugucaugcgauccugacaaguguuaucaauuugcccuuggacagggaacaacacuaaacaacgugcauucaaauaacacaguacgugauaggaccccuuaucggacccuauugaugaaugaguuggguguuccuuuucaucuggggaccaagcaagugugcauagcaugguccagcucaaguugucacgauggaaaagcauggcugcauguuuguauaacgggggaugauaaaaaugcaacugcuagcuucauuuacaaugggaggcuuguagauaguguuguuucaugguccaaagaaauucucaggacccaggagucagaaugcguuuguaucaauggaacuuguacaguaguaaugacugauggaagugcuucaggaaaagcugauacuaaaauacuauucauugaggaggggaaaauuguucauacuagcacauugucaggaagugcucagcaugucgaagagugcucuugcuauccucgauauccuggugucagaugugucugcagagacaacuggaaaggcuccaaucggcccaucguagauauaaacauaaaggaucauagcauuguuuccaguuauguguguucaggacuuguuggagacacacccagaaaaaacgacagcuccagcaguagccauuguuuggauccuaacaaugaagaagguggucauggagugaaaggcugggccuuugaugauggaaaugacguguggaugggaagaacaaucaacgagacgucacgcuuaggguaugaaaccuucaaagucauugaaggcugguccaacccuaaguccaaauugcagauaaauaggcaagucauaguugacagaggugauagguccgguuauucugguauuuucucuguugaaggcaaaagcugcaucaaucggugcuuuuauguggaguugauuaggggaagaaaagaggaaacugaagucuuguggaccucaaacaguauuguuguguuuuguggcaccucagguacauauggaacaggcucauggccugauggugcagaccucaaucucaugccuauauaa

SEQ ID NO: 56752 - RNA, 1410 nt, Artificial Sequence; identical to SEQ ID NO: 55883
  derived and/or modified CDS sequence (wt) from neuraminidase__InfluenzaA__AHL95797

SEQ ID NO: 56753 - RNA, 1410 nt, Artificial Sequence; identical to SEQ ID NO: 55880
  derived and/or modified CDS sequence (wt) from neuraminidase__InfluenzaA__AHL95833

SEQ ID NO: 56754 - RNA, 1410 nt, Artificial Sequence; identical to SEQ ID NO: 55883
  derived and/or modified CDS sequence (wt) from neuraminidase__InfluenzaA__AHL95845

SEQ ID NO: 56755 - RNA, 1410 nt, Artificial Sequence
  derived and/or modified CDS sequence (wt) from neuraminidase__InfluenzaA__AHL95857
augaauccaaaucaaaagauaauaucgauuggcucuguuucucucaccauuuccacaauaugcuucuucaugcaaauugccaucuugauaaccacuguaacauugcauuucaagcaauaugaauucaacucccccccaaacaaucaagugaugcugugugaaccaacaauaauagaaagaaacauaacagagauaguguaucugaccaacaccaccauagagaaggaaauaugccccaaaccagcagaauacagaaauuggucaaaaccgcaauguggcauuacaggauuugcaccuuucucuaaggacaauucgauuaggcuuuccgcugguggggacaucugggugacaagagaaccuuaugugucaugcgauccugacaaguguuaucaauuugcccuuggacagggaacaacguuaaacaacgugcauucaaacaacacaguacgugauaggaccccuuaucggacucuauugaugaaugaguuggguguuccuuuucaucuggggaccaagcaagugugcauagcaugguccagcucaaguugucacgauggaaaagcauggcugcauguuuguauaacgggggaugauaaaaaugcaacugcuagcuucauuuacaaugggaggcuuguagauaguguuguuucaugguccaaagaaauucucaggacccaggagucagaaugcguuuguaucaaugggacuuguacaguaguaaugacugauggaagugcuucaggaaaagcugauacuaaaauacuauucauugaggaggggaaaaucguucauacuagcacauugucaggaagugcucagcaugucgaagagugcucuugcuauccucgauauccuggugucagaugugucugcagagacaacuggaaaggcuccaauaggcccaucguagauauaaacauaaaggaucauagcauuguuuccaguuauguguguucaggacucguuggagacacacccagaaaaaacgacagcuccagcaguagccauuguuuggauccuaacaaugaagaagguggucauggagugaaaggcugggccuuugaugauggaaaugacguguggaugggaagaacaaucaacgagacgucacgcuuaggguaugaaaccuucaaagucauugaaggcugguccaacccuaaguccaaauugcagauaaauaggcaagucauaguugacagaggugauagguccgguuauucugguauuuucucuguugaaggcaaaagcugcaucaaucggugcuuuuauguggaguugauuaggggaagaaaagaggaaacugaagucuuguggaccucaaacaguauuguuguguuuuguggcaccucagguacauauggaacaggcucauggccugauggggcggaccucaaucucaugccuauauaa

SEQ ID NO: 56756 - RNA, 1410 nt, Artificial Sequence; identical to SEQ ID NO: 55880
  derived and/or modified CDS sequence (wt) from neuraminidase__InfluenzaA__AHL95869

SEQ ID NO: 56757 - RNA, 1410 nt, Artificial Sequence
  derived and/or modified CDS sequence (wt) from neuraminidase__InfluenzaA__AHL95881
augaauccaaaccaaaagauaauaaccauugguucggucuguaugacaauuggaauggcuaacuuaauauuacaaauuggaaacauaaucucaauauggauuagccacucaauucaaguugggaaucaaagucagauugaaacaugcaaucaaagcgucauuacuuaugaaaacaacacuuggguaaaucagacauaugucaacaucagcaacaccaaccuugcugcugggcagucagugguuuccgugaaauuagcgggcaauuccucucucugcccuguuaguggaugggcuauauacaguaaagacaacaguguaagaaucgguuccaagggggauguguuugucauaagggaaccauucauaucaugcucccccuuggaaugcagaaccuucuucuugacucaaggggccuugcuaaaugacaaacauuccaauggaaccauuaaagacaggagcccauaucgaacccuaaugagcuguccuauuggugaaguucccucuccauacaacucaagauuugagucagucgcuuggucagcaagugcuugucaugauggcaucaauuggcuaacaauuggaauuucuggcccagacaguggggcaguggcuguguuaaaguacaacggcauaauaacagacacuaucaagaguuggagaaacaauauauugagaacacaagagucugaaugugcauguguaaaugguucuugcuuuaccauaaugaccgauggaccaagugauggacaggccucauacaagaucuucagaauagaaaagggaaagauagucaaaucagucgaaaugaaugccccuaauuaucacuaugaggaaugcuccuguuauccugauucuagugaaaucacaugugugugcagggauaauuggcauggcucgaaucgaccgugggugucuuucaaccagaaucuggaauaucagauaggauacauaugcagugggauuuucggagacaauccacgcccuaaugauaagacaggcaguugugguccaguaucgucuaauggagcaaauggaguaaaaggauuuucauucaaauacggcaaugguguuuggauagggagaacuaaaagcauuaguucaagaaaagguuuugagaugauuugggauccaaauggauggacugggacagacaauaacuucucaauaaagcaagauaucguaggaauaaaugaguggucaggauauagcgggaguuuuguucagcauccagaacuaacagggcuggauuguauaagaccuugcuucuggguugaacuaaucagagggcgacccaaagagaacacaaucuggacuagugggagcagcauauccuuuugugguguaaacagugacacuguggguuggucuuggccagacggugcugaguugccauuuaccauugacaaguaa

SEQ ID NO: 56758 - RNA, 1410 nt, Artificial Sequence
  derived and/or modified CDS sequence (wt) from neuraminidase__InfluenzaA__AHL95892
augaauccaaaucaaaagauaauaacgauuggcucuguuucucucaccauuuccacaauaugcuucuucaugcaaauugccaucuugauaacuacuguaacauugcauuucaagcaauaugaauucaacucccccccaaacaaccaagugaugcugugugaaccaacaauaauagaaagaaacauaacagagauaguguaucugaccaacaccaccauagagaaggaaauaugccccaaaccagcagaauacagaaauuggucaaaaccgcaauguggcauuacaggauuugcaccuuucucuaaggacaauucgauuaggcuuuccgcugguggggacaucugggugacaagagaaccuuaugugucaugcgaucccgacaaguguuaucaauuugcccuuggacagggaacaacacuaaacaacgugcauucaaauaacacaguacgugauaggaccccuuaucggacucuauugaugaaugaguuggguguuccuuuucaucuggggaccaagcaagugugcauagcaugguccagcucaaguugucacgauggaaaagcauggcugcauguuuguauaacgggggaugauaaaaaugcaacugcuagcuucauuuacaaugggaggcuuguagauaguguuguuucaugguccaaagaaauucucaggacccaggagucagaaugcguuuguaucaauggaacuuguacaguaguaaugacugauggaagugcuucaggaaaagcugauacuaaaauacuauucauugaggaggggaaaaucguucauacuagcacauugucaggaagugcucagcaugucgaagagugcucuugcuauccucgauauccuggugucagaugugucugcagagacaacuggaaaggcuccaaucggcccaucguagauauaaacauaaaggaucauagcauuguuucccguuauguguguucaggacuuguuggagacacacccagaaaaaacgacagcuccagcaguagccauuguuuggauccuaacaaugaagaagguggucauggagugaaaggcugggccuuugaugauggaaaugacguguggaugggaagaacaaucaacgagacgucacgcuuaggguaugaaaccuucaaagucauugaaggcugguccaacccuaaguccaaauugcagauaaauaggcaagucauaguugacagaggugauagguccgguuauucugguauuuucucuguugaaggcaaaagcugcaucaaucggugcuuuuauguggaguugauuaggggaagaaaagaggaaacugaagucuuguggaccucaaacaguauuguuguguuuuguggcaccucagguacauauggaacaggcucauggccugauggggcggaccucaaucucaugccuauauaa

SEQ ID NO: 56759 - RNA, 1410 nt, Artificial Sequence; identical to SEQ ID NO: 55865
  derived and/or modified CDS sequence (wt) from neuraminidase__InfluenzaA__AHL95904

SEQ ID NO: 56760 - RNA, 1410 nt, Artificial Sequence
  derived and/or modified CDS sequence (wt) from neuraminidase__InfluenzaA__AHL95916
augaauccaaaucaaaagauaauaacgauuggcucuguuucucucaccauuuccacaauaugcuucuucaugcaaauugccaucuugauaacuacuguaacauugcauuucaagcaauaugaauuaaacucccccccaaacaaccaagugaugcugugugaaccaacaauaauagaaagaaacauaacagagauaguguaucugaccaacaccaccauagagaaggaaauaugccccaaaccagcagaauacagaaauuggucaaaaccgcaauguggcauuacaggauuugcaccuuucucuaaggacaauucgauuaggcuuuccgcugguggggacaucugggugacaagagaaccuuaugugucaugcgauccugacaaguguuaucaauuugcccuuggacagggaacaacacuaaacaacgugcauucaaauaacacaguacgugauaggaccccuuaucggacucuauugaugaaugaguuggguguuccuuuucaucuggggaccaagcaagugugcauagcaugguccagcucaaguugucacgauggaaaagcauggcugcauguuugcauaacgggggaugauaaaaaugcaacugcuagcuucauuuacaaugggaggcuuguagauaguguuguuucaugguccaaagaaauucucaggacccaggagucagaaugcguuuguaucaauggaacuuguacaguaguaaugacugauggaagugcuucaggaaaagcugauacuaaaauacuauucauugaggagggaaaaaucguucauacuagcacauugucaggaagugcucagcaugucgaagagugcucuugcuauccucgauauccuggugucagaugugucugcagagacaacuggaaaggcuccaaucggcccaucguagauauaaacauaaaggaucauagcauuguuuccaguuauguguguucaggacuuguuggagacacacccagaaaaaacgacagcuccagcaguagccauuguuuggauccuaacaaugaagaagguggucauggagugaaaggcugggccuuugaugauggaaaugacguguggaugggaagaacaaucaacgagacgucacgcuuaggguaugaaaccuucaaagucauugaaggcugguccaacccuaaguccaaauugcagauaaauaggcaagucauaguugacagaggugauagguccgguuauucugguauuuucucuguugaaggcaaaagcugcaucaaucggugcuuuuauguggagcugauuaggggaagaaaagaggaaacugaagucuuguggaccucaaacaguauuguuguguuuuguggcaccucagguacauauggaacaggcucauggccugauggggcggaccucaaucucaugccuauauaa

SEQ ID NO: 56761 - RNA, 1410 nt, Artificial Sequence; identical to SEQ ID NO: 55895
  derived and/or modified CDS sequence (wt) from neuraminidase__InfluenzaA__AHL95928

SEQ ID NO: 56762 - RNA, 1410 nt, Artificial Sequence; identical to SEQ ID NO: 55883
  derived and/or modified CDS sequence (wt) from neuraminidase__InfluenzaA__AHL95940

SEQ ID NO: 56763 - RNA, 1410 nt, Artificial Sequence
  derived and/or modified CDS sequence (wt) from neuraminidase__InfluenzaA__AHL95952
augaauccaaaucaaaagauaauaacgauuggcucuguuucucucaccauuuccacaauaugcuucuucaugcaaauugccaucuugauaacuacuguaacauugcauuucaagcaauaugaauucaacucccccccaaacaaccaagugaugcugugugaaccaacaauaauagaaagaaacauaacagagauaguguaucugaccaacaccaccauagagaaggaaauaugccccaagccagcagaauacagaaauuggucaaagccgcaauguggcauuaccggauuugcaccuuucucuaaggacaauucgauuaggcuuuccgcugguggggacaucugggugacaagagaaccuuaugugucaugcgauccugacaaguguuaucaauuugcccuuggacagggaacaacacuaaacaacgugcauucaaauaacacaguacgugauaggaccccuuaucggacucuauugaugaaugaguuggguguuccuuuucaccuggggaccaagcaagugugcauagcaugguccagcucaaguugucacgauggaaaagcauggcugcauguuuguauaacgggggaugauaaaaaugcaacugcuagcuucauuuacaaugggaggcuuguagauaguguuguuucaugguccaaagaaauucucaggacccaggagucagaauguguuuguaucaauggaacuuguacaguaguaaugacugauggaagugcuucaggaaaagcugauacuaaaauacuauucauugaggaggggaaaaucguucauacuagcacauugucaggaagugcucagcaugucgaagagugcucuugcuauccucgauauccuggugucagaugugucugcagagacaacuggaaaggcuccaaucggcccaucguagauauaaacauaaaggaucauagcauuguuuccaguuauguguguucaggacuuguuggagacacacccagaaaaaacgacagcuccagcaguagccauuguuuggauccuaacaaugaagaagguggucauggagugaaaggcugggccuuugaugauggaaaugacguguggaugggaagaacaaucaacgagacgucacgcuuaggguaugaaaccuucaaagucauugaaggcugguccaacccuaaguccaaauugcagauaaauaggcaagucauaguugacagaggugauagguccgguuauucugguauuuucucuguugaaggcaaaagcugcaucaaucggugcuuuuauguggaguugauuaggggaagaaaagaggaaacugaagucuuguggaccucaaacaguauuguuguguuuuguggcaccucagguacauauggaacaggcucauggccugauggggcggaccucaaucucaugccuauauaa

SEQ ID NO: 56764 - RNA, 1410 nt, Artificial Sequence; identical to SEQ ID NO: 55880
  derived and/or modified CDS sequence (wt) from neuraminidase__InfluenzaA__AHL95964

SEQ ID NO: 56765 - RNA, 1410 nt, Artificial Sequence; identical to SEQ ID NO: 55880
  derived and/or modified CDS sequence (wt) from neuraminidase__InfluenzaA__AHL95976

SEQ ID NO: 56766 - RNA, 1410 nt, Artificial Sequence
  derived and/or modified CDS sequence (wt) from neuraminidase__InfluenzaA__AHL95988
augaauccaaaucaaaagauaauaacgauuggcucuguuucucucaccauuuccacaauaugcuucuucaugcaaauugccaucuugauaacuacuguaacauugcauuucaagcaauaugaauucaacucccccccaaacaaccaagugaugcugugugaaccaacaauaauagaaagaaacauaacagagauaguguaucugaccaacaccaccauagagaaggaaauaugccccaaaccagcagaauacagaaauuggucaaaaccgcaauguggcauuacaggauuugcaccuuucucuaaggacaauucgauuaggcuuuccgcugguggggacaucugggugacaagagaaccuuaugugucaugcgaucccgacaaguguuaucaauuugcccuuggacagggaacaacacuaaacaacgugcauucaaauaacacaguacgugauaggaccccuuaucggacucuauugaugaaugaguuggguguuccuuuucaucuggggaccaagcaaguaugcauagcaugguccagcucaaguugucacgauggaaaagcauggcugcauguuuguauaacgggggaugauaaaaaugcaacugcuagcuucauuuacaaugggaggcuuguagauaguguuguuucaugguccaaagaaauucucaggacccaggagucagaaugcguuuguaucaauggaacuuguacaguaguaaugacugauggaagugcuucaggaaaagcugauacuaaaauacuauucauugaggaggggaaaaucguucauacuagcacauugucaggaagugcucagcaugucgaagagugcucuugcuauccucgauauccuggugucagaugugucugcagagacaacuggaaaggcuccaaucggcccaucguagauauaaacauaaaggaucauagcauuguuuccaguuauguguguucaggacuuguuggagacacacccagaaaaaacgacagcuccagcaguagccauuguuuggauccuaacaaugaagaagguggucauggagugaaaggcugggccuuugaugauggaaaugacguguggaugggaagaacaaucaacgagacgucacgcuuaggguaugaaaccuucaaagucauugaaggcugguccaacccuaaguccaaauugcagauaaauaggcaagucauaguugacagaggugauagguccgguuauucugguauuuucucuguugaaggcaaaagcugcaucaaucggugcuuuuauguggaguugauuaggggaagaaaagaggaaacugaagucuuguggaccucaaacaguauuguuguguuuuguggcaccucagguacauauggaacaggcucauggccugauggggcggaccucaaucucaugccuauauaa

SEQ ID NO: 56767 - RNA, 1410 nt, Artificial Sequence; identical to SEQ ID NO: 55880
  derived and/or modified CDS sequence (wt) from neuraminidase__InfluenzaA__AHL96000

SEQ ID NO: 56768 - RNA, 1410 nt, Artificial Sequence
  derived and/or modified CDS sequence (wt) from neuraminidase__InfluenzaA__AHL96012
augaauccaaaucaaaagauaauaacgauuggcucuguuucucucaccauuuccacaauaugcuucuucaugcaaauugccaucuugauaacuacuguaacauugcauuucaagcaauaugaauucaacucccccccaaacaaccaagugaugcugugugaaccaacaauaauagaaagaaacauaacagagauaguguaucugaccaacaccaccauagagaaggaaauaugccccaaaccagcagaauacagaaauuggucaaaaccgcaauguggcauuacaggauuugcaccuuucucuaaggacaauucgauuagacuuuccgcugguggggacaucugggugacaagaguaccuuaugugucaugcgaucccgacaaguguuaucaauuugcccuuggacagggaacaacacuaaacaacgugcauucaaauaacacaguacgugauaggaccccuuaucggacucuauugaugaaugaguuggguguuccuuuucaucuggggaccaagcaagugugcauagcaugguccagcucaaguugucacgauggaaaagcauggcugcauguuuguauaacgggggaugauaaaaaugcaacugcuagcuucauuuacaaugggaggcuuguagauaguguuguuucaugguccaaagaaauucucaggacccaggagucagaaugcguuuguaucaauggaacuuguacaguaguaaugacugauggaagugcuucaggaaaagcugauacuaaaauacuauucauugaggaggggaaaaucguucauacuagcacauugucaggaagugcucagcaugucgaagagugcucuugcuauccucgauauccuggugucagaugugucugcagagacaacuggaaaggcuccaaucggcccaucguagauauaaacauaaaggaucauagcauuguuuccaguuauguguguucaggacuuguuggagacacacccagaaaaaacgacagcuccagcaguagccauuguuuggauccuaacaaugaagaagguggucauggagugaaaggcugggccuuugaugauggaaaugacguguggaugggaagaacaaucaacgagacgucacgcuuaggguaugaaaccuucaaagucauugaaggcugguccaacccuaaguccaaauugcagauaaauaggcaagucauaguugacagaggugauagguccgguuauucugguauuuucucuguugaaggcaaaagcugcaucaaucggugcuuuuauguggaguugauuaggggaagaaaagaggaaacugaagucuuguggaccucaaacaguauuguuguguuuuguggcaccucagguacauauggaacaggcucauggccugauggggcggaccucaaucucaugccuauauaa

SEQ ID NO: 56769 - RNA, 1410 nt, Artificial Sequence
  derived and/or modified CDS sequence (wt) from neuraminidase__InfluenzaA__AHL96024
augaauccaaaucaaaagauaauaacgauuggcucuguuucucucaccauuuccacaauaugcuucuucaugcaaauugccaucuugauaacuacuguaacauugcauuucaagcaauaugaauucaacucccccccaaacaaccaagugaugcugugugaaccaacaauaauagaaagaaacauaacagagauaguguaucugaccaacaccaccauagagaaggaaauaugccccaaaccagcagaauacagaaauuggucaaaaccgcaauguggcauuacaggauuugcaccuuucucuaaggacaauucgauuaggcuuuccgcugguggggacaucugggugacaagagaaccuuaugugucaugcgaucccgacaaguguuaucaauuugcccuuggacagggaacaacacuaaacaacgugcauucaaauaacacaguacgugauaggaccccuuaucggacucuauugaugaaugaguuggguguucccuuucaucuggggaccaagcaagugugcauagcaugguccagcucaaguugucacgauggaaaagcauggcugcauguuuguauaacgggggaugauaaaaaugcaacugcuagcuucauuuacaaugggaggcuuguagauaguguuguuucaugguccaaagaaaaucucaggacccaggagucagaaugcguuuguaucaauggaacuuguacaguaguaaugacugauggaagugcuucaggaaaagcugauacuaaaauacuauucauugaggaggggaaaaucguucauacuagcacauugucaggaagugcucagcaugucgaagagugcucuugcuauccucgauauccuggugucagaugugucugcagagacaacuggaaaggcuccaaucggcccaucguagauauaaacauaaaggaucauagcauuguuuccaguuauguguguucaggacuuguuggagacacacccagaaaaaacgacagcuccagcaguagccauuguuuggauccuaacaaugaagaagguggucauggagugaaaggcugggccuuugaugauggaaaugacguguggaugggaagaacaaucaacgagacgucacgcuuaggguaugaaaccuucaaagucauugaaggcugguccaacccuaaguccaaauugcagauaaauaggcaagucauaguugacagaggugauagguccgguuauucugguauuuucucuguugaaggcaaaagcugcaucaaucggugcuuuuauguggaguugauuaggggaagaaaagaggaaacugaagucuuguggaccucaaacaguauuguuguguuuuguggcaccucagguacauauggaacaggcucauggccugauggggcggaccucaaucucaugccuauauaa

SEQ ID NO: 56770 - RNA, 1410 nt, Artificial Sequence; identical to SEQ ID NO: 55952
  derived and/or modified CDS sequence (wt) from neuraminidase__InfluenzaA__AHL96036

SEQ ID NO: 56771 - RNA, 1410 nt, Artificial Sequence; identical to SEQ ID NO: 55813
  derived and/or modified CDS sequence (wt) from neuraminidase__InfluenzaA__AHL96048

SEQ ID NO: 56772 - RNA, 1410 nt, Artificial Sequence; identical to SEQ ID NO: 55865
  derived and/or modified CDS sequence (wt) from neuraminidase__InfluenzaA__AHL96059

SEQ ID NO: 56773 - RNA, 1410 nt, Artificial Sequence; identical to SEQ ID NO: 56714
  derived and/or modified CDS sequence (wt) from neuraminidase__InfluenzaA__AHL96071

SEQ ID NO: 56774 - RNA, 1410 nt, Artificial Sequence
  derived and/or modified CDS sequence (wt) from neuraminidase__InfluenzaA__AHL96083
augaauccaaaucaaaagauaauaacgauuggcucuguuucucucaccauuuccacaauaugcuucuucaugcaaauugccaucuugauaacuacuguaacauugcauuucaagcaauaugaauucaacucccccccaaacaaccaagugaugcugugugaaccaacaauaauagaaagaaacauaacagagauaguguaucugaccaacaccaccauagagaaggaaauaugccccaaaccagcagaauacagaaauuggucaaaaccgcaauguggcauuacaggauuugcaccuuucucuaaggacaauucgauuaggcuuuccgcugguggggacaucugggugacaagagaaccuuaugugucaugcgaucccgacaaguguuaucaauuugcccuuggacagggaacaacacuaaacaacgugcauucaaauaacacaguacgugauaggaccccuuaucggacucuauugaugaaugagcuggguguuccuuuucaucuggggaccaagcaagugugcauagcaugguccagcucaaguugucacgauggaaaagcauggcugcauguuuguauaacgggggaugauaaaaaugcaacugcuagcuucauuuacaaugggaggcuuguagauaguguuguuucaugguccaaagaaauucucaggacccaggagucagaaugcguuuguaucaauggaacuuguacaguaguaaugacugauggaagugcuucaggaaaagcugauacuaaaauacuauucauugaggaggggaaaaucguucauacuagcacauugucaggaagugcucagcaugucgaagagugcucuugcuauccucgauauccuggugucagaugugucugcagagacaacuggaaaggcuccaaucggcccaucguagauauaaacauaaaggaucauagcauuguuuccaguuauguguguucaggacuuguuggagacacacccagaaaaaacgacaucuccagcaguagccauuguuuggauccuaacaaugaagaagguggucauggagugaaaggcugggccuuugaugauggaaaugacguguggaugggaagaacaaucaacgagacgucacgcuuaggguaugaaaccuucaaagucauugaaggcugguccaacccuaaguccaaauugcagauaaauaggcaagucauaguugacagaggugauagguccgguuauucugguauuuucucuguugaaggcaaaagcugcaucaaucggugcuuuuauguggaguugauuaggggaagaaaagaggaaacugaagucuuguggaccucaaacaguauuguuguguuuuguggcaccucagguacauauggaacaggcucauggccugauggggcggaccucaaucucaugccuauauaa

SEQ ID NO: 56775 - RNA, 1410 nt, Artificial Sequence; identical to SEQ ID NO: 55865
  derived and/or modified CDS sequence (wt) from neuraminidase__InfluenzaA__AHL96095

SEQ ID NO: 56776 - RNA, 1410 nt, Artificial Sequence
  derived and/or modified CDS sequence (wt) from neuraminidase__InfluenzaA__AHL96107
augaauccaaaucaaaagauaauaacgauuggcucuguuucucucaccauuuccacaauaugcuucuucaugcaaauugccaucuugauaacuacuguaacauugcauuucaagcaauaugaauucaacucccccccaaacaaccaagugaugcugugugaaccaacaauaauagaaagaaacauaacagagauaguguauuugaccaacaccaccauagagaaggaaauaugccccaaaccagcagaauacagaaauuggucaaaaccgcaauguggcauuacaggauuugcaccuuucucuaaggacaauucgauuaggcuuuccgcugguggggacaucugggugacaagagaaccuuaugugucaugcgauccugacaaguguuaucaauuugcccuuggacagggaacaacacuaaacaacaugcauucaaauaacacaguacgugauaggaccccuuaucggacucuauugaugaaugaguuggguguuccuuuucaucuggggaccaagcaagugugcauagcaugguccagcucaaguugucacgauggaaaagcauggcugcauguuuguauaacgggggaugauaaaaaugcaacugcuagcuucauuuacaaugggaggcuuguagauaguguuguuucaugguccaaagaaauucucaggacccaggagucagaaugcguuuguaucaauggaacuuguacaguaguaaugacugauggaagugcuucaggaaaagcugauacuaaaauauuauucauugaggaggggaaaaucguucauacuagcacauugucaggaagugcucagcaugucgaagagugcucuugcuauccucgauauccuggugucagaugugucugcagagacaacuggaaaggcuccaaucggcccaucguagauauaaacauaaaggaucauagcauugucuccaguuauguguguucaggacuuguuggagacacacccagaaaaaacgacaacuccagcaguagccauuguuuggauccuaacaaugaagaagguggucauggagugaaaggcugggccuuugaugauggaaaugacguguggaugggaagaacaaucaacgagacgucacgcuuaggguaugaaaccuucaaagucauugaaggcugguccaacccuaaguccaaauugcagauaaauaggcaagucauaguugacagaggugauagguccgguuauucugguauuuucucuguugaaggcaaaagcugcaucaaucggugcuuuuauguggaguugauuaggggaagaaaagaggaaacugaagucuuguggaccucaaacaguauuguuguguuuuguggcaccucagguacauauggaacaggcucauggccugauggggcggaccucaaucucaugccuauauaa

SEQ ID NO: 56777 - RNA, 1410 nt, Artificial Sequence; identical to SEQ ID NO: 55337
  derived and/or modified CDS sequence (wt) from neuraminidase__InfluenzaA__AHL96119

SEQ ID NO: 56778 - RNA, 1410 nt, Artificial Sequence; identical to SEQ ID NO: 56714
  derived and/or modified CDS sequence (wt) from neuraminidase__InfluenzaA__AHL96131

SEQ ID NO: 56779 - RNA, 1410 nt, Artificial Sequence
  derived and/or modified CDS sequence (wt) from neuraminidase__InfluenzaA__AHL96143
augaauccaaaucaaaagauaauaacgauuggcucuguuucucucaccauuuccacaauaugcuucuucaugcaaauugccaucuugauaacuacuguaacauugcauuucaagcaauaugaauucaacucccccccaaacaaccaagugaugcugugugaaccaacaauaauagaaaggaacauaacagagauaguguaucugaccaacaccaccauagagaaggaaauaugccccaaaccagcagaauacagaaauuggucaaaaccgcaauguggcauuacaggauuugcaccuuucucuaaggacaauucgauuaggcuuuccgcugguggggacaucugggugacaagagaaccuuaugugucaugcgauccugacaaguguuaucaauuugcccuuggacagggaacaacacuaaacaacgugcauucaaauaacacaguacgugauaggaccccuuaucggacucuauugaugaaugaguuggguguuccuuuucaucuggggaccaagcaagugugcauagcaugguccagcucaaguugucacgauggaaaagcauggcugcauguuuguauaacgggggaugauaaaaaugcaacugcuagcuucauuuacaaugggaggcuuguagauaguguuguuucaugguccaaagaaauucucaggacccaggagucagaaugcguuuguaucaauggaacuuguacaguaguaaugacugauggaagugcuucaggaaaagcugauacuaaaauacuauucauugaggaggggaaaaucguucauacuagcacauugucaggaagugcucagcaugucgaagagugcucuugcuauccucgauauccuggugucagaugugucugcagagacaacuggaaaggcuccaaucggcccaucguagauauaaacauaaaggaucauagcauuguuuccaguuauguguguucaggacuuguuggagacacacccagaaaaaacgacagcuccagcaguagccauuguuuggauccuaacaaugaagaagguggucauggagugaaaggcugggccuuugaugauggaaaugacguguggaugggaagaacaaucaacgagacaucacgcuuaggguaugaaaccuucaaagucauugaaggcugguccaauccuaaguccaaauugcagauaaauaggcaagucauaguugacagaggugauagguccgguuauucugguauuuucucuguugaaggcaaaagcugcaucaaucggugcuuuuauguagaguugauuaggggaagaaaagaggaaacugaagucuuguggaccucaaacaguauuguuguguuuuguggcaccucagguacauauggaacaggcucauggccugauggggcggaccucaaucucaugccuauauaa

SEQ ID NO: 56780 - RNA, 1410 nt, Artificial Sequence; identical to SEQ ID NO: 55865
  derived and/or modified CDS sequence (wt) from neuraminidase__InfluenzaA__AHL96167

SEQ ID NO: 56781 - RNA, 1410 nt, Artificial Sequence; identical to SEQ ID NO: 55865
  derived and/or modified CDS sequence (wt) from neuraminidase__InfluenzaA__AHL96179

SEQ ID NO: 56782 - RNA, 1410 nt, Artificial Sequence
  derived and/or modified CDS sequence (wt) from neuraminidase__InfluenzaA__AHL96191
augaauccaaaucaaaagauaauaacgauuggcucuguuucucucaccauuuccacaauaugcuucuucaugcaaauugccaucuugauaacuacuguaacauugcauuucaagcaauaugaauucgacucccccccaaacaaccaagugaugcugugugaaccaacaauaauagaaagaaacauaacagagauaguguaucugaccaacaccaccauagagaaggaaauaugccccaaaccagcagaauacagaaauuggucaaaaccgcaauguggcauuacaggauuugcaccuuucucuaaggacaauucgauuaggcuuuccgcugguggggacaucugggugacaagagaaccuuaugugucaugcgauccugacaaguguuaucaauuugcccuuggacagggaacaacacuaaacaacaugcauucaaauaacacaguacgugauaggaccccuuaucggacucuauugaugaaugaguuggguguuccuuuucaucuggggaccaagcaagugugcauagcaugguccagcucaaguugucacgauggaaaagcauggcugcauguuuguauaacgggggaugauaaaaaugcaacugcuagcuucauuuacaaugggaggcuuguagauaguguuguuucaugguccaaagaaauucucaggacccaggagucagaaugcguuuguaucaauggaacuuguacaguaguaaugacugauggaagugcuucaggaaaagcugauacuaaaauacuauucauugaggaggggaaaaucguucauacuagcacauugucaggaagugcucagcauguugaagagugcucuugcuauccucgauauccuggugucagaugugucugcagagacaacuggaaaggcuccaaucggcccaucguagauauaaacauaaaggaucauagcauuguuuccaguuauguguguucaggacuuguuggagacacacccagaaaaaacgacagcuccagcaguagccauuguuuggauccuaacaaugaagaagguggucauggagugaaaggcugggccuuugaugauggaaaugacguguggaugggaagaacaaucaacgagacgucacgcuuaggguaugaaaccuucaaagucauugaaggcugguccaacccuaaguccaaauugcagauaaauaggcaagucauaguugacagaggugauagguccgguuauucugguauuuucucuguugaaggcaaaagcugcaucaaucggugcuuuuauguggaguugauuaggggaagaaaagaggaaacugaagucuuguggaccucaaacaguauuguuguguuuuguggcaccucagguacauauggaacaggcucauggccugauggggcggaccucaaccucaugccuauauaa

SEQ ID NO: 56783 - RNA, 1410 nt, Artificial Sequence
  derived and/or modified CDS sequence (wt) from neuraminidase__InfluenzaA__AHL96203
augaauccaaaucaaaagauaauaacgauuggcucuguuucucucaccauuuccacaauaugcuucuucaugcaaauugccaucuugauaacuacuguaacauugcauuucaagcaauaugaauucgacucccccccaaacaaccaagugaugcugugugaaccaacaauaauagaaagaaacauaacagagauaguguaucugaccaacaccaccauagagaaggaaauaugccccaaaccagcagaauacagaaauuggucaaaaccgcaauguggcauuacaggauuugcaccuuucucuaaggacaauucgauuaggcuuuccgcugguggggacaucugggugacaagagaaccuuaugugucaugcgauccugacaaguguuaucaauuugcccuuggacagggaacaacacuaaacaacgugcauucaaauaacacaguacgugauaggaccccuuaucggacucuauugaugaaugaguuggguguuccuuuucaucuggggaccaagcaagugugcauagcaugguccagcucaaguugucacgauggaaaagcauggcugcauguuuguauaacgggggaugauaaaaaugcaacugcuagcuucauuuacaaugggaggcuuguagauaguguuguuucaugguccaaagaaauucucaggacccaggagucagaaugcguuuguaucaauggaacuuguacaguaguaaugacugauggaagugcuucaggaaaagcugauacuaaaauacuauucauugaggaggggaaaaucguucauacuagcacauugucaggaagugcucagcauguugaagagugcucuugcuauccucgauauccuggugucagaugugucugcagagacaacuggaaaggcuccaaucggcccaucguagauauaaacauaaaggaucauagcauuguuuccaguuauguguguucaggacuuguuggagacacacccagaaaaaacgacagcuccagcaguagccauuguuuggauccuaacaaugaagaagguggucauggagugaaaggcugggccuuugaugauggaaaugacguguggaugggaagaacaaucaacgagacgucacgcuuaggguaugaaaccuucaaagucauugaaggcugguccaacccuaaguccaaauugcagauaaauaggcaagucauaguugacagaggugauagguccgguuauucugguauuuucucuguugaaggaaaaagcugcaucaaucggugcuuuuauguggaguugauuaggggaagaaaagaggaaacugaaguuuuguggaccucaaacaguauuguuguguuuuguggcaccucagguacauauggaacaggcucauggccugauggggcggaccucaaccucaugccuauauaa

SEQ ID NO: 56784 - RNA, 1410 nt, Artificial Sequence
  derived and/or modified CDS sequence (wt) from neuraminidase__InfluenzaA__AHL96215
augaauccaaaucaaaagauaauaacgauuggcucuguuucucucaccauuuccacaauaugcuucuucaugcaaauugccaucuugauaacuacuguaacauugcauuucaagcaauaugaauucaacucccccccaaacaaccaagugaugcugugugaaccaacaauaauagaaagaaacauaacagagauaguguauuugaccaacaccaccauagagaaggaaauaugccccaaaccagcagaauacagaaauuggucaaaaccgcaauguggcauuacaggauuugcaccuuucucuaaggacaauucgauuaggcuuuccgcugguggggacaucugggugacaagagaaccuuaugugucaugcgauccugacaaguguuaucaauuugcccuuggacagggaacaacacuaaacaacaugcauucaaauaacacaguacgugauaggaccccuuaucggacucuauugaugaaugaguuggguguuccuuuucaucuggggaccaagcaagugugcauagcaugguccagcucaaguugucacgauggaaaagcauggcugcauguuuguauaacgggggaugauaaaaaugcaacugcuagcuucauuuacaaugggaggcuuguagauaguguuguuucaugguccaaagaaauucucaggacccaggagucagaaugcguuuguaucaauggaacuuguacaguaguaaugacugauggaagugcuucaggaaaagcugauacuaaaauauuauucauugaggaggggaaaaucguucauacuagcacauugucaggaagugcucagcaugucgaagagugcucuugcuauccucgauauccuggugucagaugugucugcagagacaacuggaaaggcuccaaucggcccaucguagauauaaacauaaaggaucauagcauugucuccaguuauguguguucaggacuuguuggagacacacccagaaaaaacgacagcuccagcaguagccauuguuuggaucccaacaaugaagaagguggucauggagugaaaggcugggccuuugaugauggaaaugacguguggaugggaagaacaaucaaugagacgucacgcuuaggguaugaaaccuucaaagucauugaaggcugguccaacccuaaguccaaauugcagauaaauaggcaagucauaguugacagaggugauagguccgguuauucugguauuuucucuguugaaggcaaaagcugcaucaaucggugcuuuuauguggaguugauuaggggaagaaaagaggaaacugaagucuuguggaccucaaacaguauuguuguguuuuguggcaccucagguacauauggaacaggcucauggccugauggggcggaccucaaucucaugccuauauaa

SEQ ID NO: 56785 - RNA, 1410 nt, Artificial Sequence
  derived and/or modified CDS sequence (wt) from neuraminidase__InfluenzaA__AHL96227
augaauccaaaucaaaagauaauaacgauuggcucuguuucucucaccauuuccacaauaugcuucuucaugcaaauugccaucuugauaacuacuguaacauugcauuucaagcaauaugaauucaacucccccccaaacaaccaagugaugcugugugaaccaacaauaauagaaagaaacauaacagagauaguguaucugaccaacaccaccauagagaaggaaauaugccccaaaccagcagaauacagaaauuggucaaagccgcaauguggcauuacaggauuugcaccuuucucuaaggacaauucgauuaggcuuuccgcugguggggacaucugggugacaagagaaccuuaugugucaugcgauccugacaaguguuaucaauuugcccuuggacagggaacaacacuaaacaacgugcauucaaauaacacaguacgugauaggaccccuuaucggacucuauugaugaaugaguuggguguuccuuuucaucuggggaccaagcaagugugcauagcaugguccagcucaaguugucacgauggaaaagcauggcugcauguuuguauaacgggggaugauaaaaaugcaacugcuagcuucauuuacaaugggaggcuuguagauaguguuguuucaugguccaaagaaauucucaggacccaggagucagaaugcguuuguaucaauggaacuuguacaguaguaaugacugauggaagugcuucaggaaaagcugauacuaaaauacuauucauugaggaggggaaaaucguucauacuagcacauugucaggaagugcucagcaugucgaagagugcucuugcuauccucgauauccuggugucagaugugucugcagagacaacuggaaaggcuccaaucggcccaucguagacauaaacauaaaggaucauagcauuguuuccaguuauguguguucaggacuuguuggagacacacccagaaaaaacgacagcuccagcagcagccauuguuuggauccuaacaaugaagaagguggucauggagugaaaggcugggccuuugaugauggaaaugacguguggaugggaagaacaaucaacgagacgucacgcuuaggguaugaaaccuucaaagucauugaaggcugguccaacccuaaguccaaauugcagauaaauaggcaagucauaguugacagaggugauagguccgguuauucugguauuuucucuguugaaggcaaaagcugcaucaaucggugcuuuuauguggaguugauuaggggaagaaaagaggaaacugaagucuuguggaccucaaacaguauuguuguguuuuguggcaccucagguacauauggaacaggcucauggccugauggggcggaccucaaucucaugccuauauaa

SEQ ID NO: 56786 - RNA, 1410 nt, Artificial Sequence
  derived and/or modified CDS sequence (wt) from neuraminidase__InfluenzaA__AHL96239
augaauccaaaucaaaagauaauaacgauuggcucuguuucucucaccauuuccacaauaugcuucuucaugcaaauugccaucuugauaacuacuguaacauugcauuucaagcaauaugaauucaacucccccccaaacaaccaagugaugcugugugaaccaacaauaauagaaagaaacauaacagagauaguguaucugaccaacaccaccauagagaaggaaauaugccccaaaccagcagaauacagaaauuggucaaaaccgcaauguggcauuacaggauuugcaccuuucucuaaggacaauucgauuaggcuuuccgcugguggggacaucugggugacaagagaaccuuaugugucaugcgauccugacaaguguuaucaauuugcccuuggacagggaacaacacuaaacaacgugcauucaaauaacacaguacgugauaggaccccuuaucggacucuauugaugaaugaguuggguguuccuuuucaucuagggaccaagcaagugugcauagcaugguccagcucaaguugucacgauggaaaagcauggcugcauguuuguauaacgggggaugauaaaaaugcaacugcuagcuucauuuacaaugggaggcuuguagauaguguuguuucaugguccaaagaaauucucaggacccaggagucagaaugcguuuguaucaauggaacuuguacaguaguaaugacugauggaagugcuucaggaaaagcugauacuaaaauacuauucauugaggaggggaaaaucguucauacuagcacauugucaggaagugcucagcaugucgaagagugcucuugcuauccucgauauccuggugucagaugugucugcagagacaacuggaaaggcuccaaucggcccaucguagauauaaacauaaaggaucauagcauuguuuccaguuauguguguucaggacuuguuggagacacacccagaaaaaacgacagcuccagcaguagccauuguuuggauccuaacaaugaagaaggcggucauggagugaaaggcugggccuuugaugauggaaaugacguguggaugggaagaacaaucaacgagacgucacgcuuaggguaugaaaccuucaaagucauugaaggcugguccaauccuaaguccaaauugcagauaaauaggcaagucauaguugacagaggugauagguccgguuauucugguauuuucucuguugaaggcaaaagcugcaucaaucggugcuuuuauguagaguugauuaggggaagaaaagaggaaacugaagucuuguggaccucaaacaguauuguuguguuuuguggcaccucagguacauauggaacaggcucauggccugauggggcggaccucaaucucaugccuauauaa

SEQ ID NO: 56787 - RNA, 1410 nt, Artificial Sequence
  derived and/or modified CDS sequence (wt) from neuraminidase__InfluenzaA__AHL96251
augaauccaaaucaaaagauaauaacgauuggcucuguuucucucaccauuuccacaauaugcuucuucaugcaaauugccaucuugauaacuacuguaacauugcauuucaagcaauaugaauucaacucccccccaaacaaccaagugaugcugugugaaccaacaauaauagaaagaaacauaacagagauaguguaucugaccaacaccaccauagagaaggaaauaugccccaaaccagcagaauacagaaauuggucaaaaccgcaauguggcauuacaggauuugcaccuuucucuaaggacaauucgauuaggcuuuccgcugguggggacaucugggugacaagagaaccuuaugugucaugugauccugacaaguguuaucaauuugcccuuggacagggaacaacacuaaacaacgugcauucaaauaacacaguacgugauaggaccccuuaucggacucuauugaugaaugaguuggguguuccuuuucaucuggggaccaagcaagugugcauagcaugguccagcucaaguugucacgauggaaaagcauggcugcauguuuguauaacgggggaugauaaaaaugcaacugcuagcuucauuuacaaugggaggcuuguagauaguguuguuucaugguccaaagaaauucucaggacccaggagucagaaugcguuuguaucaauggaacuuguacaguaguaaugacugauggaagugcuucaggaaaagcugauacuaaaauacuauucauugaggaggggaaaaucguucauacuagcacauugucaggaagugcucagcaugucgaagagugcucuugcuauccucgauauccuggugucagaugugucugcagagacaacuggaaaggcuccaaucggcccaucguagauauaaacauaaaggaucauagcauuguuuccaguuauguguguucaggacuuguuggagacacacccagaaaaaacgacagcuccagcaguagccauuguuuggauccuaacaaugaagaagguggucauggagugaaaggcugggccuuugaugauggaaaugacguguggaugggaagaacaaucaacgagacgucacgcuuaggguaugaaaccuucaaagucauugaaggcugguccaauccuaaguccaaauugcagauaaauaggcaagucauaguugacagaggugauagguccgguuauucugguauuuucucuguugaaggcaaaagcugcaucaaucggugcuuuuauguagaguugauuaggggaagaaaagaggaaacugaagucuuguggaccucaaacaguauuguuguguuuuguggcaccucagguacauauggaacaggcucauggccugauggggcggaccucaaucucaugccuauauaa

SEQ ID NO: 56788 - RNA, 1410 nt, Artificial Sequence; identical to SEQ ID NO: 55877
  derived and/or modified CDS sequence (wt) from neuraminidase__InfluenzaA__AHL96263

SEQ ID NO: 56789 - RNA, 1410 nt, Artificial Sequence; identical to SEQ ID NO: 55939
  derived and/or modified CDS sequence (wt) from neuraminidase__InfluenzaA__AHL96277

SEQ ID NO: 56790 - RNA, 1410 nt, Artificial Sequence
  derived and/or modified CDS sequence (wt) from neuraminidase__InfluenzaA__AHL96308
augaauccaaaucaaaagauaauaacgauuggcucuguuucucucaccauuuccacaauaugcuucuucaugcaaauugccaucuugauaacuacuguaacauugcauuucaagcaauaugaauucaacuuccccccaaacaaccaagugaugcugugugaaccaacaauaauagaaagaaacauaacagagauaguguaucugaccaacaccaccauagagaaggaaauaugccccaaaccagcagaauacagaaauuggucaaaaccgcaauguggcauuacaggauuugcaccuuucucuaaggacaauucgauuaggcuuuccgcugguggggacaucugggugacaagagaaccuuaugugucaugcgauccugacaaguguuaucaauuugcccuuggacagggaacaacacuaaacaacgugcauucaaauaacacaguacgugauaggaccccuuaucggacucuauugaugagugaguuggguguuccuuuucaucuggggaccaagcaagugugcauagcaugguccagcucaaguugucacgauggaaaagcauggcugcauguuugcauaacgggggaugauaaaaaugcaacugcuagcuucauuuacaaugggaggcuuguagauaguguuguuucaugguccaaagaaauucucaggacccaggagucagaaugcguuuguaucaauggaacuuguacaguaguaaugacugauggaagugcuucaggaaaagcugauacuaaaauacuauucauugaggagggaaaaaucguucauacuagcacauugucaggaagugcucagcaugucgaagagugcucuugcuauccucgauauccuggugucagaugugucugcagagacaacuggaaaggcuccaaucggcccaucguagauauaaacauaaaggaucauagcauuguuuccaguuauguguguucaggacuuguuggagacacacccagaaaaaacgacagcuccagcaguagccauuguuuggauccuaacaaugaagaagguggucauggagugaaaggcugggccuuugaugauggaaaugacguguggaugggaagaacaaucaacgagacgucacgcuuaggguaugaaaccuucaaagucauugaaggcugguccaacccuaaguccaaauugcagauaaauaggcaagucauaguugacagaggugauagguccgguuauucugguauuuucucuguugaaggcaaaagcugcaucaaucggugcuuuuauguggaguugauuaggggaagaaaagaggaaacugaagucuuguggaccucaaacaguauuguuguguuuuguggcaccucagguacauauggaacaggcucauggccugauggggcggaccucaaucucaugccuauauaa

SEQ ID NO: 56791 - RNA, 1410 nt, Artificial Sequence; identical to SEQ ID NO: 55976
  derived and/or modified CDS sequence (wt) from neuraminidase__InfluenzaA__AHL96321

SEQ ID NO: 56792 - RNA, 1410 nt, Artificial Sequence
  derived and/or modified CDS sequence (wt) from neuraminidase__InfluenzaA__AHL96333
augaauccaaaucaaaagauaauaacgauuggcucuguuucucucaccauuuccacaauaugcuucuucaugcaaauugccaucuugauaacuacuguaacauugcauuucaagcaauaugaauucaacucccccccaaacaaccaagugaugcugugugaaccaacaauaauagaaagaaacauaacagagauaguguaucugaccaacaccaccauagagaaggaaauaugccccaaaccagcagaauacagaaauuggucaaaaccgcaauguggcauuacaggauuugcaccuuucucuaaggacaauucgauuaggcuuuccgcugguggggacaucugggugacaagagaaccuuaugugucaugcgauccugacaaguguuaucaauuugcccuuggacagggaacaacacuaaacaacgugcauucaaauaacacaguacgugauaggaccccuuaucggacucuauugaugaaugaguuggguguuccuuuucaucuggggaccaagcaagugugcauagcaugguccagcucaaguugucacgauggaaaagcauggcugcauguuugcauaacgggggaugauaaaaaugcaacugcuagcuucauuuacaaugggaggcuuguagauaguguuguuucaugguccaaagaaauucucaggacccaggagucagaaugcguuuguaucaauggaacuuguacaguaguaaugacugauggaagugcuucaggaaaagcugauacuaaaauacuauucauugaggagggaaaaaucguucauacuagcacauugucaggaagugcucagcaugucgaagagugcucuugcuauccucgauauccuggugucagaugugucugcagagacaacuggaaaggcuccaaucggcccaucguagacauaaacauaaaggaucauagcauuguuuccaguuauguguguucaggacuuguuggagacacacccagaaaaaacgacagcuccagcaguagccauuguuuggauccuaacaaugaagaagguggucauggagugaaaggcugggccuuugaugauggaaaugacguguggaugggaagaacaaucaacgagacgucacgcuuaggguaugaaaccuucaaagucauugaaggcugguccaacccuaaguccaaauugcagauaaauaggcaagucauaguugacagaggugauagguccgguuauucugguauuuucucuguugaaggcaaaagcugcaucaaucggugcuuuuauguggaguugauuaggggaaggaaagaggaaacugaagucuuguggaccucaaacaguauuguuguguuuuguggcaccucagguacauauggaacaggcucauggccugauggggcggaccucaaucucaugccuauauaa

SEQ ID NO: 56793 - RNA, 1410 nt, Artificial Sequence
  derived and/or modified CDS sequence (wt) from neuraminidase__InfluenzaA__AHL96345
augaauccaaaucaaaagauaauaacgauuggcucuguuucucucaccauuuccacaauaugcuucuucaugcaaauugccaucuugauaacuacuguaacauugcauuucaagcaauaugaauucaacucccccccaaacaaccaagugaugcugugugaaccaacaauaauagaaagaaacauaacagagauaguguaucuaaccaacaccaccauagagaaggaaauaugccccaaaccagcagaauacagaaauuggucaaaaccgcaauguggcauuacaggauuugcaccuuucucuaaggacaauucgauuaggcuauccgcugguggggacaucugggugacaagagaaccuuaugugucaugcgauccugacaaguguuaucaauuugcccuuggacagggaacaacacuaaacaacgugcauucaaauaacacaguacgugauaggaccccuuaucggacucuauugaugaaugaguuggguguuccuuuucaucuggggaccaagcaagugugcauagcaugguccagcucaaguugucacgauggaaaagcauggcugcauguuuguauaacgggggaugauaaaaaugcaacugcuagcuuuauuuacaaugggaggcuuguagauaguguuguuucaugguccaaagaaauucucaggacccaggagucagaaugcguuuguaucaauggaacuuguacaguaguaaugacugauggaagugcuucagggaaagcugauacuaaaauacuauucauugaggaggggaaaaucguucauacuagcacauugucaggaagugcucagcaugucgaagagugcucuugcuauccucgauauccuggugucagaugugucugcagagacaacuggaaaggcuccaaucggcccaucguagauauaaacauaaaggaucauagcauuguuuccaguuauguguguucaggacuuguuggagacacacccagaaaaaacgacaacuccagcaguagccauuguuuggauccuaacaaugaagaagguggucauggagugaaaggcugggccuuugaugauggaaaugacguguggaugggaagaacaaucaacgagacgucacgcuuaggguaugaaaccuucaaagucauugaaggcugguccaacccuaaguccaaauugcagauaaauaggcaggucauaguugacagaggugauagguccgguuauucugguauuuucucuguugaaggcaaaagcugcaucaaucggugcuuuuauguggaguugauuaggggaagaaaagaggaaacugaagucuuguggaccucaaacaguauuguuguguuuuguggcaccucagguacauauggaacaggcucauggccugauggggcggaccucaaucucaugccuauauaa

SEQ ID NO: 56794 - RNA, 1410 nt, Artificial Sequence; identical to SEQ ID NO: 55883
  derived and/or modified CDS sequence (wt) from neuraminidase__InfluenzaA__AHL96357

SEQ ID NO: 56795 - RNA, 1410 nt, Artificial Sequence; identical to SEQ ID NO: 55865
  derived and/or modified CDS sequence (wt) from neuraminidase__InfluenzaA__AHL96369

SEQ ID NO: 56796 - RNA, 1410 nt, Artificial Sequence; identical to SEQ ID NO: 55880
  derived and/or modified CDS sequence (wt) from neuraminidase__InfluenzaA__AHL96381

SEQ ID NO: 56797 - RNA, 1410 nt, Artificial Sequence; identical to SEQ ID NO: 55895
  derived and/or modified CDS sequence (wt) from neuraminidase__InfluenzaA__AHL96393

SEQ ID NO: 56798 - RNA, 1410 nt, Artificial Sequence
  derived and/or modified CDS sequence (wt) from neuraminidase__InfluenzaA__AHL96405
augaauccaaaucaaaagauaauaacgauuggcucuguuucucucaccauuuccacaauaugcuucuucaugcaaauugccaucuugauaacuacuguaacauugcauuucaagcaauaugaauucaacucccccccaaacaaccaagugaugcugugugaaccaacaauaauagaaagaaacauaacagagauaguguaucugaccaacaccaccauagagaaggaaauaugccccaaaccagcagaauacagaaauuggucaaaaccgcaauguggcauuacaggauuugcaccuuucucuaaggacaauucgauuaggcuuuccgcugguggggacaucugggugacaagagaaccuuaugugucaugcgauccugacaaguguuaucaauuugcccuuggacagggaacaacacuaaacaacgugcauucaaauaacacaguacgugauaggaccccuuaucggacucuauugaugaaugaguuggguguuccuuuucaucuggggacuaagcaagugugcauagcaugguccagcucaaguugucacgauggaaaagcauggcugcauguuuguauaacgggggaugauaaaaaugcaacugcuagcuucauuuacaaugggaggcuuguagauaguguuguuucaugguccaaagaaauucucaggacccaggagucagaaugcguuuguaucaauggaacuuguacaguaguaaugacugauggaagugcuucaggaaaagcugauacuaaaauacuauucauugaggaggggaaaaucguucauacuagcacauuaucaggaagugcucagcaugucgaagagugcucuugcuauccucgauauccuggugucagaugugucugcagagacaacuggaaaggcuccaaucggcccaucguagauauaaacauaaaggaucauagcauuguuuccaguuauguguguucaggacuuguuggagacacacccagaaaaaacgacagcuccagcaguagccauuguuuggguccuaacaaugaagaagguggucauggagugaaaggcugggccuuugaugauggaaaugacguguggaugggaagaacaaucaacgagacgucacgcuuaggguaugaaacauucaaagucauugaaggcugguccaauccuaaguccaaauugcagauaaauaggcaagucauaguugacagaggugauagguccgguuauucugguauuuucucuguugaaggcaaaagcugcaucaaucggugcuuuuauguagaguugauuaggggaagaaaagaggaaacugaagucuuguggaccucaaacaguauuguuguguuuuguggcaccucagguacauauggaacaggcucauggccugauggggcggaccucaaucucaugccuauauaa

SEQ ID NO: 56799 - RNA, 1410 nt, Artificial Sequence
  derived and/or modified CDS sequence (wt) from neuraminidase__InfluenzaA__AHL96417
augaauccaaaucaaaagauaauaacgauuggcucuguuucucucaccauuuccacaauaugcuucuucaugcaaauugccaucuugauaacuacuguaacauugcauuucaagcaauaugaauucaacucccccccaaacaaccaagugaugcugugugaaccaacaauaauagaaagaaacauaacagagauaguguaucugaccaacaccaccauagagaaggaaauaugccccaaaccagcagaauacagaaauuggucaaaaccgcaauguggcauuacaggauuugcaccuuucucuaaggacaauucgauuaggcuuuccgcugguggggacaucugggugacaagagaaccuuaugugucaugcgaucccgacaaguguuaucaauuugcccuuggacagggaacaacacuaaacaacgugcauucaaauaacacaguacgugauaggaccccuuaucggacucuauugaugaaugaguuggguguuccuuuucaucuggggaccaagcaagugugcauagcaugguccagcucaaguugucacgauggaaaagcauggcugcauguuuguauaacgggggaugauaaaaaugcaacugcuagcuucauuuacaaugggaggcuuguagauaguguuguuucaugguccaaagaaauucucaggacccaggagucagaaugcguuuguaucaauggaacuuguacaguaguaaugacugauggaagugcuucaggaaaagcugauacuaaaauacuauucauugaggaggggaaaaucguucauacuagcacauugucaggaagugcucagcaugucgaggagugcucuugcuauccucgauauccuggugucagaugugucugcagagacaacuggaaaggcuccaaucggcccaucguagauauaaacauaaaggaucauagcauuguuuccaguuauguguguucaggacuuguuggagacacacccagaaaaaacgacagcuccagcaguagccauuguuuggauccuaacaaugaagaagguggucauggagugaaaggcugggccuuugaugauggaaaugacguguggaugggaagaacaaucaacgagacgucacgcuuaggguaugaaaccuucaaagucauugaaggcugguccaacccuaaguccaaauugcagauaaauaggcaagucauaguugacagaggugauagguccgguuauucugguauuuucucuguugaaggcaaaagcugcaucaaucggugcuuuuauguggaguugauuaggggaagaaaagaggaaacugaagucuuguggaccucaaacaguauuguuguguuuuguggcaccucagguacauauggaacaggcucauggccugauggggcggaccucaaucucaugccuauauaa

SEQ ID NO: 56800 - RNA, 1410 nt, Artificial Sequence; identical to SEQ ID NO: 55865
  derived and/or modified CDS sequence (wt) from neuraminidase__InfluenzaA__AHL96429

SEQ ID NO: 56801 - RNA, 1410 nt, Artificial Sequence
  derived and/or modified CDS sequence (wt) from neuraminidase__InfluenzaA__AHL96441
augaauccaaaucaaaagauaauaacgauuggcucuguuucucucaccauuuccacaauaugcuucuucaugcaaauugccaucuugauaacuacuguaacauugcauuucaagcauuaugaauucaacucccccccaaacaaccaagugaugcugugugaaccaacaauaauagaaagaaacauaacagagauaguguaucuaaccaacaccaccauagagaaggaaauaugccccaaaccagcagaauacagaaauuggucaaagccgcagugugacauuacaggauuugcaccuuuuucuaaggacaauucgauuaggcuuuccgcugguggggacaucugggugacaagagaaccuuaugugucaugcgauccugacaaauguuaucaauuugcucuuggacagggaacaacacuaaacaacgugcauucaaauaacacaguacgugauaggaccccuuaucggacccuauugaugaaugaguuagguguuccuuuucaucuggggaccaagcaagugugcauagcaugguccagcucaaguugucacgauggaaaagcauggcugcauguuuguauaacgggggaugauaaaaaugcaacugcuagcuucauuuacaaugggaggcuuguagauaguguuguuucaugguccaaagaaauccucaggacccaggagucagaaugcguuuguaucaauggaacuuguacaguaguaaugacugaugggagugcuucaggaaaagcugauacuaaaauacuauucauugaggaggggaaaaucguucauacuagcacauugucaggaagugcucagcaugucgaggagugcucuugcuauccucgauauccuggugucagaugugucugcagagacaacuggaaaggcuccaauaggccuaucguagauauaaacauaaaggaucauagcauuguuuccagguauguguguucaggacuuguuggagacacacccagaaaaaacgacagcuccagcaguagccauuguuugaauccuaacaaugaagaagguggucauggagugaaaggcugggccuucgaugauggaaaugacguguggaugggaagaacgaucaacgagacgucacguuuaggguaugaaaccuucaaagucauugaaggcugguccaacccuaaguccaaauugcagauaaauaggcagaucauaguugacagaggugauagguccgguuauucugguauuuucucuguugaaggcaaaagcugcaucaaucggugcuuuuauguggaguugauuagaggaagaaaagaggaaaccgaagucuuguggaccucaaacaguauuguuguguuuuguggcaccucagguacauauggaacaggcucauggccugauggggcggaccucaaucucaugccuauauaa

SEQ ID NO: 56802 - RNA, 1410 nt, Artificial Sequence; identical to SEQ ID NO: 55880
  derived and/or modified CDS sequence (wt) from neuraminidase__InfluenzaA__AHL96453

SEQ ID NO: 56803 - RNA, 1410 nt, Artificial Sequence; identical to SEQ ID NO: 55865
  derived and/or modified CDS sequence (wt) from neuraminidase__InfluenzaA__AHL96465

SEQ ID NO: 56804 - RNA, 1410 nt, Artificial Sequence
  derived and/or modified CDS sequence (wt) from neuraminidase__InfluenzaA__AHL96477
augaauccaaaccaaaagauaauaaccauugguucggucuguaugacaauuggaauggcuaacuuaauauuacaaauuggaaacauaaucucaauauggauuagccacucaauucaaguugggaaucaaagucagauugaaacaugcaaucaaagcgucauuacuuaugaaaacaacacuuggguaaaucagacauauguuaacaucagcaacaccaacuuugcugcugggcagucagugguuuccgugaaauuagcgggcaauuccucucucugcccuguuaguggaugggcuauauacaguaaagacaacaguguaagaaucgguuccaagggggauguguuugucauaagggaaccauucauaucaugcucccccuuggaaugcagaaccuucuucuugacucaaggggccuugcuaaaugacaaacauuccaauggaaccauuaaagacaggagcccauaucgaacccuaaugagcuguccuauuggugaaguucccucuccauacaacucaagauuugagucagucgcuuggucagcaagugcuugucaugauggcaucaauuggcuaacaauuggaauuucuggcccagacaguggggcaguggcuguguuaaaguacaacggcauaauaacagacacuaucaagaguuggagaaacaauauauugagaacacaagagucugaaugugcauguguaaaugguucuugcuuuaccauaaugaccgauggaccaagugauggacaggccucauacaagaucuucagaauagaaaagggaaagauagucaaaucagucgaaaugaaugccccuaauuaucacuaugaggaaugcuccuguuauccugauucuagugaaaucacaugugugugcagggauaauuggcauggcucgaaucgaccgugggugucuuucaaccagaaucuggaauaucagauaggauacauaugcagugggauuuucggagacaauccacgcccuaaugauaagacaggcaguugugguccaguaucgucuaauggagcaaauggaguaaaaggauuuucauucaaauacggcaaugguguuuggauagggagaacuaaaagcauuaguucaagaaaagguuuugagaugauuugggauccaaauggauggacugggacagacaauaacuucucaauaaagcaagauaucguaggaauaaaugaguggucaggauauagcgggaguuuuguucagcauccagaacuaacagggcuggauuguauaagaccuugcuucuggguugaacuaaucagagggcgacccaaagagaacacaaucuggacuagugggagcagcauauccuuuugugguguaaacagugacacuguggguuggucuuggccagacggugcugaguugccauuuaccauugacaaguaa

SEQ ID NO: 56805 - RNA, 1410 nt, Artificial Sequence
  derived and/or modified CDS sequence (wt) from neuraminidase__InfluenzaA__AHL96488
augaauccaaaucaaaagauaauaacgauuggcucuguuucucucaccauuuccacaauaugcuucuucaugcaaauugccaucuugauaacuacuguaacauugcauuucaagcaauaugaauucaacucccccccaaacaaccaagugaugcugugugaaccaacaauaauagaaagaaacauaacagagauaguguauuugaccaacaccaccauagagaaggaaauaugccccaaaccagcagaauacagaaauuggucaaaaccgcaauguggcauuacaggauuugcaccuuucucuaaggacaauucgauuaggcuuuccgcugguggggacaucugggugacaagagaaccuuaugugucaugcgauccugacaaguguuaucaauuugcccuuggacagggaacaacacuaaacaacaugcauucaaauaacacaguacgugauaggaccccuuaucggacucuauugaugaaugaguuggguguuccuuuucaucuggggaccaagcaagugugcauagcaugguccagcucaaguugucacgauggaaaagcauggcugcauguuuguauaacgggggaugauaaaaaugcaacugcuagcuucauuuacaaugggaggcuuguagauaguguuguuucaugguccaaagaaauucucaggacccaggagucagaaugcguuuguaucaauggaacuuguacaguaguaaugacugauggaagugcuucaggaaaagcugauacuaaaauauuauucauugaggaggggaaaaucguucauacuagcacauugucaggaagugcucagcaugucgaagagugcucuugcuauccucgauacccuggugucagaugugucugcagagacaacuggaaaggcuccaaucggcccaucguagauauaaacauaaaggaucauagcauugucuccaguuauguguguucaggacuuguuggagacacacccagaaaaaacgacagcuccagcaguagccauuguuuggauccuaacaaugaagaagguggucauggagugaaaggcugggccuuugaugauggaaaugacguguggaugggaagaacaaucaacgagacgucacgcuuaggguaugaaaccuucaaagucauugaaggcugguccaacccuaaguccaaauugcagauaaauaggcaagucauaguugacagaggugauagguccgguuauucugguauuuucucuguugaaggcaaaagcugcaucaaucggugcuuuuauguggaguugauuaggggaagaaaagaggaaacugaagucuuguggaccucaaacaguauuguuguguuuuguggcaccucagguacauauggaacaggcucauggccugauggggcggaccucaaucucaugccuauauaa

SEQ ID NO: 56806 - RNA, 1410 nt, Artificial Sequence; identical to SEQ ID NO: 55865
  derived and/or modified CDS sequence (wt) from neuraminidase__InfluenzaA__AHL96500

SEQ ID NO: 56807 - RNA, 1410 nt, Artificial Sequence; identical to SEQ ID NO: 55952
  derived and/or modified CDS sequence (wt) from neuraminidase__InfluenzaA__AHL96512

SEQ ID NO: 56808 - RNA, 1410 nt, Artificial Sequence
  derived and/or modified CDS sequence (wt) from neuraminidase__InfluenzaA__AHL96524
augaauccaaaucaaaagauaauaacgauuggcucuguuucucucaccauuuccacaauaugcuucuucaugcaaauugccaucuugauaacuacuguaacauugcauuucaagcaauaugaauucaauucccccccaaacaaccaagugaugcugugugaaccaacaauaauagaaagaaacauaacagagauaguguaucuaaccaacaccaccauagagaaggaaauaugccccaaaccagcagaauacagaaauuggucaaagccgcagugugacauuacaggauuugcaccuuuuucuaaggacaauucgauuaggcuuuccgcugguggggacaucugggugacaagagaaccuuaugugucaugcgauccugacaaguguuaucaauuugcucuuggacagggaacaacacuaaacaacgugcauucaaauaacacaguacgugauaggaccccuuaucggacccuauugaugaaugaguuagguguuccuuuucaucuggggaccaagcaagugugcauagcaugguccagcucaaguugucacgauggaaaagcauggcugcauguuuguauaacgggggaugauaaaaaugcaacugcuagcuucauuuacaaugggaggcuuguagauaguguuguuucaugguccaaagaaauccucaggacccaggaaucagaaugcguuuguaucaauggaacuuguacaguaguaaugacugaugggagugcuucaggaaaagcugauacuaaaauacuauucauugaggaggggaaaaucguucauacuagcacauugucaggaagugcucagcaugucgaggagugcucuugcuauccucgauauccuggugucagaugugucugcagagacaacuggaaaggcuccaauaggccuaucguagauauaaacauaaaggaucauagcauuguuuccagguauguguguucaggacuuguuggagacacacccagaaaaaacgacagcucaagcaguagccauuguuuggauccuaauaaugaagaagguggucauggagugaaaggcugggccuucgaugauggaaaugacguguggaugggaagaacgaucaacgagacgucacguuuaggguaugaaaccuucaaagucauugaaggcugguccaacccuaaguccaaauugcagauaaauaggcaggucauaguugacagaggugauagguccgguuauucugguauuuucucuguugaaggcaaaagcugcaucaaucggugcuuuuauguggaguugauuaggggaagaaaagaggaaacugaagucuuguggaccucaaacaguauuguuguguuuuguggcaccucagguacauauggaacaggcucauggccugauggggcggaccucaaucucaugccuauauaa

SEQ ID NO: 56809 - RNA, 1410 nt, Artificial Sequence
  derived and/or modified CDS sequence (wt) from neuraminidase__InfluenzaA__AHL96536
augaauccaaaucaaaagauaauaacgauuggcucuguuucucucaccauuuccacaauaugcuucuucacgcaaauugccaucuugauaacuacuguaacauugcauuucaagcaauaugaauucaacucccccccaaacaaccaagugaugcugugugaaccaacaauaauagaaagaaacauaacagagauaguguaucugaccaacaccaccaucgagaaggaaauaugccccaaaccagcagaauacagaaauuggucaaaaccgcaauguggcauuacaggauuugcaccuuucucuaaggacaauucgauuaggcuuuccgcugguggggacaucugggugacaagagaaccuuaugugucaugcgauccugacaaguguuaucaauuugcccuuggacagggaacaacaauaaacaacgugcauucaaauaacacaguacgugauaggaccccuuaucggacucuauugaugaaugaguuggguguuccuuuucaucuggggaccaagcaagugugcauagcaugguccagcucaaguugucacgauggaaaagcauggcugcauguuuguauaacgggggaugauaaaaaugcaacugcuagcuucauuuacaaugggaggcuuguagauaguguuguuucaugguccaaagaaauucucaggacccaggagucagaaugcguuuguaucaauggaacuuguacaguaguaaugacugauggaagugcuucaggaaaagcugauacuaaaauacuauucauugaggaggggaaaaucguucauacuagcacauugucaggaagugcucagcaugucgaagagugcucuugcuauccucgauauccuggugucagaugugucugcagagacaacuggaaaggcuccaaucggcccaucguagauauaaacauaaaggaucauagcauuguuuccaguuauguguguucaggacuuguuggagacacacccagaaaaaacgacagcuccagcaguagccauuguuuggauccuaacaaugaagaagguggucauggagugaaaggcugggccuuugaugauggaaaugacguguggaugggaagaacaaucaacgagacgucacgcuuaggguaugaaaccuucaaagucauugaaggcugguccaacccuaaguccaaauugcagauaaauaggcaagucauaguugacagaggugauagguccgguuauucugguauuuucucuguugaaggcaaaagcugcaucaaucggugcuuuuauguggaguugauuaggggaagaaaagaggaaacugaagucuuguggaccucaaacaguauuguuguguuuuguggcaccucagguacauauggaacaggcucauggccugauggagcggaccucaaucucaugccuauauaa

SEQ ID NO: 56810 - RNA, 1410 nt, Artificial Sequence; identical to SEQ ID NO: 56714
  derived and/or modified CDS sequence (wt) from neuraminidase__InfluenzaA__AHL96548

SEQ ID NO: 56811 - RNA, 1410 nt, Artificial Sequence
  derived and/or modified CDS sequence (wt) from neuraminidase__InfluenzaA__AHL96560
augaauccaaaucaaaagauaauaacgauuggcucuguuucucucaccauuuccacaauaugcuucuucaugcaaauugccaucuugauaacuacuguaacauugcauuucaagcaauaugaauucaacucccccccaaacaaccaagugaugcugugugaaccaacaauaauagaaagaaacauaacagagauaguguaucugaccaacaccaccauagagaaggaaauaugccccaaaccagcagaauacagaaauuggucaaaaccgcaauguggcauuacaggauuugcaccuuucucuaaggacaauucgauuaggcuuuccgcugguggggacaucugggugacaagagaaccuuaugugucaugcgauccugacaaguguuaucaauuugcccuuggacagggaacaacacuaaacaacgugcauucaaauaacacaguacgugauaggaccccuuaucggacucuauugaugaaugaguuggguguuccuuuucaucuggggaccaagcaagugugcauagcaugguccagcucaaguugucacgauggaaaagcauggcugcauguuuguauaacgggggaugauaaaaaugcaacugcuagcuucauuuacaaugggaggcuuguagauaguguuguuucaugguccaaagaaauucucaggacccaggagucagaaugcguuuguaucaauggaacuuguacaguaguaaugacugauggaaaugcuucaggaaaagcugauacuaaaauacuauucauugaggaggggaaaaucguucauacuagcacauugucaggaagugcucagcaugucgaagagugcucuugcuauccucgauauccuggugucagaugugucugcagagacaacuggaaaggcuccaaucggcccaucguagauauaaacauaaaggaucauagcauuguuuccaguuauguguguucaggacuuguuggagacacacccagaaaaaacgacagcuccagcaguagccauuguuuggauccuaacaaugaagaagguggucauggagugaaaggcugggccuuugaugauggaaaugacguguggaugggaagaacaaucaacgagacgucacgcuuaggguaugaaaccuucaaagucauugaaggcugguccaauccuaaguccaaauugcagauaaauaggcaagucauaguugacagaggugauagguccgguuauucugguauuuucucuguugaaggcaaaagcugcaucaaucggugcuuuuauguagaguugauuaggggaagaaaagaggaaacugaagucuuguggaccucaaacaguauuguuguguuuuguggcaccucagguacauauggaacaggcucauggccugauggggcggaccucaaucucaugccuauauaa

SEQ ID NO: 56812 - RNA, 1410 nt, Artificial Sequence; identical to SEQ ID NO: 55379
  derived and/or modified CDS sequence (wt) from neuraminidase__InfluenzaA__AHL96572

SEQ ID NO: 56813 - RNA, 1410 nt, Artificial Sequence; identical to SEQ ID NO: 56804
  derived and/or modified CDS sequence (wt) from neuraminidase__InfluenzaA__AHL96584

SEQ ID NO: 56814 - RNA, 1410 nt, Artificial Sequence
  derived and/or modified CDS sequence (wt) from neuraminidase__InfluenzaA__AHL96595
augaauccaaaucaaaagauaauaacgauuggcucuguuucucucaccauuuccacaauaugcuucuucaugcaaauugccaucuugauaacuacuguaacauugcauuucaagcaauaugaauucaacucccccccaaacaaccaagugaugcugugugaaccaacaauaauagaaagaaacauaacagagauaguguaucugaccaacaccaccauagagaaggaaauaugccccaaaccagcagaauacagaaauuggucaaaaccgcaauguggcauuacaggauuugcaccuuucucuaaggacaauucgauuaggcuuuccgcugguggggacaucugggugacaagagaaccuuaugugucaugcgauccugacaaguguuaucaauuugcccuuggacagggaacaacacuaaacaacgugcauucaaauaacacaguacgugauaggaccccuuaucggacucuauugaugaaugaguuggguguuccuuuucaucuggggaccaagcaagugugcauagcaugguccagcucaaguugucacgauggaaaagcauggcugcauguuuguauaacgggggaugauaaaaaugcaacugcuagcuucauuuacaaugggaggcuuguagauaguguuguuucaugguccaaagaaauucucaggacccaggagucagaaugcguuuguaucaauggaacuuguacaguaguaaugacugauggaagugcuucaggaaaagcugauacuaaaauacuauucauugaggaggggaaaaucguucauacuagcacauugucaggaagugcucagcaugucgaagagugcucuugcuauccucgauauccuggugucagaugugucugcagagacaacuggaaaggcuccaaucggcccaucguagauauaaacauaaaggaucauagcauuguuuccaguuauguguguucaggacuuguuggagacacacccagaaaaaacgacagcuccagcaguagccauuguuuggauccuaacaaugaagaagguggucauggagugaaaggcugggccuuugaugauggaaaugacguguggaugggaagaacaaucaacgagacgucacgcuuaggguaugaaaccuucaaagucauugaaggcugguccaauccuaaguccaaauugcagauaaauaggcaagucauaguugacagaggugauagguccgguuauucugguauuuucucuguugaaagcaaaagcugcaucaaucggugcuuuuauguagaguugauuaggggaagaaaagaggaaacugaagucuuguggaccucaaacaguauuguuguguuuuguggcaccucagguacauauggaacaggcucauggccugauggggcggaccucaaucucaugccuauauaa

SEQ ID NO: 56815 - RNA, 1410 nt, Artificial Sequence; identical to SEQ ID NO: 55865
  derived and/or modified CDS sequence (wt) from neuraminidase__InfluenzaA__AHL96607

SEQ ID NO: 56816 - RNA, 1410 nt, Artificial Sequence
  derived and/or modified CDS sequence (wt) from neuraminidase__InfluenzaA__AHL96631
augaauccaaaucaaaagauaauaacgauuggcucuguuucucucaccauuuccacaauaugcuucuucaugcaaauugccaucuugauaacuacuguaacauugcauuucaagcaauaugaauucaacucccucccaaacaaccaagugaugcugugugaaccaacaauaauagaaagaaacauaacagagauaguguauuugaccaacaccaccauagagaaggaaauaugccccaaaccagcagaauacagaaauuggucaaaaccgcaauguggcauuacaggauuugcaccuuucucuaaggacaauucgauuaggcuuuccgcugguggggacaucugggugacaagagaaccuuaugugucaugcgauccugacaaguguuaucaauuugcccuuggacagggaacaacacuaaacaacaugcauucaaauaacacaguacgugauaggaccccuuaucggacucuauugaugaaugaguuggguguuccuuuucaucuggggaccaagcaagugugcauagcgugguccagcucaaguugucacgauggaaaagcauggcugcauguuuguauaacgggggaugauaaaaaugcaacugcuagcuucauuuacaaugggaggcuuguagauaguguuguuucaugguccaaagaaauucucaggacccaggagucagaaugcguuuguaucaauggaacuuguacaguaguaaugacugauggaagugcuucaggaaaagcugauacuaaaauauuauucauugaggaggggaaaaucguucauacuagcacauugucaggaagugcucagcaugucgaagagugcucuugcuauccucgauauccuggugucagaugugucugcagagacaacuggaaaggcuccaaucggcccaucguagauauaaacauaaaggaucauagcauugucuccaguuauguguguucaggacuuguuggagacacacccagaaaaaacgacagcuccagcaguagccauuguuuggauccuaacaaugaagaagguggucauggagugaaaggcugggccuuugaugauggaaaugacguguggaugggaagaacaaucaacgagacgucacgcuuaggguaugaaaccuucaaagucauugaaggcugguccaacccuaaguccaaauugcagauaaauaggcaagucauaguugacagaggugauagguccgguuauucugguauuuucucuguugaaggcaaaagcugcaucaaucggugcuuuuauguggaguugauuaggggaagaaaagaggaaacugaagucuuguggaccucaaacaguauuguuguguuuuguggcaccucagguacauauggaacaggcucauggccugauggggcggaccucaaucucaugccuauauaa

SEQ ID NO: 56817 - RNA, 1410 nt, Artificial Sequence; identical to SEQ ID NO: 55895
  derived and/or modified CDS sequence (wt) from neuraminidase__InfluenzaA__AHL96643

SEQ ID NO: 56818 - RNA, 1410 nt, Artificial Sequence; identical to SEQ ID NO: 55869
  derived and/or modified CDS sequence (wt) from neuraminidase__InfluenzaA__AHL96655

SEQ ID NO: 56819 - RNA, 1410 nt, Artificial Sequence
  derived and/or modified CDS sequence (wt) from neuraminidase__InfluenzaA__AHL96667
augaauccaaaucaaaagauaauaacgauuggcucuguuucucucaccauuuccacaauaugcuucuucaugcaaauugccaucuugauaacuacuguaacauugcauuucaagcaauaugaauucaacucccccccaaacaaccaagugaugcugugugaaccaacaauaauagaaagaaacauaacagagauaguguaucugaccaacaccaccauagagaaggaaauaugccccaaaccagcagaauacagaaauuggucaaagccgcaauguggcauuacaggauuugcaccuuucucuaaggacaauucgauuaggcuuuccgcugguggggacaucugggugacaagagaaccuuaugugucaugcgauccugacaaguguuaucaauuugcccuuggacagggaacaacacuaaacaacgugcauucaaauaacacaguacgugauaggaccccuuaucggacucuauugaugaaugaguuggguguuccuuuucaucuggggaccaagcaagugugcauagcaugguccagcucaaguugucacgauggaaaagcauggcugcauguuuguauaacgggggaugauaaaaaugcaacugcuagcuucauuuacaaugggaggcuuguagauaguguuguuucaugguccaaagaaauucucaggacccaggagucagaaugcguuuguaucaauggaacuuguacaguaguaaugacugauggaagugcuucaggaaaagcugauacuaaaauacuauucauugaggaggggaaaaucguucauacuagcacauugucaggaagugcucagcaugucgaagaaugcucuugcuauccucgauauccuggugucagaugugucugcagagacaacuggaaaggcuccaaucggcccaucguagauauaaacauaaaggaucauagcauuguuuccaguuauguguguucaggacuuguuggagacacacccagaaaaaacgacagcuccagcaguagccauuguuuggauccuaacaaugaagaagguggucauggagugaaaggcugggccuuugaugauggaaaugacguguggaugggaagaacaaucaacgagacgucacgcuuaggguaugaaaccuucaaagucauugaaggcugguccaacccuaaguccaaauugcagauaaauaggcaagucauaguugacagaggugauagguccgguuauucugguauuuucucuguugaaggcaaaagcugcaucaaucggugcuuuuauguggaguugauuaggggaagaaaagaggaaacugaagucuuguggaccucaaacaguauuguuguguuuuguggcaccucagguacauauggaacaggcucauggccugauggggcggaccucaaucucaugccuauauaa

SEQ ID NO: 56820 - RNA, 1410 nt, Artificial Sequence; identical to SEQ ID NO: 56779
  derived and/or modified CDS sequence (wt) from neuraminidase__InfluenzaA__AHL96679

SEQ ID NO: 56821 - RNA, 1410 nt, Artificial Sequence; identical to SEQ ID NO: 55865
  derived and/or modified CDS sequence (wt) from neuraminidase__InfluenzaA__AHL96691

SEQ ID NO: 56822 - RNA, 1410 nt, Artificial Sequence
  derived and/or modified CDS sequence (wt) from neuraminidase__InfluenzaA__AHL96703
augaauccaaaucaaaagauaauaacgauuggcucuguuucucucaccauuuccacaauaugcuucuucaugcaaauugccaucuugauaacuacuguaacauugcauuucaagcaauaugaauucaacucccccccaaacaaccaagugaugcugugugaaccaacaauaauagaaagaaacauaacagagauaguguaucugaccaacaccaccauagagaaggaaauaugccccaaaccagcagaauacagaaauuggucaaaaccgcaauguggcauuacaggauuugcaccuuucucuaaggacaauucgauuaggcuuuccgcugguggggauaucugggugacaagagaaccuuaugugucaugcgauccugacaaguguuaucaauuugcccuuggacagggaacaacacuaaacaacgugcauucaaauaacacaguacgugauaggaccccuuaucggacucuauugaugaaugaguuggguguuccuuuucaucuggggaccaagcaagugugcauagcaugguccagcucaaguugucacgauggaaaagcauggcugcauguuugcauaacgggggaugauaaaaaugcaacugcuagcuucauuuacaaugggaggcuuguagauaguguuguuucaugguccaaagaaauucucaggacccaggagucagaaugcguuuguaucaauggaacuuguacaguaguaaugacugauggaagugcuucaggaaaagcugauacuaaaauacuauucauugaggagggaaaaaucguucauacuagcacauugucaggaagugcucagcaugucgaagagugcucuugcuauccucgauauccuggugucagaugugucugcagagacaacuggaaaggcuccaaucggcccaucguagauauaaacauaaaggaucauagcauuguuuccaguuauguguguucaggacuuguuggagacacacccagaaaaaacgacagcuccagcaguagccauuguuuggauccuaacaaugaagaagguggucauggagugaaaggcugggccuuugaugauggaaaugacguguggaugggaagaacaaucaacgagacgucacgcuuaggguaugaaaccuucaaagucauugaaggcugguccaacccuaaguccaaauugcagauaaauaggcaagucauaguugacagaggugauagguccgguuauucugguauuuucucuguugaaggcaaaagcugcaucaaucggugcuuuuauguggaguugauuaggggaagaaaagaggaaacugaagucuuguggaccucaaacaguauuguuguguuuuguggcaccucagguacauauggaacaggcucauggccugauggggcggaccucaaucucaugccuauauaa

SEQ ID NO: 56823 - RNA, 1410 nt, Artificial Sequence; identical to SEQ ID NO: 55883
  derived and/or modified CDS sequence (wt) from neuraminidase__InfluenzaA__AHL96763

SEQ ID NO: 56824 - RNA, 1410 nt, Artificial Sequence
  derived and/or modified CDS sequence (wt) from neuraminidase__InfluenzaA__AHL96787
augaauccaaaucaaaagauaauaacgauuggcucuguuucucucaccauuuccacaauaugcuucuucaugcaaauugccaucuugauaacuacuguaacauugcauuucaagcaauaugaauucaacucccccccaaacaaccaagugaugcugugugaaccaacaauaauagaaagaaacauaacagagauaguguaucugaccaacaccaccauagagaaggaaauaugccccaaaccagcagaauacagaaauuggucaaaaccgcaauguggcauuacaggauuugcaccuuucucuaaggacaauucgauuaggcuuuccgcugguggggacaucugggugacaagagaaccuuaugugucaugcgaucccgacaaguguuaucaauuugcccuuggacagggaacaacacuaaacaacgugcauucaaauaacacaguacgugauaggaccccuuaucggacucuauugaugaaugaguuggguguuccuuuucaucuggggaccaagcaagugugcauagcaugguccagcucaaguugucacgauggaaaagcauggcugcauguuuguauaacgggggaugauaaaaaugcaacugcuagcuucauuuacaaugggaggcuuguagauaguguuguuucaugguccaaagaaauucucaggacccaggagucagaaugcguuuguaucaauggaacuuguacaguaguaaugacugauggaagugcuucaggaaaagcugauacuaaaauacuauucauugaggaggggaaaaucguucauacuagcacauugucaggaagugcucagcaugucgaagagugcucuugcuauccucgauauccuggugucagaugugucugcagagacaacuggaaaggcuccaaucggcccaucguagauauaaacauaaaggaucauagcauuguuuccaguuauguguguucaggacuuguuggagacacacccagaaaaaacgacaucuccagcaguagccauuguuuggauccuaacaaugaagaagguggucauggagugaaaggcugggccuuugaugauggaaaugacguguggaugggaagaacaaucaacgagacgucacgcuuaggguaugaaaccuucaaagucauugaaggcugguccaacccuaaguccaaauuacagauaaauaggcaagucauaguugacagaggugauagguccgguuauucugguauuuucucuguugaaggcaaaagcugcaucaaucggugcuuuuauguggaguugauuaggggaagaaaagaggaaacugaagucuuguggaccucaaacaguauuguuguguuuuguggcaccucagguacauauggaacaggcucauggccugauggggcggaccucaaucucaugccuauauaa

SEQ ID NO: 56825 - RNA, 1410 nt, Artificial Sequence
  derived and/or modified CDS sequence (wt) from neuraminidase__InfluenzaA__AHL96799
augaauccaaaucaaaagauaauaacgauuggcucuguuucucucaccauuuccacaauaugcuucuucaugcaaauugccaucuugauaacuacuguaacauugcauuucaagcaauaugaauucaacucccccccaaacaaccaagugaugcugugugaaccaacaauaauagaaagaaacauaacagagauaguguaucugaccaacaccaccauagagaaggaaauaugccccaaaccagcagaauacagaaauuggucaaaaccgcaauguggcauuacaggauuugcaccuuucucuaaggacaauucgauuaggcuuuccgcugguggggacaucugggugacaagagaaccuuaugugucaugcgauccugacaaguguuaucaauuugcccuuggacagggaacaacacuaaacaacgugcauucaaauaacacaguacgugauaggaccccuuaucggacucuauugaugaaugaguuggguguuccuuuucaucuggggaccaagcaagugugcauagcaugguccagcucaaguugucacgauggaaaagcauggcugcauguuuguauaacgggggaugauaaaaaugcaacugcuagcuucauuuacaaugggaggcuuguagauaguguuguuucaugguccaaagaaauucucaggacccaggagucagaaugcguuuguaucaauggaacuuguacaguaguaaugacugauggaagugcuucaggaaaagcugauacuaaaauacuauucauugaggaggggaaaaucguucauacuagcacauugucaggaagugcucagcaugucgaagagugcucuugcuauccucgauauccuggugucagaugugucugcagagacaacuggaaaggcuccaaucggcccaucguagauauaaacauaaaggaucauagcauuguuuccaguuauguguguucaggacuuguuggagacacacccagaaaaaacgacagcuccagcaguagccauuguuuggauccuaacaaugaagaagguggucauggagugaaaggcugggccuuugaugauggaaaugacguguggaugggaagaacaaucaacgagacgucacgcuuaggguaugaaaccuucaaagucauugaaggcugguccaauccuaaguccaaauugcagauaaauaggcaagucauaguugacagaggugauagguccgguuauucugguauuuucucuguugaaggcaaaagcugcaucaaucggugcuuuuauguagaguugauuaggggaagaaaagaugaaacugaagucuuguggaccucaaacaguauuguuguguuuuguggcaccucagguacauauggaacaggcucauggccugauggggcggaccucaaucucaugccuauauaa

SEQ ID NO: 56826 - RNA, 1410 nt, Artificial Sequence; identical to SEQ ID NO: 55895
  derived and/or modified CDS sequence (wt) from neuraminidase__InfluenzaA__AHL96811

SEQ ID NO: 56827 - RNA, 1410 nt, Artificial Sequence
  derived and/or modified CDS sequence (wt) from neuraminidase__InfluenzaA__AHL96823
augaauccaaaucaaaagauaauaacgauuggcucuguuucucucaccauuuccacaauaugcuucuucaugcaaauugccaucuugauaacuacuguaacauugcauuucaagcaauaugaauucaacucccccccaaacaaccaagugaugcugugugaaccaacaauaauagaaagaaacauaacagagauaguguauuugaccaacaccaccauagagaaggaaauaugccccaaaccagcagaauacagaaauuggucaaaaccgcaauguggcauuacaggauuugcaccuuucucuaaggacaauucgauuaggcuuuccgcugguggggacaucugggugacaagagaaccuuaugugucaugcgauccugacaaguguuaucaauuugcccuuggacagggaacaacacuaaacaacaugcauucaaauaacacaguacgugauaggaccccuuaucggacccuauugaugaaugaguuggguguuccuuuucaucuggggaccaagcaagugugcauagcaugguccagcucaaguugucacgauggaaaagcauggcugcauguuuguauaacgggggaugauaaaaaugcaacugcuagcuucauuuacaaugggaggcuuguagauaguguuguuucaugguccaaagaaauucucaggacccaggagucagaaugcguuuguaucaauggaacuuguacaguaguaaugacugauggaagugcuucaggaaaagcugauacuaaaauauuauucauugaggaggggaaaaucguucauacuagcacauugucaggaagugcucagcauguugaagagugcucuugcuauccucgauauccuggugucagaugugucugcagagacaacuggaaaggcuccaaucggcccaucguagauauaaacauaaaggaucauagcauugucuccaguuauguguguucaggacuuguuggagacacacccagaaaaaacgacagcuccagcaguagccauuguuuggauccuaacaaugaagaagguggucauggagugaaaggcugggccuuugaugauggaaaugacguguggaugggaagaacaaucaacgagacgucacgcuuaggguaugaaaccuucaaagucauugaaggcugguccaacccuaaguccaaauugcagauaaauaggcaagucauaguugacagaggugauagguccgguuauucugguauuuucucuguugaaggcaaaagcugcaucaaucggugcuuuuauguggaguugauuaggggaagaaaagaggaaacugaagucuuguggaccucaaacaguauuguuguguuuuguggcaccucagguacauauggaacaggcucauggccugauggggcggaccucaaucucaugccuauauaa

SEQ ID NO: 56828 - RNA, 1410 nt, Artificial Sequence; identical to SEQ ID NO: 55880
  derived and/or modified CDS sequence (wt) from neuraminidase__InfluenzaA__AHL96847

SEQ ID NO: 56829 - RNA, 1410 nt, Artificial Sequence
  derived and/or modified CDS sequence (wt) from neuraminidase__InfluenzaA__AHL96859
augaauccaaaucaaaagauaauaacgauuggcucuguuucucucaccauuuccacaauaugcuucuucaugcaaauugccaucuugauaacuacuguaacauugcauuucaagcaauaugaauucaacucccccccaaacaaccaaaugaugcugugugaaccaacaauaauagaaagaaacauaacagagauaguguaucugaccaacaccaccauagagaaggaaauaugccccaaaccagcagaauacagaaauuggucaaaaccgcaauguggcauuacaggauuugcaccuuucucuaaggacaauucgauuaggcuuuccgcugguggggacaucugggugacaagagaaccuuaugugucaugcgaucccgacaaguguuaucaauuugcccuuggacagggaacaacacuaaacaacgugcauucaaauaacacaguacgugauaggaccccuuaucggacucuauugaugaaugaguuggguguuccuuuucaucuggggaccaagcaagugugcauagcaugguccagcucaaguugucacgauggaaaagcauggcugcauguuuguauaacgggggaugauaaaaaugcaacugcuagcuucauuuacaaugggaggcuuguagauaguguuguuucaugguccaaagaaauucucaggacccaggagucagaaugcguuuguaucaauggaacuuguacaguaguaaugacugauggaagugcuucaggaaaagcugauacuaaaauacuauucauugaggaggggaaaaucguucauacuagcacauugucaggaagugcucagcaugucgaagagugcucuugcuauccucgauauccuggugucagaugugucugcagagacaacuggaaaggcuccaaucggcccaucguagauauaaacauaaaggaucauagcauuguuuccaguuauguguguucaggacuuguuggagacacacccagaaaaaacgacagcuccagcaguagccauuguuuggauccuaacaaugaagaagguggucauggagugaaaggcugggccuuugaugauggaaaugacguguggaugggaagaacaaucaacgagacgucacgcuuaggguaugaaaccuucaaagucauugaaggcugguccaacccuaaguccaaauugcagauaaauaggcaagucauaguugacagaggugauagguccgguuauucugguauuuucucuguugaaggcaaaagcugcaucaaucggugcuuuuauguggaguugauuaggggaagaaaagaggaaacugaagucuuguggaccucaaacaguauuguuguguuuuguggcaccucagguacauauggaacaggcucauggccugauggggcggaccucaaucucaugccuauauaa

SEQ ID NO: 56830 - RNA, 1410 nt, Artificial Sequence
  derived and/or modified CDS sequence (wt) from neuraminidase__InfluenzaA__AHL96871
augaauccaaaucaaaagauaauaacgauuggcucuguuucucucaccauuuccacaauaugcuucuucaugcaaauugccaucuugauaacuacuguaacauugcauuucaagcaauaugaauucaacucccccccaaacaaccaagugaugcugugugaaccaacaauaguagaaagaaacauaacagagauaguguaucugaccaacaccaccauagagaaggaaauaugccccaaaccagcagaauacagaaauuggucaaaaccgcaauguggcauuacaggauuugcaccuuucucuaaggacaauucgauuaggcuuucugcugguggggacaucugggugacaagagaaccuuaugugucaugugauccugacaaguguuaucaauuugcccuuggacagggaacaacacuaaacaacgugcauucaaauaacacaguacgugauaggaccccuuaucggacucuauugaugaaugaguuggguguuccuuuucaucuggggaccaagcaagugugcauagcaugguccagcucaaguugucacgauggaaaagcauggcugcauguuuguauaacgggggaugauaaaaaugcaacugcuagcuucauuuacaaugggagacuuguagauaguguuguuucaugguccaaagaaguucucaggacccaggagucagaaugcguuuguaucaauggaacuugugcaguaguaaugacugauggaagugcuucaggaaaagcugauacuaaaauacuauucauugaggaggggaaaaucguucauacuagcacauugucaggaagugcucagcaugucgaagagugcucuugcuauccucgauauccuggugucagaugugucugcagagacaacuggaaaggcuccaaucggcccaucguagauauaaacauaaaggaucauagcauuguuuccaguuauguguguucaggacuuguuggagacacacccagaaaaaacgacagauccagcaguagccauuguuuggauccuaacaaugaagaagguggucauggagugaaaggcugggccuuugaugauggaaaugacguguggaugggaagaacaaucaacgagacgucacgcuuaggguaugaaaccuucaaaguuauugaaggcugguccaacccuaaguccaaauugcagauaaauaggcaagucauaguugacagaggugauagguccgguuauucugguauuuucucuguugaaggcaaaagcugcaucaaucggugcuuuuauguggaguugauuaggggaagaaaagaggaaacugaagucuuguggaccucaaacaguauuguuguguuuuguggcaccucagguacauauggaacaggcucauggccugauggggcggaccucaaucucaugccuauauaa

SEQ ID NO: 56831 - RNA, 1410 nt, Artificial Sequence
  derived and/or modified CDS sequence (wt) from neuraminidase__InfluenzaA__AHL96883
augaauccaaaucaaaagauaauaacgauuggcucuguuucucucaccauuuccacaauaugcuucuucaugcaaauugccaucuugauaacuacuguaacauugcauuucaagcaauaugaauucaacucccccccaaacaaccaagugaugcugugugaaccaacaauaauagaaagaaacauaacagagauaguguauuugaccaacaccaccauagagaaggaaauaugccccaaaucagcagaauacagaaauuggucaaaaccgcaauguggcauuacaggauuugcaccuuucucuaaggacaauucgauuaggcuuuccgcugguggggacaucugggugacaagagaaccuuaugugucaugcgauccugacaaguguuaucaauuugcccuuggacagggaacaacacuaaacaacaugcauucaaauaacacaguacgugauaggaccccuuaucggacucuauugaugaaugaguuggguguuccuuuucaucuggggaccaagcaagugugcauagcaugguccagcucaaguugucacgauggaaaagcauggcugcauguuuguauaacgggggaugauaaaaaugcaacugcuagcuucauuuacaaugggaggcuuguagauaguguuguuucaugguccaaagaaauucucaggacccaggagucagaaugcguuuguaucaauggaacuuguacaguaguaaugacugauggaagugcuucaggaaaagcugauacuaaaauauuauucauugaggaggggaaaaucguucauacuagcacauugucaggaagugcucagcaugucgaagagugcucuugcuauccucgauauccuggugucagaugugucugcagagacaacuggaaaggcuccaaucggcccaucguagauauaaacauaaaggaucauagcauugucuccaguuauguguguucaggacuuguuggagacacacccagaaaaaacgacagcuccagcaguagccauuguuuggauccuaacaaugaagaagguggucauggagugaaaggcugggccuuugaugauggaaaugacguguggaugggaagaacaaucaacgagacgucacgcuuaggguaugaaaccuucaaagucauugaaggcugguccaacccuaaguccaaauugcagauaaauaggcaagucauaguugacagaggugauagguccgguuauucugguauuuucucuguugaaggcaaaagcugcaucaaucggugcuuuuauguggaguugauuaggggaagaaaagaggaaacugaagucuuguggaccucaaacaguauuguuguguuuuguggcaccucagguacauauggaacaggcucauggccugauggggcggaccucaaucucaugccuauauaa

SEQ ID NO: 56832 - RNA, 1410 nt, Artificial Sequence; identical to SEQ ID NO: 55883
  derived and/or modified CDS sequence (wt) from neuraminidase__InfluenzaA__AHL96895

SEQ ID NO: 56833 - RNA, 1410 nt, Artificial Sequence
  derived and/or modified CDS sequence (wt) from neuraminidase__InfluenzaA__AHL96907
augaauccaaaucaaaagauaauaacgauuggcucuguuucucucaccauuuccacaauaugcuucuucaugcaaauugccaucuugauaacuacuguaacauugcauuucaagcaauaugaauucaacucccccccaaacaaccaagugaugcugugugaaccaacaauaguagaaagaaacauaacagagauaguguaucugaccaacaccaccauagagaaggaaauaugccccaaaccagcagaauacagaaauuggucaaaaccgcaauguggcauuacaggauuugcaccuuucucuaaggacaauucgauuaggcuuucugcugguggggacaucugggugacaagagaaccuuaugugucaugugauccugacaaguguuaucaauuugcccuuggacagggaacaacacuaaacaacgugcauucaaauaacacaguacgugauaggaccccuuaucggacucuauugaugaaugaguuggguguuccuuuucaucuggggaccaagcaagugugcauagcaugguccagcucaaguugucacgauggaaaagcauggcugcauguuuguauaacgggggaugauaaaaaugcaacugcuagcuucauuuacaaugggagacuuguagauaguguuguuucaugguccaaagaaguucucaggacccaggagucagaaugcguuuguaucaauggaacuugugcaguaguaaugacugauggaagugcuucaggaaaagcugauacuaaaauacuauucauugaggaggggaaaaucguucauacuagcacauugucaggaagugcucagcacgucgaagagugcucuugcuauccucgauauccuggugucagaugugucugcagagacaacuggaaaggcuccaaucggcccaucguagauauaaacauaaaggaucauagcauuguuuccaguuauguguguucaggacuuguuggagacacacccagaaaaaacgacagcuccagcaguagccauuguuuggauccuaacaaugaagaagguggucauggagugaaaggcugggccuuugaugauggaaaugacguguggaugggaagaacaaucaacgagacgucacgcuuaggguaugaaaccuucaaaguuauugaaggcugguccaacccuaaguccaaauugcagauaaauaggcaagucauaguugacagaggugauagguccgguuauucugguauuuucucuguugaaggcaaaagcugcaucaaucggugcuuuuauguggaguugauuaggggaagaaaagaggaaacugaagucuuguggaccucaaacaguauuguuguguuuuguggcaccucagguacauauggaacaggcucauggccugauggggcggaccucaaucucaugccuauauaa

SEQ ID NO: 56834 - RNA, 1410 nt, Artificial Sequence; identical to SEQ ID NO: 55895
  derived and/or modified CDS sequence (wt) from neuraminidase__InfluenzaA__AHL96919

SEQ ID NO: 56835 - RNA, 1410 nt, Artificial Sequence; identical to SEQ ID NO: 56784
  derived and/or modified CDS sequence (wt) from neuraminidase__InfluenzaA__AHL96931

SEQ ID NO: 56836 - RNA, 1410 nt, Artificial Sequence; identical to SEQ ID NO: 56784
  derived and/or modified CDS sequence (wt) from neuraminidase__InfluenzaA__AHL96943

SEQ ID NO: 56837 - RNA, 1410 nt, Artificial Sequence
  derived and/or modified CDS sequence (wt) from neuraminidase__InfluenzaA__AHL96955
augaauccaaaucaaaagauaauaacgauuggcucuguuucucucaccauuuccacaauaugcuucuucaugcaaauugccaucuugauaacuacuguaacauugcauuucaagcaauaugaauucaacucccccucaaacaaccaagugaugcugugugaaccaacaauaauagaaagaaacauaacagagauaguguaucugaccaacaccaccauagagaaggaaauaugccccaaaccagcagaauauagaaauuggucaaaaccgcaauguggcauuacaggauuugcaccuuucucuaaggacaauucgauuaggcuuuccgcuggugggaacaucugggugacaagagaaccuuaugugucaugcgaucccgacaaguguuaucaauuugcccuuggacagggaacaacacuaaacaacgugcauucaaauaacacaguacgugauagaaccccuuaucggacucuauugaugaaugaguuggguguuccuuuucaucuggggaccaagcaagugugcauagcaugguccagcucaaguugucacgauggaaaagcauggcugcauguuuguauaacgggggaugauaaaaaugcaacugcuagcuucauuuacaaugggaggcuuguagauaguguuguuucaugguccaaagaaauucucaggacccaggagucagaaugcguuuguaucaauggaacuuguacaguaguaaugacugauggaagugcuucaggaaaagcugauacuaaaauacuauucauugaggaggggaaaaucguucauacuagcacauugucaggaagugcucagcaugucgaagagugcucuugcuauccucgauauccuggugucagaugugucugcagagacaacuggaaaggcuccaaucggcccaucguagauauaaacauaaaggaucauagcauuguuuccaguuauguguguucaggacuuguuggagacacacccagaaaaaacgacagcuccagcaguagccauuguuuggauccuaacaaugaagaagguggucauggagugaaaggcugggccuuugaugauggaaaugacguguggaugggaagaacaaucaacgagacgucacgcuuaggguaugaaaccuucaaagucauugaaggcugguccaacccuaaguccaaauugcagauaaauaggcaagucauaguugacagaggugauagguccgguuauucugguauuuucucuguugaaggcaaaagcugcaucaaucggugcuuuuauguggaguugauuaggggaagaaaagaggaaacugaagucuuguggaccucaaacaguauuguuguguuuuguggcaccucagguacauauggaacaggcucauggccugauggggcggaccucaaucucaugccuauauaa

SEQ ID NO: 56838 - RNA, 1410 nt, Artificial Sequence
  derived and/or modified CDS sequence (wt) from neuraminidase__InfluenzaA__AHL96967
augaauccaaaucaaaagauaauaacgauuggcucuguuucucucaccauuuccacaauaugcuucuucaugcaaauugccaucuugauaacuacuguaacauugcauuucaagcaauaugaauucaacucccccccaaacaaccaagugaugcugugugaaccaacaauaauagaaagaaacauaacagagauaguguaucugaccaacaccaccauagagaaggaaauaugccccaaaccagcagaauacagaaauuggucaaaaccgcaauguggcauuacaggauuugcaccuuucucuaaggacaauucgauuaggcuuuccgcugguggggacaucugggugacaagagaaccuuaugugucaugcgaucccgacaaguguuaucaauuugcccuuggacagggaacaacacuaaacaacgugcauucaaauaacacaguacgugauaggaccccuuaucggacucuauugaugaaugaguuggguguuccuuuucaccuggggaccaagcaagugugcauagcaugguccagcucaaguugucacgauggaaaagcauggcugcauguuuguauaacgggggaugauaaaaaugcaacugcuagcuucauuuacaaugggaggcuuguagauaguguuguuucaugguccaaagaaauucucaggacccaggagucagaaugcguuuguaucaauggaacuuguacaguaguaaugacugauggaagugcuucaggaaaagcugauacuaaaauacuauucauugaggaggggaaaaucguucauacuagcacauugucaggaagugcucagcaugucgaagagugcucuugcuauccucgauauccuggugucagaugugucugcagagacaacuggaaaggcuccaaucggcccaucguagauauaaacauaaaggaucauagcauuguuuccaguuauguguguucaggacuuguuggagacacacccagaaaaaacgacaucuccagcaguagccauuguuuggauccuaacaaugaagaagguggucauggagugaaaggcugggccuuugaugauggaaaugacguguggaugggaagaacaaucaacgagacgucacgcuuaggguaugaaaccuucaaagucauugaaggcugguccaacccuaaguccaaauugcagauaaauaggcaagucauaguugacagaggugauagguccgguuauucugguauuuucucuguugaaggcaaaagcugcaucaaucggugcuuuuauguggaguugauuaggggaagaaaagaggaaacugaagucuuguggaccucaaacaguauuguuguguuuuguggcaccucagguacauauggaacaggcucauggccugauggggcggaccucaaucucaugccuauauaa

SEQ ID NO: 56839 - RNA, 1410 nt, Artificial Sequence
  derived and/or modified CDS sequence (wt) from neuraminidase__InfluenzaA__AHL96979
augaauccaaaucaaaagauaauaacgauuggcucuguuucucucaccauuuccacaauaugcuucuucaugcaaauugccaucuugauaacuacuguaacauugcauuucaagcaauaugaauucaacucccccccaaacaaccaagugaugcugugugaaccaacaauaauagaaagaaacauaacagagauaguguaucugaccaacaccaccauagagaaggaaauaugucccaaaccagcagaauacagaaauuggucaaagccgcaaugugacauuacaggauuugcaccuuuuucuaaggacaauucgauuaggcuuuccgcugguggggacaucugggugacaagagaaccuuaugugucaugugauccugacaaguguuaucaauuugcccuuggacagggaacaacacuaaacaacaugcauucaaauaacacaguacgugauaggaccccuuaucggacccuauugaugaaugaguuggguguuccuuuucaucuggggaccaagcaagugugcauagcaugguccagcucaagcugucacgauggaaaagcauggcugcauguuuguauaacgggggaugauaaaaaugcaacugcuagcuucauuuacaauggaaggcuuguagauaguguuguuucaugguccaaagaaauccucaggacccaggagucagaaugcguuugcaucaauggaacuuguacaguaguaaugacugaugggagugcuucgggaaaagcugauacuaaaauacuauucauugaggaggggaaaaucguucauacuagcacauugucaggaagugcucagcaugucgaggagugcucuugcuauccucgauacccuggugucagaugugucugcagagacaacuggaaaggcuccaauaggcccaucguagauauaaacauaaaggaucauagcauuguuuccaguuauguguguucagggcuuguuggagacacacccagaaaaaacgacagcuccagcaguagccauuguuuggauccuaacaaugaagaagguggucauggagugaaaggcugggccuuugaugauggaaaugacguguggaugggaagaacgaucaacgagacgucacguuuaggguaugaaaccuucaaagucauugaaggcugguccaacccuaaguccaaauugcagauaaauaggcaagucauaguugacagaggcgauagguccgguuauucugguauuuucucuguugaaggcaaaagcugcaucaaucggugcuuuuauguggaguugaucaggggaagaaaagaggaaacugaagucuuguggaccucaaacaguauuguuguguuuuguggcaccucaggcacauauggaacaggcucauggccugauggggcggaccucaauaucaugccuauauaa

SEQ ID NO: 56840 - RNA, 1410 nt, Artificial Sequence
  derived and/or modified CDS sequence (wt) from neuraminidase__InfluenzaA__AHL96991
augaauccaaaucaaaagauaauaacgauuggcucuguuucucucaccauuuccacaauaugcuucuucaugcaaauugccaucuugauaacuacuguaacauugcauuucaagcaauaugaauucaacucccccccaaacaaccaagugaugcugugugaaccaacaauaauagaaagaaacauaacagagauaguguauuugaccaacaccaccauagagaaggaaauaugccccaaaccagcagaauacagaaauuggucaaaaccgcaauguggcauuacaggauuugcaccuuucucuaaggacaauucgauuaggcuuuccgcugguggggacaucugggugacaagagaaccuuaugugucaugcgauccugacaaguguuaucaauuugcccuuggacagggaacaacacuaaacaacaugcauucaaauaacacaguacgcgauaggaccccuuaucggacucuauugaugaaugaguuggguguuccuuuucaucuggggaccaagcaaguguguauagcaugguccagcucaaguugucacgauggaaaagcauggcugcauguuuguauaacgggggaugauaaaaaugcaacugcuagcuucauuuacaaugggaggcuuguagauaguguuguuucaugguccaaagaaauucucaggacccaggagucagaaugcguuuguaucaauggaacuuguacaguaguaaugacugauggaagugcuucaggaaaagcugauacuaaaauauuauucauugaggaggggaaaaucguucauacuagcacauugucaggaagugcucagcaugucgaagagugcucuugcuauccucgauauccuggugucagaugugucugcagagacaacuggaaaggcuccaaucggcccaucguagauauaaacauaaaggaucauagcauugucuccaguuauguguguucaggacuuguuggagacacacccagaaaaaacgacagcuccagcaguagccauuguuuggauccuaacaaugaagaagguggucauggagugaaaggcugggccuuugaugauggaaaugacguguggaugggaagaacaaucaacgagacgucacgcuuaggguaugaaaccuucaaagucauugaaggcugguccaacccuaaguccaaauugcagauaaauaggcaagucauaguugacagaggugauagguccgguuauucugguauuuucucuguugaaggcaaaagcugcaucaaucggugcuuuuauguggaguugauuaggggaagaaaagaggaaacugaagucuuguggaccucaaacaguauuguuguguuuuguggcaccucagguacauauggaacaggcucauggccugauggggcggaccucaaucucaugccuauauaa

SEQ ID NO: 56841 - RNA, 1410 nt, Artificial Sequence; identical to SEQ ID NO: 55880
  derived and/or modified CDS sequence (wt) from neuraminidase__InfluenzaA__AHL97003

SEQ ID NO: 56842 - RNA, 1410 nt, Artificial Sequence
  derived and/or modified CDS sequence (wt) from neuraminidase__InfluenzaA__AHL97015
augaauccaaaucaaaagauaauaacgauuggcucuguuucucucaccauuuccacaauaugcuucuucaugcaaauugccaucuugauaacuacuguaacauugcauuucaagcaauaugaauucaacucccccccaaacaaccaagugaugcugugugaaccaacaauaauagaaagaaacauaacagagauaguguaucugaccaacaccaccauagagaaggaaauaugccccaaaccagcagaauacagaaauuggucaaaaccgcaauguggcauuacaggauuugcaccuuucucuaaggacaauucgauuaggcuuuccgcugguggggacaucugggugacaagagaaccuuaugugucaugcgauccugacaaguguuaucaauuugcccuuggacagggaacaacacuaaacaacgugcauucaaauaacacaguacgugauaggaccccuuaucggacucuauugaugaaugaguuggguguuccuuuucaucuggggaccaagcaagugugcauagcaugguccagcucaaguugucacgauggaaaagcauggcugcauguuugcauaacgggggaugauaaaaaugcaacugcuagcuucauuuacaaugggaggcuuguagauaguguuguuucaugguccaaagaaauucucaggacccaggagucagaaugcguuuguaucaauggaacuuguacaguaguaaugacugauggaagugcuucaggaaaagcugauacuaaaauacuauucauugaggagggaaaaaucguucauacuagcacauugucaggaagugcucagcaugucgaagagugcucuugcuauccucgauauccuggugucagaugugucugcagagacaacuggaaaggcuccaaucggcccaucguagauauaaacauaaaggaucauagcauuguuuccaguuauguguguucaggacuuguuggagacacacccagaaaaaacgacagcuccagcaguagccauuguuuggauccuaacaaugaagaagguggucauggagugaaaggcugggccuuugaugauggaaaugacguguggaugggaagaacaaucaacgagacgucacgcuuaggguaugaaaccuucaaagucauugaaggcugguccaacccuaaguccaaauugcagauaaauaggcaaaucauaguugacagaggugauagguccgguuauucugguauuuucucuguugaaggcaaaagcugcaucaaucggugcuuuuauguggaguugauuaggggaagaaaagaggaaacugaagucuuguggaccucaaacaguauuguuguguuuuguggcaccucagguacauauggaacaggcucauggccugauggggcggaccucaaucucaugccuauauaa

SEQ ID NO: 56843 - RNA, 1410 nt, Artificial Sequence; identical to SEQ ID NO: 55880
  derived and/or modified CDS sequence (wt) from neuraminidase__InfluenzaA__AHL97027

SEQ ID NO: 56844 - RNA, 1410 nt, Artificial Sequence
  derived and/or modified CDS sequence (wt) from neuraminidase__InfluenzaA__AHL97039
augaauccaaaucaaaagauaauaacgauuggcucuguuucucucaccauuuccacaauaugcuucuucaugcaaauugccaucuugauaacuacuguaacauugcauuucaagcaauaugaauucaacucccccccaaacaaccaagugaugcugugugaaccaacaauaauagaaagaaacauaacagagauaguguaucugaccaacaccaccauagagaaggaaauaugccccaaaccagcagaauacagaaauuggucaaaaccgcaauguggcauuacaggauuugcaccuuucucuaaggacaauucgauuaggcuuuccgcugguggggacaucugggugacaagagaaccuuaugugucaugcgauccugacaaguguuaucaauuugcccuuggacagggaacaacacuaaacaacgugcauucaaauaacacaguacgugauaggaccccuuaucggacucuauugaugaaugaguuggguguuccuuuucaucuggggaccaagcaagugugcauagcaugguccagcucaaguugucacgauggaaaagcauggcugcauguuuguauaacgggggaugauaaaaaugcaacugcuagcuucauuuacaaugggaggcuuguagauaguguuguuucaugguccaaagaaauucucaggacccaggagucagaaugcguuuguaucaauggaacuuguacaguaguaaugacugauggaaaugcuucaggaaaagcugauacuaaaauacuauucauugaggaggggaaaaucguucauacuagcacauugucaggaagugcucagcaugucgaagagugcucuugcuauccucgauauccuggugucagaugugucugcagagacaacuggaaaggcuccaaucggcccaucguagauauaaacauaaaggauuauagcauuguuuccaguuauguguguucaggacuuguuggagacacacccagaaaaaacgacagcuccagcaguagccauuguuuggauccuaacaaugaagaagguggucauggagugaaaggcugggccuuugaugauggaaaugacguguggaugggaagaacaaucaacgagacgucacgcuuaggguaugaaaccuucaaagucauugaaggcugguccaauccuaaguccaaauugcagauaaauaggcaagucauaguugacagaggugauagguccgguuauucugguauuuucucuguugaaggcaaaagcugcaucaaucggugcuuuuauguagaguugauuaggggaagaaaagaggaaacugaagucuuguggaccucaaacaguauuguuguguuuuguggcaccucagguacauauggaacaggcucauggccugauggggcggaccucaaucucaugccuauauaa

SEQ ID NO: 56845 - RNA, 1410 nt, Artificial Sequence; identical to SEQ ID NO: 55364
  derived and/or modified CDS sequence (wt) from neuraminidase__InfluenzaA__AHL97051

SEQ ID NO: 56846 - RNA, 1410 nt, Artificial Sequence
  derived and/or modified CDS sequence (wt) from neuraminidase__InfluenzaA__AHL97063
augaauccaaaucaaaagauaauaacgauuggcucuguuucucucaccauuuccacaauaugcuucuucaugcaaauugccaucuugauaacuacuguaacauugcauuucaagcaauaugaauucaacucccccccaaacaaccaagugaugcugugugaaccaacaauaauagaaagaaacauaacagagauaguguaucugaccaacaccaccauagagaaggaaauaugccccaaaccagcagaauacagaaauuggucaaaaccgcaauguggcauuacaggauuugcaccuuucucuaaggacaauucgauuaggcuuuccgcugguggggacaucugggugacaagagaaccuuaugugucaugcgauccugacaaguguuaucaauuugcccuuggacagggaacaacacuaaacaacgugcauucaaauaacacaguacgcgauaggaccccuuaucggacucuauugaugaaugaguuggguguuccuuuucaucuggggaccaagcaagugugcauagcaugguccagcucaaguugucacgauggaaaagcauggcugcauguuuguauaacgggggaugauaaaaaugcaacugcuagcuucauuuacaaugggaggcuuguagauaguguuguuucaugguccaaagaaauucucaggacccaggagucagaaugcguuuguaucaauggaacuuguacaguaguaaugacugauggaagugcuucaggaaaagcugauacuaaaauacuauucauugaggaggggaaaaucguucauacuagcacauugucaggaagugcucagcaugucgaagagugcucuugcuauccucgauauccuggugucagaugugucugcagagacaacuggaaaggcuccaaucggcccaucguagauauaaacauaaaggaucauagcauuguuuccaguuauguguguucaggacuuguuggagacacacccagaaaaaacgacagcuccagcaguagccauuguuuggguccuaacaaugaagaagguggucauggagugaaaggcugggccuuugaugauggaaaugacguguggaugggaagaacaaucaacgagacgucacgcuuaggguaugaaaccuucaaagucauugacggcugguccaauccuaaguccaaauugcagauaaauaggcaagucauaguugacagaggugauagguccgguuauucugguauuuucucuguugaaggcaaaagcugcaucaaucggugcuuuuauguagaguugauuaggggaagaaaagaggaaacugaagucuuguggaccucaaacaguauuguuguguuuuguggcaccucagguacauauggaacaggcucauggccugauggggcggaccucaaucucaugccuauauaa

SEQ ID NO: 56847 - RNA, 1410 nt, Artificial Sequence
  derived and/or modified CDS sequence (wt) from neuraminidase__InfluenzaA__AHL97075
augaauccaaaucaaaagauaauaacgauuggcucuguuucucucaccauuuccacaauaugcuucuucaugcaaauugccaucuugauaacuacuguaacauugcauuucaagcaauaugaauucaauucccccccaaacaaccaagugaugcugugugaaccaacaauaauagaaagaaacauaacagagauaguguaucugaccaacaccaccauagagaaggaaauaugccccaaaccagcagaauacagaaauuggucaaaaccgcaauguggcauuacaggauuugcaccuuucucuaaggacaauucgauuaggcuuuccgcugguggggacaucugggugacaagagaaccuuaugugucaugcgauccugacaaguguuaucaauuugcccuuggacagggaacaacacuaaacaacgugcauucaaauaacacaguacgugauaggaccccuuaucggacucuauugaugaaugaguuggguguuccuuuucaucuggggaccaagcaagugugcauagcaugguccagcucaaguugucacgauggaaaagcauggcugcauguuugcauaacgggggaugauaaaaaugcaacugcuagcuucauuuacaaugggaggcuuguagauaguguuguuucaugguccaaagaaauucucaggacccaggagucagaaugcguuuguaucaauggaacuuguacaguaguaaugacugauggaagugcuucaggaaaagcugauacuaaaauacuauucauugaggagggaaaaaucguucauacuagcacauugucaggaagugcucagcaugucgaagagugcucuugcuauccucgauauccuggugucagaugugucugcagagacaacuggaaaggcuccaaucggcccaucguagauauaaacauaaaggaucauagcauuguuuccaguuauguguguucaggacuuguuggagacacacccagaaaaaacgacagcuccagcaguagccauuguuuggauccuaacaaugaagaagguggucauggagugaaaggcugggccuuugaugauggaaaugacguguggaugggaagaacaaucaacgagacgucacgcuuaggguaugaaaccuucaaagucauugaaggcugguccaacccuaaguccaaauugcagauaaauaggcaagucauaguugacagaggugauagguccgguuauucugguauuuucucuguugaaggcaaaagcugcaucaaucggugcuuuuauguggaguugauuaggggaaggaaagaggaaacugaagucuuguggaccucaaacaguauuguuguguuuuguggcaccucagguacauauggaacaggcucauggccugauggggcggaccucaaucucaugccuauauaa

SEQ ID NO: 56848 - RNA, 1410 nt, Artificial Sequence; identical to SEQ ID NO: 55883
  derived and/or modified CDS sequence (wt) from neuraminidase__InfluenzaA__AHL97087

SEQ ID NO: 56849 - RNA, 1410 nt, Artificial Sequence; identical to SEQ ID NO: 55976
  derived and/or modified CDS sequence (wt) from neuraminidase__InfluenzaA__AHL97099

SEQ ID NO: 56850 - RNA, 1410 nt, Artificial Sequence
  derived and/or modified CDS sequence (wt) from neuraminidase__InfluenzaA__AHL97111
augaauccaaaucaaaagauaauaacgauuggcucuguuucucucaccauuuccacaauaugcuucuucaugcaaauugccaucuugauaacuacuguaacauugcauuucaagcaauaugaauucaacucccccccaaacaaccaagugaugcugugugaaccaacaauaauagaaagaaacauaacagagauaguguaucuaaccaacaccaccauagagaaggaaauaugccccaaaccagcagaauacagaaauuggucaaaaccgcaauguggcauuacaggauuugcaccuuucucuaaggacaauucgauuaggcuauccgcugguggggacaucugggugacaagagaaccuuaugugucaugcgauccugacaaguguuaucaauuugcccuuggacagggaacaacacuaaacaacgugcauucaaauaacacaguacgugauaggaccccuuaucggacucuauugaugaaugaguuggguguuccuuuucaucuggggaccaagcaagugugcauagcaugguccagcucgaguugucacgauggaaaagcauggcugcauguuuguauaacgggggaugauaaaaaugcaacugcuagcuuuauuuacaaugggaggcuuguagauaguguuguuucaugguccaaagaaauucucaggacccaggagucagaaugcguuuguaucaauggaacuuguacaguaguaaugacugauggaagugcuucagggaaagcugauacuaaaauacuauucauugaggaggggaaaaucguucauacuagcacauugucaggaagugcucagcaugucgaagagugcucuugcuauccucgauauccuggugucagaugugucugcagagacaacuggaaaggcuccaaucggcccaucguagauauaaacauaaaggaucauagcauuguuuccaguuauguguguucaggacuuguuggagacacacccagaaaaaacgacagcuccagcaguagccauuguuuggauccuaacaaugaagaagguggucauggagugaaaggcugggccuuugaugauggaaaugacguguggaugggaagaacaaucaacgagacgucacgcuuaggguaugaaaccuucaaagucauugaaggcugguccaacccuaaguccaaauugcagauaaauaggcaggucauaguugacagaggugauagguccgguuauucugguauuuucucuguugaaggcaaaagcugcaucaaucggugcuuuuauguggaguugauuaggggaagaaaagaggaaacugaagucuuguggaccucaaacaguauuguuguguuuuguggcaccucagguacauauggaacaggcucauggccugauggggcggaccucaaucucaugccuauauaa

SEQ ID NO: 56851 - RNA, 1410 nt, Artificial Sequence
  derived and/or modified CDS sequence (wt) from neuraminidase__InfluenzaA__AHL97123
augaauccaaaucaaaagauaauaacgauuggcucuguuucucucaccauuuccacaauaugcuucuucaugcaaauugccaucuugauaacuacuguaacauugcauuucaagcaauaugaauucgacucccccccaaacaaccaagugaugcugugugaaccaacaauaauagaaagaaacauaacagagauaguguaucugaccaacaccaccauagagaaggaaauaugccccaaaccagcagaauacagaaauuggucaaaaccgcaauguggcauuacaggauuugcaccuuucucuaaggacaauucgauuaggcuuuccgcugguggggacaucugggugacaagagaaccuuaugugucaugcgauccugacaaguguuaucaauuugcccuuggacagggaacaacacuaaacaacgugcauucaaauaacacaguacgugauaggaccccuuaucggacucuauugaugaaugaguuggguguuccuuuucaucuggggaccaagcaagugugcauagcaugguccagcucaaguugucacgauggaaaagcauggcugcauguuuguauaacgggggaugauaaaaaugcaacugcuagcuucauuuacaaugggaggcuuguagauaguguuguuucaugguccaaagaaauucucaggacccaggagucagaaugcguuuguaucaauggaacuuguacaguaguaaugacugauggaagugcuucaggaaaagcugauacuaaaauacuauucauugaggaggggaaaaucguucauacuagcacauugucaggaagugcucagcauguugaagagugcucuugcuauccucgauauccuggugucagaugugucugcagagacaacuggaaaggcuccaaucggcccaucguagauauaaacauaaaggaucauagcauuguuuccaguuauguguguucaggacuuguuggagacacacccagaagaaacgacagcuccagcaguagccauuguuuggauccuaacaaugaagaagguggucauggagugaaaggcugggccuuugaugauggaaaugacguguggaugggaagaacaaucaacgagacgucacgcuuaggguaugaaaccuucaaagucauugaaggcugguccaacccuaaguccaaauugcagauaaauaggcaagucauaguugacagaggugauagguccgguuauucugguauuuucucuguugaaggcaaaagcugcaucaaucggugcuuuuauguggaguugauuaggggaagaaaagaggaaacugaagucuuguggaccucaaacaguauuguuguguuuuguggcaccucagguacauauggaacaggcucauggccugauggggcggaccucaaccucaugccuauauaa

SEQ ID NO: 56852 - RNA, 1410 nt, Artificial Sequence; identical to SEQ ID NO: 55915
  derived and/or modified CDS sequence (wt) from neuraminidase__InfluenzaA__AHL97135

SEQ ID NO: 56853 - RNA, 1410 nt, Artificial Sequence
  derived and/or modified CDS sequence (wt) from neuraminidase__InfluenzaA__AHL97147
augaauccaaaucaaaagauaauaacgauuggcucuguuucucucaccauuuccacaauaugcuucuucaugcaaauugccaucuugauaacuacuguaacauugcauuucaagcaauaugaauucaacucccccccaaacaaccaagugaugcugugugaaccaacaauaauagaaagaaacauaacagagauaguguaucugaccaacaccaccauagagaaggaaauaugccccaaaccagcagaauacagaaauuggucaaaaccgcaauguggcauuacaggauuugcaccuuucucuaaggacaauucgauuaggcuuuccgcugguggggacaucugggugacaagagaaccuuaugugucaugcgauccugacaaguguuaucaauuugcccuuggacagggaacaacacuaaacaacgugcauucaaauaacacaguacgugauaggaccccuuaucggacucuauugaugaaugaguuggguguuccuuuucaucuggggaccaagcaagugugcauagcaugguccagcucaaguugucacgauggaaaagcauggcugcauguuugcauaacgggggaugauaaaaaugcaacugcuagcuucauuuacaaugggaggcuuguagauaguguuguuucaugguccaaagaaauucucaggacccaggagucagaaugcguuuguaucaauggaacuuguacaguaguaaugacugauggaagugcuucaggaaaagcugauacuaaaauacuauucauugaggagggaaaaaucguucauacuagcacauugucaggaagugcucagcaugucgaagagugcucuugcuauccucgauauccuggugucagaugugucugcagagacaacuggagaggcuccaaucggcccaucguagauauaaacauaaaggaucauagcauuguuuccaguuauguguguucaggacuuguuggagacacacccagaaaaaacgacagcuccagcaguagccauuguuuggauccuaacaaugaagaagguggucauggagugaaaggcugggccuuugaugauggaaaugacguguggaugggaagaacaaucaacgagacgucacgcuuaggguaugaaaccuucaaagucauugaaggcugguccaacccuaaguccaaauugcagauaaauaggcaagucauaguugacagaggugauagguccgguuauucugguauuuucucuguugaaggcaaaagcugcaucaaucggugcuuuuauguggaguugauuaggggaagaaaagaggaaacugaagucuuguggaccucaaacaguauuguuguguuuuguggcaccucagguacauauggaacaggcucauggccugauggggcggaccucaaucucaugccuauauaa

SEQ ID NO: 56854 - RNA, 1410 nt, Artificial Sequence
  derived and/or modified CDS sequence (wt) from neuraminidase__InfluenzaA__AHL97159
augaauccaaaucaaaagauaauaacgauuggcucuguuucucucaccauuuccacaauaugcuucuucaugcaaauugccaucuugauaacuacuguaacauugcauuucaagcaauaugaauucaacucccccccaaacaaccaagugaugcugugugaaccaacaauaauagaaagaaacauaacagagauaguguaucugaccaacaccaccauagagaaggaaauaugccccaaaccagcagaauacagaaauuggucaaaaccgcaauguggcauuacaggauucgcaccuuucucuaaggacaauucgauuaggcuuuccgcugguggggacaucugggugacaagagaaccuuaugugucaugcgauccugacaaguguuaucaauuugcccuuggacagggaacaacacuaaacaacgugcauucaaauaacacaguacgugauaggaccccuuaucggacucuauugaugaaugaguuggguguuccuuuucaucuggggaccaagcaagugugcauagcaugguccagcucaaguugucacgauggaaaagcauggcugcauguuuguauaacgggggaugauaaaaaugcaacugcuagcuucauuuacaaugggaggcuuguagauaguguuguuucaugguccaaagaaauucucaggacccaggagucagaaugcguuuguaucaauggaacuuguacaguaguaaugacugauggaagugcuucaggaaaagcugauacuaaaauacuauucauugaggaggggaaaaucguucauacuagcacauugucaggaagugcucagcaugucgaagagugcucuugcuauccucgauauccuggugucagaugugucugcagagacaacuggaaaggcuccaaucggcccaucguagauauaaacauaaaggaucauagcauuguuuccaguuauguguguucaggacuuguuggagacacacccagaaaaaacgacagcuccagcaguagccauuguuuggauccuaacaaugaagaagguggucauggagugaaaggcugggccuuugaugauggaaaugacguguggaugggaagaacaaucaacgagacgucacgcuuaggguaugaaaccuucaaagucauugaaggcugguccaacccuaaguccaaauugcagauaaauaggcaagucauaguugacagaggugauagguccgguuauucugguauuuucucuguugaaggcaaaagcugcaucaaucggugcuuuuauguggaguugauuaggggaagaaaagaggaaacugaagucuuguggaccucaaacaguauuguuguguuuuguggcaccucagguacauauggaacaggcucauggccugauggggcggaccucaaucucaugccuauauaa

SEQ ID NO: 56855 - RNA, 1410 nt, Artificial Sequence; identical to SEQ ID NO: 55865
  derived and/or modified CDS sequence (wt) from neuraminidase__InfluenzaA__AHL97171

SEQ ID NO: 56856 - RNA, 1410 nt, Artificial Sequence; identical to SEQ ID NO: 55880
  derived and/or modified CDS sequence (wt) from neuraminidase__InfluenzaA__AHL97183

SEQ ID NO: 56857 - RNA, 1410 nt, Artificial Sequence; identical to SEQ ID NO: 55865
  derived and/or modified CDS sequence (wt) from neuraminidase__InfluenzaA__AHL97195

SEQ ID NO: 56858 - RNA, 1410 nt, Artificial Sequence; identical to SEQ ID NO: 55865
  derived and/or modified CDS sequence (wt) from neuraminidase__InfluenzaA__AHL97207

SEQ ID NO: 56859 - RNA, 1410 nt, Artificial Sequence; identical to SEQ ID NO: 55880
  derived and/or modified CDS sequence (wt) from neuraminidase__InfluenzaA__AHL97219

SEQ ID NO: 56860 - RNA, 1410 nt, Artificial Sequence
  derived and/or modified CDS sequence (wt) from neuraminidase__InfluenzaA__AHL97231
augaauccaaaucaaaagauaauaacgauuggcucuguuucucucaccauuuccacaauaugcuucuucaugcaaauugccaucuugauaacuacuguaacauugcauuucaagcaauaugacuucaacuccccuccaaacaaccaagugaugcugugugaaccaacaauaauagaaagaaacauaacagagauaguguaucugaccaacaccaccauagagaaggaaauaugccccaaaccagcagaauacagaaauuggucaaaaccgcaauguggcauuacaggauuugcaccuuucucuaaggacaauucgauuaggcuuuccgcugguggggacaucugggugacaagagaaccuuaugugucaugcgauccugacaaguguuaucaauuugcccuuggacagggaacaacccuaaacaacgugcauucaaauaacacaguacgugauaggaccccuuaucggacucuauugaugaaugaguuggguguuccuuuucaucuggggaccaagcaagugugcauagcaugguccagcucaaguugucacgauggaaaagcauggcugcauguuuguauaacgggggaugauaaaaaugcaacugcuagcuucauuuacaaugggaggcuuguagauaguguuguuucaugguccaaagaaauucucaggacccaggagucagaaugcguuuguaucaauggaacuuguacaguaguaaugacugauggaagugcuucaggaaaagcugauaccaaaauacuauucauugaggaggggaaaaucguucauacuagcacauugucaggaagugcucagcaugucgaagagugcucuugcuauccucgauauccuggugucagaugugucugcagagacaacuggaaaggcuccaauaggcccaucguagauauaaacauaaaggaucauagcguuauuuccaguuauguguguucaggacuuguuggagacacacccagaaaaaacgacagcuccagcaguagccauuguuuggauccuaacaaugaagaagguggucauggagugaaaggcugggccuuugaugauggaaaugacguguggaugggaagaacaaucaaugagacgucacgcuuaggguaugaaaccuucaaagucauuggaggcugguccaacccuaaguccaaauugcagauaaauaggcaagucauaguugacagaggugauagguccgguuauucugguauuuucucuguugaaggcaaaagcugcaucaaucggugcuuuuauguggaguugauuaggggaagaaaagaggaaacugaagucuuguggaccucaaacaguauuguuguguuuuguggcaccucagguacauauggaacaggcucauggccugauggggcggaccucaaucucaugccuauauaa

SEQ ID NO: 56861 - RNA, 1410 nt, Artificial Sequence
  derived and/or modified CDS sequence (wt) from neuraminidase__InfluenzaA__AHL97243
augaauccaaaucaaaagauaauaacgauuggcucuguuucucucaccauuuccacaauaugcuucuucaugcaaauugccaucuugauaacuacuguaacauugaauuucaagcaauaugaauucaacucccccccaaacaaccaagugaugcugugugaaccaacaauaauagaaagaaacauaacagagauaguguaucugaccaacaccaccauagagaaggaaauaugccccaaaccagcagaauacagaaauuggucaaaaccgcaauguggcauuacaggauuugcaccuuucucuaaggacaauucgauuaggcuuuccgcugguggggacaucugggugacaagagaaccuuaugugucaugcgauccugacaaguguuaucaauuugcccuuggacagggaacaacacuaaacaacgugcauucaaauaacacaguacgugauaggaccccuuaucggacucuauugaugaaugaguuggguguuccuuuucaucuggggaccaagcaagugugcauagcaugguccagcucaaguugucacgauggaaaagcauggcugcauguuugcauaacgggggaugauaaaaaugcaacugcuagcuucauuuacaaugggaggcuuguagauaguguuguuucaugguccaaagaaauucucaggacccaggagucagaaugcguuuguaucaauggaacuuguacaguaguaaugacugauggaagugcuucaggaaaagcugauacuaaaauacuauucauugaggagggaaaaaucguucauacuagcacauugucaggaagugcucagcaugucgaagagugcucuugcuauccucgauauccuggugucagaugugucugcagagacaacuggaaaggcuccaaucggcccaucguagauauaaacauaaaggaucauagcauuguuuccaguuauguguguucaggacuuguuggagacacacccagaaaaaacgacagcuccagcaguagccauuguuuggauccuaacaaugaagaagguggucauggagugaaaggcugggccuuugaugauggaaaugacguguggaugggaagaacaaucaacgagacgucacgcuuaggguaugaaaccuucaaagucauugaaggcugguccaacccuaaguccaaauugcagauaaauaggcaagucauaguugacagaggugauagguccgguuauucugguauuuucucuguugaaggcaaaagcugcaucaaucggugcuuuuauguggaguugauuaggggaagaaaagaggaaacugaagucuuguggaccucaaacaguauuguuguguuuuguggcaccucagguacauauggaacaggcucauggccugauggggcggaccucaaucucaugccuauauaa

SEQ ID NO: 56862 - RNA, 1410 nt, Artificial Sequence; identical to SEQ ID NO: 55976
  derived and/or modified CDS sequence (wt) from neuraminidase__InfluenzaA__AHL97255

SEQ ID NO: 56863 - RNA, 1410 nt, Artificial Sequence
  derived and/or modified CDS sequence (wt) from neuraminidase__InfluenzaA__AHL97267
augaauccaaaucaaaagauaauaacgauuggcucuguuucucucaccauuuccacaauaugcuucuucaugcaaauugccaucuugauaacuacuguaacauugcauuucaagcaauaugaauucaacucccccccaaacaaccaagugaugcugugugaaccaacaauaauagaaagaaacauaacagagauaguguauuugaccaacaccaccauagagaaggaaauaugccccaaaccagcagaauacagaaauuggucaaaaccgcaauguggcauuacaggauuugcaccuuucucuaaggacaauucgauuaggcuuuccgcugguggggacaucugggugacaagagaaccuuaugugucaugcgauccugacaaguguuaucaauuugcccuuggacagggaacaacacuaaacaacgugcauucaaauaacacagcacgugauaggaccccuuaucggacucuauugaugaaugaguuggguguuccuuuucaucuggggaccaagcaaguaugcauagcaugguccagcucaaguugucacgauggaaaagcauggcugcauguuuguauaacgggggaugauaaaaaugcaacugcuagcuucauuuacaaugggaggcuuguagauaguguuguuucaugguccaaagaaauucucaggacccaggagucagaaugcguuuguaucaauggaacuuguacaguaguaaugacugauggaagugcuucaggaaaagcugauacuaaaauacuauucauugaggaggggaaaaucguucauacuagcacauugucaggaagugcucagcaugucgaagagugcucuugcuauccucgauauccuggugucagaugugucugcagagacaacuggaaaggcuccaaucggcccaucguagauauaaacauaaaggaucauagcauuguuuccaguuauguguguucaggacuuguuggagacacacccagaaaaaacgacagcuucagcaguagccauuguuuggauccuaacaaugaagaagguggucauggagugaaaggcugggccuuugaugauggaaaugacguauggaugggaagaacaaucaacgagacaucacgcuuaggguaugaaaccuucaaagucauugaaggcugguccaacccuaaguccaaauugcagauaaauaggcaagucauaguugacagaggugauagguccgguuauucugguauuuucucuguugaaggcaaaagcugcaucaaucggugcuuuuauguggaguugauuaggggaagaaaagaggaaacggaagucuuguggaccucaaacaguauuguuguguuuuguggcaccucagguacauauggaacaggcucauggccugauggggcggaccucaaucucaugccuauauaa

SEQ ID NO: 56864 - RNA, 1410 nt, Artificial Sequence; identical to SEQ ID NO: 55865
  derived and/or modified CDS sequence (wt) from neuraminidase__InfluenzaA__AHL97279

SEQ ID NO: 56865 - RNA, 1410 nt, Artificial Sequence
  derived and/or modified CDS sequence (wt) from neuraminidase__InfluenzaA__AHL97291
augaauccaaaucaaaagauaauaacgauuggcucuguuucucucaccauuuccacaauaugcuucuucaugcaaauugccaucuugauaacuacuguaacauugcauuucaagcaauaugaauucaacucccccccaaacaaccaagugaugcugugugaaccaacaauaauagaaagaaacauaacagagauaguguauuugaccaacaccaccauagagaaggaaauaugccccaaaccagcagaauacagaaauuggucaaaaccgcaauguggcauuacaggauuugcaccuuucucuaaggacaauucgauuaggcuuuccgcugguggggacaucugggugacaagagaaccuuaugugucaugcgauccugacaaguguuaucaauuugcccuuggacagggaacaacacuaaacaacgugcauucaaauaacacagcacgugauaggaccccuuaucggacucuauugaugaaugaguuggguguuccuuuucaucuggggaccaagcaagugugcauagcaugguccagcucaaguugucacgauggaaaagcauggcugcauguuuguauaacgggggaugauaaaaaugcaacugcuagcuucauuuacaaugggaggcuuguagauaguguuguuucaugguccaaagaaauucucaggacccaggagucagaaugcguuuguaucaauggaacuuguacaguaguaaugacugauggaagugcuucaggaaaagcugauacuaaaauacuauucauugaggaggggaaaaucguucauacuagcacauugucaggaagugcucagcaugucgaagagugcucuugcuauccucgauauccuggugucagaugugucugcagagacaacuggaaaggcuccaaucggcccaucguagauauaaacauaaaggaucauagcauuguuuccaguuauguguguucaggacuuguuggagacacacccagaaaaaacgacagcuccagcaguagccauuguuuggauccuaacaaugaagaagguggucauggagugaaaggcugggccuuugaugauggaaaugacguauggaugggaagaacaaucaacgagacgucacgcuuaggguaugaaaccuucaaagucauugaaggcugguccaacccuaaguccaaauugcagauaaauaggcaagucauaguugacagaggugauagguccgguuauucugguauuuucucuguugaaggcaaaagcugcaucaaucggugcuuuuauguggaguugauuaggggaagaaaagaggaaacugaagucuuguggaccucaaacaguauuguuguguuuuguggcaccucagguacauauggaacaggcucauggccugauggggcggaccucaaucucaugccuauauaa

SEQ ID NO: 56866 - RNA, 1410 nt, Artificial Sequence
  derived and/or modified CDS sequence (wt) from neuraminidase__InfluenzaA__AHL97303
augaauccaaaucaaaagauaauaacgauuggcucuguuucucucaccauuuccacaauaugcuucuucaugcaaauugccaucuugauaacuacuguaacauugcauuucaagcaauaugaauucaacucccccccaaacaaccaagugaugcugugugaaccaacaauaauagaaagaaacauaacagagauaguguaucugaccaacaccaccauagagaaggaaauaugccccaaaccagcagaauacagaaauuggucaaaaccgcaauguggcauuacaggauuugcaccuuucucuaaggacaauucgauuaggcuuuccgcugguggggacaucugggugacaagagaaccuuaugugucaugcgaucccgacaaguguuaucaauuugcccuuggacagggaacaacacuaaacaacgugcauucaaauaacacaguacgugauaggaccccuuaucggacucuauugaugaaugaguuggguguuccuuuucaucuggggaccaagcaagugugcauagcaugguccagcucaaguugucacgauggaaaagcauggcugcauguuuguauaacgggggaugauaaaaaugcaacugcuagcuucauuuacaaugggaggcuuguagauaguguuguuucaugguccaaagaaauucucaggacccaggagucagaaugcguuuguaucaauggaacuuguacaguaguaaugacugauggaagugcuucaggaaaagcugauacuaaaauacuauucauugaggaggggaaaaucguucauacuagcacauugucaggaagugcucagcaugucgaagagugcucuugcuauccucgauauccuggugucagaugugucugcagagacaacuggaaaggcuccaaucggcccaucguagauauaaacauaaaggaucauagcauuguuuccaguuauguguguucaggacuuguuggagacacacccagaaaaaacgacaucuccagcaguagccauuguuuggauccuaacaaugaagaagguggucauggagugaaaggcugggccuuugaugauggaaaugacguguggaugggaagaacaaucaacgagacgucacgcuuaggguaugaaaccuucaaagucauugaaggcugguccaacccuaaguccaaauugcagauaaauagacaagucauaguugacagaggugauagguccgguuauucugguauuuucucuguugaaggcaaaagcugcaucaaucggugcuuuuauguggaguugauuaggggaagaaaagaggaaacugaagucuuguggaccucaaacaguauuguuguguuuuguggcaccucagguacauauggaacaggcucauggccugauggggcggaccucaaucucaugccuauauaa

SEQ ID NO: 56867 - RNA, 1410 nt, Artificial Sequence
  derived and/or modified CDS sequence (wt) from neuraminidase__InfluenzaA__AHL97339
augaauccaaaucaaaagauaauaacgauuggcucuguuucucucaccauuuccacaauaugcuucuucaugcaaauugccaucuugauaacuacuguaacauugcauuucaagcaauaugaauucgacucccccccaaacaaccaagugaugcugugugaaccaacaauaauagaaagaaacauaacagagauaguguaucugaccaacaccaccauagagaaggaaauaugccccaaaccagcagaauacagaaauuggucaaaaccgcaauguggcauuacaggauuugcaccuuucucuaaggacaauucgauuaggcuuuccgcugguggggacaucugggugacaagagaaccuuaugugucaugcgauccugacaaguguuaucaauuugcccuuggacagggaacaacacuaaacaacgugcauucaaauaacacaguacgugauaggaccucuuaucggacucuauugaugaaugaguuggguguuccuuuucaucuggggaccaagcaagugugcauagcaugguccagcucaaguugucacgauggaaaagcauggcugcauguuuguauaacgggggaugauaaaaaugcaacugcuagcuucauuuacaaugggaggcuuguagauaguguuguuucaugguccaaagaaauucucaggacccaggagucagaaugcguuuguaucaauggaacuuguacaguaguaaugacugauggaagugcuucaggaagagcugauacuaaaauacuauucauugaggaggggaaaaucguucauacuagcacauugucaggaagugcucagcauguugaagagugcucuugcuauccucgauauccuggugucagaugugucugcagagacaacuggaaaggcuccaaucggcccaucguagauauaaacauaaaggaucauagcauuguuucaaguuauguguguucaggacuuguuggagacacacccagaaaaaacgacagcuccagcaguagccauuguuuggauccuaacaaugaagaagguggucauggagugaaaggcugggccuuugaugauggaaaugacguguggaugggaagaacaaucaacgagacgucacgcuuaggguaugaaaccuucaaagucauugaaggcugguccaacccuaaguccaaauugcagauaaauaggcaagucauaguugacagaggugauagguccgguuauucugguauuuucucuguugaaggcaaaagcugcaucaaucggugcuuuuauguggaguugauuaggggaagaaaagaggaaacugaagucuuguggaccucaaacaguauuguuguguuuuguggcaccucagguacauauggaacaggcucauggccugauggggcggaccucaaccucaugccuauauaa

SEQ ID NO: 56868 - RNA, 1410 nt, Artificial Sequence; identical to SEQ ID NO: 55883
  derived and/or modified CDS sequence (wt) from neuraminidase__InfluenzaA__AHL97351

SEQ ID NO: 56869 - RNA, 1410 nt, Artificial Sequence; identical to SEQ ID NO: 56865
  derived and/or modified CDS sequence (wt) from neuraminidase__InfluenzaA__AHL97363

SEQ ID NO: 56870 - RNA, 1410 nt, Artificial Sequence; identical to SEQ ID NO: 55877
  derived and/or modified CDS sequence (wt) from neuraminidase__InfluenzaA__AHL97387

SEQ ID NO: 56871 - RNA, 1410 nt, Artificial Sequence
  derived and/or modified CDS sequence (wt) from neuraminidase__InfluenzaA__AHL97399
augaauccaaaucaaaagauaauaacgauuggcucuguuucucucaccauuuccacaauaugcuucuucaugcaaauugccaucuugauaacuacuguaacauugcauuucaagcaauaugaauucaacucccccccaaacaaccaagugaugcugugugaaccaacaauaauagaaagaaacauaacagagauaauguauuugaccaacaccaccauagagaaggaaauaugccccaaaccagcagaauacagaaauuggucaaaaccgcaauguggcauuacaggauuugcaccuuucucuaaggacaauucgauuaggcuuuccgcugguggggacaucugggugacaagagaaccuuaugugucaugcgauccugacaaguguuaucaauuugcccuuggacagggaacaacacuaaacaacaugcauucaaauaacacaguacgugauaggaccccuuaucggacucuauugaugaaugaguuggguguuccuuuucaucuggggaccaagcaagugugcauagcaugguccagcucaaguugucacgauggaaaagcauggcugcauguuuguauaacgggggaugauaaaaaugcaacugcuagcuucauuuacaaugggaggcuuguagauaguguuguuucaugguccaaagaaauucucaggacccaggagucagaaugcguuuguaucaauggaacuuguacaguaguaaugacugauggaagugcuucaggaaaagcugauacuaaaauauuauucauugaggaggggaaaaucguucauacuagcacauugucaggaagugcucagcaugucgaagagugcucuugcuauccucgauauccuggugucagaugugucugcagagacaacuggaaaggcuccaaucggcccaucguagauauaaacauaaaggaucauagcauugucuccaguuauguguguucaggacuuguuggagacacacccagaaaaaacgacagcuccagcaguagccauuguuuggauccuaacaaugaagaagguggucauggagugaaaggcugggccuuugaugauggaaaugacguguggaugggaagaacaaucaacgagacgucacgcuuaggguaugaaaccuucaaagucauugaaggcugguccaacccuaaguccaaauugcagauaaauaggcaagucauaguugacagaggugauagguccgguuauucugguauuuucucuguugaaggcagaagcugcaucaaucggugcuuuuauguggaguugauuaggggaagaaaagaggaaacugaagucuuguggaccucaaacaguauuguuguguuuuguggcaccucagguacauauggaacaggcucauggccugauggggcggaccucaaucucaugccuauauaa

SEQ ID NO: 56872 - RNA, 1410 nt, Artificial Sequence; identical to SEQ ID NO: 55976
  derived and/or modified CDS sequence (wt) from neuraminidase__InfluenzaA__AHL97411

SEQ ID NO: 56873 - RNA, 1410 nt, Artificial Sequence
  derived and/or modified CDS sequence (wt) from neuraminidase__InfluenzaA__AHL97423
augaauccaaaucaaaagauaauaacgauuggcucuguuucucucaccauuuccacaauaugcuucuucaugcaaauugccaucuugauaacuacuguaacauugcauuucaagcaauaugaauucaacucccccccaaacaaccaagugaugcugugugaaccaacaauaauagaaagaaacauaacagagauaguguaucugaccaacaccaccauagagaaggaaauaugccccaaaccagcagaauacagaaauuggucaaaaccgcaauguggcauuacaggauuugcaccuuucucuaaggacaauucgauuaggcuuuccgcugguggggacaucugggugacaagagaaccuuaugugucaugcgaucccgacaaguguuaucaauuugcccuuggacagggaacaacacuaaacaacgugcauucaaauaacacaguacgugauaggaccccuuaucggacucuauugaugaaugaguuggguguuccuuuucaucuggggaccaagcaagugugcauagcaugguccagcucaaguugucacgauggaaaagcauggcugcauguuuguauaacgggggaugauaaaaaugcaacugcuagcuucauuuacaaugggaggcuuguagauaguguuguuucaugguccaaagaaauucucaggacccaggagucagaaugcguuuguaucaauggaacuuguacaguaguaaugacugauggaagugcuucaggaaaagcugauacuaaaauacuauucauugaggaggggaaaaucguucauacuagcacauugucaggaagugcucagcaugucgaagagugcucuugcuauccucgauauccuggugucagaugugucugcagagacaacuggaaaggcuccaaucggcccaucguagauauaaacauaaaggaucauagcauuguuuccaguuauguguguucaggacuuguuggagacacacccagaaaaaacgacagcuccagcaguagccauuguuuggauccuaacaaugaagaagguggucauggagugaaaggcugggccuuugaugauggaaaugacauguggaugggaagaacaaucaacgagacgucacgcuuaggguaugaaaccuucaaagucauugaaggcugguccaacccuaaguccaaauugcagauaaauaggcaagucauaguugacagaggugauagguccgguuauucugguauuuucucuguugaaggcaaaagcugcaucaaucggugcuuuuauguggaguugauuaggggaagaaaagaggaaacugaagucuuguggaccucaaacaguauuguuguguuuuguggcaccucagguacauauggaacaggcucauggccugauggggcggaccucaaucucaugccuauauaa

SEQ ID NO: 56874 - RNA, 1410 nt, Artificial Sequence
  derived and/or modified CDS sequence (wt) from neuraminidase__InfluenzaA__AHL97447
augaauccaaaucaaaagauaauaacgauuggcucuguuucucucaccauuuccacaauaugcuucuucaugcaaauugccaucuugauaacuacuguaacauugcauuucaagcaauaugaauucaacucccccccaaacaaccaagugaugcugugugaaccaacaauaauagaaagaaacauaacagagauaguguaucugaccaacaccaccauagagaaggaaauaugccccaaaccagcagaauacagaaauuggucaaaaccgcaauguggcauuacaggauuugcaccuuucucuaaggacaauucgauuaggcuuuccgcugguggggacaucugggugacaagagaaccuuaugugucaugcgauccugacaaguguuaucaauuugcccuuggacagggaacaacacuaaacaacgugcauucaaauaacacaguacgugauaggaccccuuaucggacucuauugaugaaugaguuggguguuccuuuucaucuggggaccaagcaagugugcauagcaugguccagcucaaguugucacgauggaaaagcauggcugcauguuugcauaacgggggaugauaaaaaugcaacugcuagcuucauuuacaaugggaggcuuguagauaguguuguuucaugguccaaagaaauucucaggacccaggagucagaaugcguuuguaucaauggaacuuguacaguaguaaugacugauggaagugcuucaggaaaagcugauacuaaaauacuauucauugaggagggaaaaaucguucauacuagcacauugucaggaagugcucagcaugucgaagagugcucuugcuauccucgauauccuggugucagaugugucugcagagacaacuggaaaggcuccaaucggcccaucguagauauaaacauaaaggaucauagcauuguuuccaguuauguguguucaggacuuguuggagacacacccagaaaaaacgacagcuucagcaguagccauuguuuggauccuaacaaugaagaagguggucauggagugaaaggcugggccuuugaugauggaaaugacguguggaugggaagaacaaucaacgagacgucacgcuuaggguaugaaaccuucaaagucauugaaggcugguccaacccuaaguccaaauugcagauaaauaggcaagucauaguugacagaggugauagguccgguuauucugguauuuucucuguugaaggcaaaagcugcaucaaucggugcuuuuauguggaguugauuaggggaagaaaagaggaaacugaagucuuguggaccucaaacaguauuguuguguuuuguggcaccucagguacauauggaacaggcucauggccugauggggcggaccucaaucucaugccuauauaa

SEQ ID NO: 56875 - RNA, 1410 nt, Artificial Sequence; identical to SEQ ID NO: 55880
  derived and/or modified CDS sequence (wt) from neuraminidase__InfluenzaA__AHL97459

SEQ ID NO: 56876 - RNA, 1410 nt, Artificial Sequence; identical to SEQ ID NO: 56865
  derived and/or modified CDS sequence (wt) from neuraminidase__InfluenzaA__AHL97471

SEQ ID NO: 56877 - RNA, 1410 nt, Artificial Sequence
  derived and/or modified CDS sequence (wt) from neuraminidase__InfluenzaA__AHL97483
augaauccaaaucaaaagauaauaacgauuggcucuguuucucucaccauuuccacaauaugcuucuucaugcaaauugccaucuugauaacuacuguaacauugcauuucaagcaauaugaauucgacucccccccaaacaaccaagugaugcugugugaaccaacaauaauagaaagaaacauaacagagauaguguaucugaccaacaccaccauagagaaggaaauaugccccaaaccagcagaauacagaaauuggucaaaaccgcaauguggcauuacaggauuugcaccuuucucuaaggacaauucgauuaggcuuuccgcugguggggacaucugggugacaagagaaccuuaugugucaugcgauccugacaaguguuaucaauuugcccuuggacagggaacaacacuaaacaacgugcauucaaauaacacaguacgugauaggaccccuuaucggacucuauugaugaaugaguuggguguuccuuuucaucuggggaccaagcaagugugcauagcaugguccagcucaaguugucacgauggaaaagcauggcugcauguuuguauaacgggggaugauaaaaaugcaacugcuagcuucauuuacaaugggaggcuuguagauaguguuguuucaugguccaaagaaauucucaggacccaggagucagaaugcguuuguaucaauggaacuuguacaguaguaaugacugauggaagugcuucaggaaaagcugauacuaaaauacuauucauugaggaggggaaaauaguucauacuagcacauugucaggaagugcucagcauguugaagagugcucuugcuauccucgauauccuggugucagaugugucugcagagacaacuggaaaggcuccaaucggcccaucguagauauaaacauaaaggaucauagcauuguuuccaguuauguguguucaggacuuguuggagacacacccagaaaaaacgacagcuccagcaguagccauuguuuggauccuaacaaugaagaagguggucauggagugaaaggcugggccuuugaugauggaaaugacguguggaugggaagaacaaucaacgagacgucacgcuuaggguaugaaaccuucaaagucauugaaggcugguccaacccuaaguccaaauugcagauaaauaggcaagucauaguugacagaggugauagguccgguuauucugguauuuucucuguugaaggcaaaagcugcaucaaucggugcuuuuauguggaguugauuaggggaagaaaagaggaaacugaagucuuguggaccucaaacaguauuguuguguuuuguggcaccucagguacauauggaacaggcucauggccugauggggcggaccucaaccucaugccuauauaa

SEQ ID NO: 56878 - RNA, 1410 nt, Artificial Sequence; identical to SEQ ID NO: 55865
  derived and/or modified CDS sequence (wt) from neuraminidase__InfluenzaA__AHL97496

SEQ ID NO: 56879 - RNA, 1410 nt, Artificial Sequence; identical to SEQ ID NO: 55880
  derived and/or modified CDS sequence (wt) from neuraminidase__InfluenzaA__AHL97508

SEQ ID NO: 56880 - RNA, 1410 nt, Artificial Sequence
  derived and/or modified CDS sequence (wt) from neuraminidase__InfluenzaA__AHL97520
augaauccaaaucaaaagauaauaacgauuggcucuguuucucucaccauuuccacaauaugcuucuucaugcaaauugccaucuugauaacuacuguaacauugcauuucaagcaauaugaauucaacucccccccaaacaaccaagugaugcugugugaaccaacaauaauagaaagaaacauaacagagauaguguauuugaccaacaccaccauagagaaggaaacaugccccaaaccagcagaauacagaaauuggucaaaaccgcaauguggcauuacaggauuugcaccuuucucuaaggacaauucgauuaggcuuuccgcugguggggacaucugggugacaagagaaccuuauguaucaugcgguccugacaaguguuaucaauuugcccuuggacagggaacaacacuaaacaacaugcauucaaauaacacaguacgugauaggaccccuuaucggacucuauugaugaaugaguuggguguuccuuuucaucuggggaccaagcaagugugcauagcaugguccagcucaaguugucacgauggaaaagcauggcugcauguuuguauaacaggggaugauaaaaaugcaacugcuagcuucauuuacaaugggaggcuuguagauaguguuguuucaugguccaaagaaauucucaggacccaggagucagaaugcguuuguaucaauggaacuuguacaguaguaaugacugauggaagugcuucaggaaaagcugauacuaaaauauuauucauugaggaggggaaaaucguucauacuagcacauugucaggaagugcucagcaugucgaagagugcucuugcuauccucgauauccuggugucagaugugucugcagagacaacuggaaaggcuccaaucggcccaucguagauauaaacauaaaggaucauagcauugucuccaguuauguguguucaggacuuguuggagacacacccagaaaaaacgacagcuccagcaguagccauuguuuggauccuaacaaugaagaagguggucauggagugaaaggcugggccuuugaugauggaaaugacguguggaugggaagaacaaucaacgagacgucacgcuuaggguaugaaaccuucaaagucauugaaggcugguccaacccuaaguccaaauugcagauaaauaggcaagucauaguugacagaggugauagguccgguuauucugguauuuucucuguugaaggcaaaagcugcaucaaucggugcuuuuauguggaguugauuaggggaagaaaagaggaaacugaagucuuguggaccucaaacaguauuguuguguuuuguggcaccucagguacauauggaacaggcucauggccugauggggcggaccucaaucucaugccuauauaa

SEQ ID NO: 56881 - RNA, 1410 nt, Artificial Sequence
  derived and/or modified CDS sequence (wt) from neuraminidase__InfluenzaA__AHL97532
augaauccaaaucaaaagauaauaacgauuggcucuguuucucucaccauuuccacaauaugcuucuucaugcaaauugccaucuugauaacuacuguaacauugcauuucaagcaguaugaauucaacucccccccaaacaaccaagugaugcugugugaaccaacaauaauagaaagaaacauaacagagauaguguaucugaccaacaccaccauagagaaggaaauaugccccaaaccagcagaauacagaaauuggucaaaaccgcaauguggcauuacaggauuugcaccuuucucuaaggacaauucgauuaggcuuuccgcugguggggacaucugggugacaagagaaccuuaugugucaugcgauccugacaaguguuaucaauuugcccuuggacagggaacaacacuaaacaacgugcauucaaauaacacaguacgugauaggaccccuuaucggacucuauugaugaaugaguuggguguuccuuuucaucuggggaccaagcaagugugcauagcaugguccagcucaaguugucacgauggaaaagcauggcugcauguuuguauaacgggggaugauaaaaaugcaacugcuagcuucauuuacaaugggaggcuuguagauaguguuguuucaugguccaaagaaauucucaggacccaggagucagaaugcguuuguaucaauggaacuuguacaguaguaaugacugauggaagugcuucaggaaaagcugauacuaaaauacuauucauugaggaggggaaaaucguucauacuagcacauugucaggaagugcucagcaugucgaagagugcucuugcuauccucgauauccuggugucagaugugucugcagagacaacuggaaaggcuccaaucggcccaucguagauauaaacauaaaggaucauagcauuguuuccaguuauguguguucaggacuuguuggagacacacccagaaaaaacgacagcuccagcaguagccauuguuuggauccuaacaacgaagaagguggucauggagugaaaggcugggccuuugaugauggaaaugacguguggaugggaagaacaaucaacgagacgucacgcuuaggguaugaaaccuucaaagucauugaaggcugguccaaccccaaguccaaauugcagauaaauaggcaagucauaguugacagaggugauagguccgguuauucugguauuuucucuguugaaggcaaaagcugcaucaaucggugcuuuuauguggaguugauuaggggaagaaaagaggaaacugaagucuuguggaccucaaacaguauuguuguguuuuguggcaccucagguacauauggaacaggcucauggccugauggggcggaccucaaucucaugccuauauaa

SEQ ID NO: 56882 - RNA, 1410 nt, Artificial Sequence; identical to SEQ ID NO: 55952
  derived and/or modified CDS sequence (wt) from neuraminidase__InfluenzaA__AHL97544

SEQ ID NO: 56883 - RNA, 1410 nt, Artificial Sequence; identical to SEQ ID NO: 55883
  derived and/or modified CDS sequence (wt) from neuraminidase__InfluenzaA__AHL97556

SEQ ID NO: 56884 - RNA, 1410 nt, Artificial Sequence
  derived and/or modified CDS sequence (wt) from neuraminidase__InfluenzaA__AHL97568
augaauccaaaucaaaagauaauaacgauuggcucuguuucucucaccauuuccgcaauaugcuucuucaugcaaauugccaucuugauaacuacuguaacauugcguuucaagcaauaugaauucaacucccccccaaacaaccaagugaugcugugugaaccaacaauaauagaaagaaacauaacagagauaguguaucuaaccaacaccaccauagagaaggaaauaugccccaaaccagcagaauacagaaauuggucaaagccgcagugugacauuacaggauuugcaccuuuuucuaaggacaauucgauuaggcuuuccgcugguggggacaucugggugacaagagaaccuuaugugucaugcgauccugacaaguguuaucaauuugcucuuggacagggaacaacacuaaccaacgugcauucaaauaacacaguacgugauaggaccccuuaucggacccuauugaugaaugaguuagguguuccuuuucaucuggggaccaagcaagugugcauagcauggucuagcucaaguugucacgauggaaaagcauggcugcauguuuguauaacgggggaugauaaaaaugcaacugcuagcuucauuuacaaugggaggcuuguagauaguguuguuucaugguccaaagaaauccucaggacccaggagucagaaugcguuuguaucaauggaacuuguacaguaguaaugacugaugggagugcuucaggaaaagcugauacuaaaauacuauucauugaggaggggaaaaucguucauacuagcacauugucaggaagugcucagcaugucgaggagugcucuugcuauccucgauauccuggugucagaugugucugcagagacaacuggaaaggcuccaauaggccuaucguagauauaaacauaaaggaucauagcauuguuuccagguauguguguucaggacuuguuggagacacacccagaaaaaacgacagcuccagcaguagccauuguuuggauccuaacaaugaagaagguggucauggagugaaaggcugggccuucgaugauggaaaugacguguggaugggaagaacgaucaacgagacgucacguuuaggguaugaaaccuucaaggucauugaaggcugguccaacccuaaguccaaauugcagauaaauaggcaggucauaguugacagaggugauagguccgguuauucugguauuuucucuguugaaggcaaaagcugcaucaaucggugcuuuuauguggaguugauuaggggaagaaaagaggaaacugaagucuuguggaccucaaacaguauuguuguguuuuguggcaccucagguacauauggaacaggcucauggccugauggggcggaccucaaucucaugccuauauaa

SEQ ID NO: 56885 - RNA, 1410 nt, Artificial Sequence
  derived and/or modified CDS sequence (wt) from neuraminidase__InfluenzaA__AHL97580
augaauccaaaucaaaagauaauaacgauuggcucuguuucucucaccauuuccacaauaugcuucuucaugcaaauugccaucuugauaacuacuguaacauugcauuucaagcaauaugaauucaacucccccccaaacaaccaagugaugcugugugaaccaacaauaauagaaagaaacauaacagagauaguguaucugaccaacaccaccauagagaaggaaauaugccccaaaccagcagaauacagaaauuggucaaaaccgcaauguggcauuacaggauuugcaccuuucucuaaggacaauucgauuaggcuuuccgcugguggggacaucugggugacaagagaaccuuaugugucaugcgauccugacaaguguuaucaauuugcccuuggacagggaacaacacuaaacaacgugcauucaaauaacacaguacgugauaggaccccuuaucggacucuauugaugaaugaguuggguguuccuuuucaucuggggacuaagcaagugugcauagcaugguccagcucaaguugucacgauggaaaagcauggcugcauguuuguauaacgggggaugauaaaaaugcaacugcuagcuucauuuacaaugggaggcuuguagauaguguuguuucaugguccaaagaaauucucaggacccaggagucagaaugcguuuguaucaauggaacuuguacaguaguaaugacugauggaagugcuucaggaaaagcugauacuaaaauacuauucauugaggaggggaaaaucguucauacuagcacauugucaggaagugcucagcaugucgaagagugcucuugcuauccucgauauccuggugucagaugugucugcagagacaacuggaaaggcuccaaucggcccaucguagauauaaacauaaaggaucauagcauuguuuccaguuauguguguucaggacuuguuggagacacacccagaaaaaacgacagcuccagcaguagccauuguuuggguccuaacaaugaagaagguggucauggagugaaaggcugggccuuugaugauggaaaugacguguggaugggaagaacaaucaacgagacgucacgcuuaggguaugaaacauucaaagucauugaaggcugguccaauccuaaguccaaauugcagauaaauaggcaagucauaguugacagaggugauagguccgguuauucugguauuuucucuguugaaggcaaaagcugcaucaaucggugcuuuuauguagaguugauuaggggaagaaaagaggaaacugaagucuuguggaccucaaacaguauuguuguguuuuguggcaccucagguacauauggaacaggcucauggccugauggggcggaccucaaucucaugccuauauaa

SEQ ID NO: 56886 - RNA, 1410 nt, Artificial Sequence
  derived and/or modified CDS sequence (wt) from neuraminidase__InfluenzaA__AHL97592
augaauccaaaucaaaagauaauaacgauuggcucuguuucucucaccauuuccacaauaugcuucuucaugcaaauugccaucuugauaacuacuguaacauugcauuucaagcaauaugaauucaacucccccccaaacaaccaagugaugcugugugaaccaacaauaauagaaagaaacauaacagagauaguguaucugaccaacaccaccauagagaaggaaauaugccccaaaccagcagaauacagaaauuggucaaaaccgcaauguggcauuacaggauuugcaccuuucucuaaggacaauucgguuaggcuuuccgcugguggggacaucugggugacaagagaaccuuaugugucaugcgauccugacaaguguuaucaauuugcccuuggacagggaacaacacuaaacaacgugcauucaaauaacacaguacgugauaggaccccuuaucggacucuauugaugaaugaguuggguguuccuuuucaucuggggaccaagcaagugugcauagcaugguccagcucaaguugucacgauggaaaagcauggcugcauguuuguauaacgggggaugauaaaaaugcaacugcuagcuucauuuacaaugggaggcuuguagauaguguuguuucaugguccaaagaaauucucaggacccaggagucagaaugcguuuguaucaauggaacuuguacaguaguaaugacugauggaagugcuucaggaaaagcugauacuaaaauacuauucauugaggaggggaaaaucguucauacuagcacauugucaggaagugcucagcaugucgaagagugcucuugcuauccucgauauccuggugucagaugugucugcagagacaacuggaaaggcuccaaucggcccaucguagauauaaacauaaaggaucauagcauuguuuccaguuauguguguucaggacuuguuggagacacacccagaaaaaacgacagcuccagcaguagccauuguuuggguccuaacaaugaagaagguggucauggagugaaaggcugggccuuugaugauggaaaugacguguggaugggaagaacaaucaacgagacgucacgcucaggguaugaaacauucaaagucauugaaggcugguccaauccuaaguccaaauugcagauaaauaggcaagucauaguugacagaggugauagguccgguuauucugguauuuucucuguugaaggcaaaagcugcaucaaucggugcuuuuauguagaguugauuaggggaagaaaagaggaaacugaagucuuguggaccucaaacaguauuguuguguuuuguggcaccucagguacauauggaacaggcucauggccugauggggcggaccucaaucucaugccuauauaa

SEQ ID NO: 56887 - RNA, 1410 nt, Artificial Sequence; identical to SEQ ID NO: 55865
  derived and/or modified CDS sequence (wt) from neuraminidase__InfluenzaA__AHL97604

SEQ ID NO: 56888 - RNA, 1410 nt, Artificial Sequence
  derived and/or modified CDS sequence (wt) from neuraminidase__InfluenzaA__AHL97616
augaauccaaaucaaaagauaauaacgauuggcucuguuucucucaccauuuccacaauaugcuucuucaugcaaauugccaucuugauaacuacuguaacauugcauuucaagcaauaugaauucaacucccccccaaacaaccaagugaugcugugugaaccaacaauaauagaaagaaacauaacagagauaguguauuugaccaacaccaccauagagaaggaaauaugccccaaaccagcagaauacagaaauuggucaaaaccgcaauguggcauuacaggauuugcaccuuucucuaaggacaauucgauuaggcuuuccgcugguggggacaucugggugacaagagaaccuuaugugucaugcgauccugacaaguguuaucaauuugcccuuggacagggaacaacacuaaacaacaugcauucaaauaacacaguacgugauaggaccccuuaucggacucuauugaugaaugaguuggguguuccuuuucaucuggggaccaagcaagugugcauagcaugguccagcucaaguugucacgauggaaaagcauggcugcauguuuguauaacgggggaugauaaaaaugcaacugcuagcuucauuuacaaugggaggcuuguagauaguguuguuucaugguccaaagaaguucucaggacccaggagucagaaugcguuuguaucaauggaacuuguacaguaguaaugacugauggaagugcuucaggaaaagcugauacuaaaauauuauucauugaggaggggaaaaucguucauacuagcacauugucaggaagugcucagcaugucgaagagugcucuugcuauccucgauauccuggugucagaugugucugcagagacaacuggaaaggcuccaaucggcccaucguagauauaaacauaaaggaucauagcauugucuccaguuauguguguucaggacuuguuggagacacacccagaaaaaacgacagcuccagcaguagccauuguuuggauccuaacaaugaagaagguggucauggagugaaaggcugggccuuugaugauggaaaugacguguggaugggaagaacaaucaaugagacgucacgcuuaggguaugaaaccuucaaagucauugaaggcugguccaacccuaaguccaaauugcagauaaauaggcaagucauaguugacagaggugauagguccgguuauucugguauuuucucuguugaaggcaaaagcugcaucaaucggugcuuuuauguggaguugauuaggggaagaaaagaggaaacugaagucuuguggaccucaaacaguauuguuguguuuuguggcaccucagguacauauggaacaggcucauggccugauggggcggaccucaaucucaugccuauauaa

SEQ ID NO: 56889 - RNA, 1410 nt, Artificial Sequence; identical to SEQ ID NO: 56865
  derived and/or modified CDS sequence (wt) from neuraminidase__InfluenzaA__AHL97628

SEQ ID NO: 56890 - RNA, 1410 nt, Artificial Sequence; identical to SEQ ID NO: 55880
  derived and/or modified CDS sequence (wt) from neuraminidase__InfluenzaA__AHL97640

SEQ ID NO: 56891 - RNA, 1410 nt, Artificial Sequence; identical to SEQ ID NO: 56699
  derived and/or modified CDS sequence (wt) from neuraminidase__InfluenzaA__AHL97652

SEQ ID NO: 56892 - RNA, 1410 nt, Artificial Sequence; identical to SEQ ID NO: 56699
  derived and/or modified CDS sequence (wt) from neuraminidase__InfluenzaA__AHL97664

SEQ ID NO: 56893 - RNA, 1410 nt, Artificial Sequence; identical to SEQ ID NO: 55976
  derived and/or modified CDS sequence (wt) from neuraminidase__InfluenzaA__AHL97676

SEQ ID NO: 56894 - RNA, 1410 nt, Artificial Sequence; identical to SEQ ID NO: 55865
  derived and/or modified CDS sequence (wt) from neuraminidase__InfluenzaA__AHL97688

SEQ ID NO: 56895 - RNA, 1410 nt, Artificial Sequence
  derived and/or modified CDS sequence (wt) from neuraminidase__InfluenzaA__AHL97700
augaauccaaaucaaaagauaauaacgauuggcucuguuucucucaccauuuccacaauaugcuucuucaugcaaauugccaucuugauaacuacuguaacauugcauuucaagcaauaugaauucgacucccccccaaacaaccaagugaugcugugugaaccaacaauaauagaaagaaacauaacagagauaguguaucugaccaacaccaccauagagaaggaaauaugccccaaaccagcagaauacagaaauuggucaaaaccgcaauguggcauuacaggauuugcaccuuucucuaaggacaauucgauuaggcuuuccgcugguggggacaucugggugacaagagaaccuuaugugucaugcgauccugacaaguguuaucaauuugcccuuggacagggaacaacacuaaacaacgugcauucaaauaacacaguacgugauaggaccccuuaucggacucuauugaugaaugaguuggguguuccuuuucaucuggggaccaagcaagugugcauagcaugguccagcucaaguugucacgauggaaaagcauggcugcauguuuguauaacgggggaugauaaaaaugcaacugcuagcuucauuuacaaugggaggcuuguagauaguguuguuucaugguccaaagaaauucucaggacccaggagucagaaugcguuuguaucaauggaacuuguacaguaguaaugacugauggaagugcuucaggaaaagcugauacuaaaauacuauucauugaggaggggaaaaucguucauacuagcacauugucaggaagugcucagcauguugaagagugcucuugcuauccucgauauccuggugucagaugugucugcagagacaacuggaaaggcuccaaucggcccaucguagauauaaacauaaaggaucauagcauuguuuccaguuauguguguucaggacuuguuggagacacacccagaaaaaacgacagcuccagcaguagccauuguuuggauccuaacaaugaagaagguggucauggagugaaaggcugggccuuugaugauggaaaugacguguggaugggaagaacaaucaacgagacgucacgcuuaggguaugaaaccuucaaagucauugaaggcugguccaacccuaaguccaaauugcagauaaauaggcaagucauaguugacagaggugauagguccgguuauucugguauuuucucuguugaaggcaaaagcugcaucaaucggugcuuuuauguggagcugauuaggggaagaaaagaggaaacugaaguuuuguggaccucaaacaguauuguuguguuuuguggcaccucagguacauauggaacaggcucauggccugauggggcggaccucaaccucaugccuauauaa

SEQ ID NO: 56896 - RNA, 1410 nt, Artificial Sequence
  derived and/or modified CDS sequence (wt) from neuraminidase__InfluenzaA__AHL97712
augaauccaaaucaaaagauaauaacgauuggcucuguuucucucaccauuuccacaauaugcuucuucaugcaaauugccaucuugauaacuacuguaacauugcauuucaagcaauaugaauucaacucccccccaaacaaccaagugaugcugugugaaccaacaauaauagaaagaaacauaacagagauaguguaucugaccaacaccaccauagagaaggaaauaugccccaaaccagcagaauacagaaauuggucaaaaccgcaauguggcauuacaggauuugcaccuuucucuaaggacaauucgauuaggcuuuccgcugguggggacaucugggugacaagagaaccuuaugugucaugcgaucccgacaaguguuaucaauuugcccuuggacagggaacaacacuaaacaacgugcauucaaauaacacaguacgugauaggaccccuuaucggacucuauugaugaaugaguuggguguuccuuuucaucuggggaccaagcaagugugcauagcaugguccagcucaaguugucacgauggaaaagcauggcugcauguuuguauaacgggggaugauaaaaaugcaacugcuagcuucauuuacaaugggaggcuuguagauaguguuguuucaugguccaaagaaauucucaggacccaggagucagaaugcguuuguaucaauggaacuuguacaguaguaaugacugauggaagugcuucaggaaaagcugauacuaaaauacuauucauugaggaggggaaaaucguucauacuagcacauugucaggaagugcucagcaugucgaagagugcucuugcuauccucgauauccuggugucagaugugucugcagagacaacuggaaaggcuccaaucggcccaucguagauauaaacauaaaggaucauagcauuguuuccaguuauguguguucaggacuuguuggagacacacccagaaaaaacgacagcaccagcaguagccauuguuuggauccuaacaaugaagaagguggucauggagugaaaggcugggccuuugaugauggaaaugacguguggaugggaagaacaaucaacgagacgucacgcuuaggguaugaaaccuucaaagucauugaaggcugguccaacccuaaguccaaauugcagauaaauaggcaagucauaguugacagaggugauagguccgguuauucugguauuuucucuguugaaggcaaaagcugcaucaaucggugcuuuuauguggaguugauuaggggaagaaaagaggaaacugaagucuuguggaccucaaacaguauuguuguguuuuguggcaccucagguacauauggaacaggcucauggccugauggggcggaccucaaucucaugccuauauaa

SEQ ID NO: 56897 - RNA, 1410 nt, Artificial Sequence; identical to SEQ ID NO: 55883
  derived and/or modified CDS sequence (wt) from neuraminidase__InfluenzaA__AHL97724

SEQ ID NO: 56898 - RNA, 1410 nt, Artificial Sequence; identical to SEQ ID NO: 55880
  derived and/or modified CDS sequence (wt) from neuraminidase__InfluenzaA__AHL97736

SEQ ID NO: 56899 - RNA, 1410 nt, Artificial Sequence
  derived and/or modified CDS sequence (wt) from neuraminidase__InfluenzaA__AHL97760
augaauccaaaucaaaagauaauaacgauuggcucuguuucucucaccauuuccacaauaugcuucuucaugcaaauugccaucuugauaacuacuguaacauugcauuucaagcaauaugaauucaacucccccccaaacaaccaagugaugcugugugaaccaacaauaauagaaagaaacauaacagagauaguguaucugaccaacaccaccauagagaaggaaauaugccccaaaccagcagaauacagaaauuggucaaaaccgcaauguggcauuacaggauuugcaccuuucucuaaggacaauucgauuaggcuuuccgcugguggggacaucugggugacaagagaaccuuaugugucaugcgauccugacaaguguuaucaauuugcccuuggacagggaacaacacuaaacaacgugcauucaaauaacacaguacgugauaggaccccuuaucggacucuauugaugaaugaguuggguguuccuuuucaucuggggaccaagcaagugugcauagcaugguccagcucaaguugucacgauggaaaagcauggcugcauguuugcauaacgggggaugaugaaaaugcaacugcuagcuucauuuacaaugggaggcuuguagauaguguuguuucaugguccaaagaaauucucaggacccaggagucagaaugcguuuguaucaauggaacuuguacaguaguaaugacugauggaagugcuucaggaaaagcugauacuaaaauacuauucauugaggagggaaaaaucguucauacuagcacauugucaggaagugcucagcaugucgaagagugcucuugcuauccucgauauccuggugucagaugugucugcagagacaacuggaaaggcuccaaucggcccaucguagauauaaacauaaaggaucauagcauuguuuccaguuauguguguucaggacuuguuggagacacacccagaaaaaacgacagcuccagcaguagccauuguuuggauccuaacaaugaagaagguggucauggagugaaaggcugggccuuugaugauggaaaugacguguggaugggaagaacaaucaacgagacgucacgcuuaggguaugaaaccuucaaagucauugaaggcugguccaacccuaaguccaaauugcagauaaauaggcaagucauaguugacagaggugauagguccgguuauucugguauuuucucuguugaaggcaaaagcugcaucaaucggugcuuuuauguggaguugauuaggggaagaaaagaggaaacugaagucuuguggaccucaaacaguauuguuguguuuuguggcaccucagguacauauggaacaggcucauggccugauggggcggaccucaaucucaugccuauauaa

SEQ ID NO: 56900 - RNA, 1410 nt, Artificial Sequence
  derived and/or modified CDS sequence (wt) from neuraminidase__InfluenzaA__AHL97772
augaauccaaaucaaaagauaauaacgauuggcucuguuucucucaccauuuccacaauaugcuucuucaugcaaauugccaucuugauaacuacuguaacauugcauuucaagcaauaugaauucaacucccccccaaacaaccaagugaugcugugugaaccaacaauaauagaaagaaacauaacagagauaguguaucugaccaacaccaccauagagaaggaaauaugccccaaaccagcagaauacagaaauuggucaaaaccgcaauguggcauuacaggauuugcaccuuucucuaaggacaauucgauuaggcuuuccgcugguggggacaucugggugacaagagaaccuuaugugucaugcgauccugacaaguguuaucaauuugcccuuggacagggaacaacacuaaacaacgugcauucaaauaacacaguacgugauaggaccccuuaucggacucuauugaugaaugaguuggguguuccuuuucaucuggggaccaagcaagugugcauagcaugguccagcucaaguugucacgauggaaaagcauggcugcauguuugcauaacgggggaugauaaaaaugcaacugcuagcuucauuuacaaugggaggcuuguagauaguguuguuucaugguccaaagaaauucucaggacccaggagucagaaugcguuuguaucaauggaacuuguacaguaguaaugacugauggaagugcuucaggaaaagcugauacuaaaauacuauucauugaggagggaaaaaucguucauacuagcacauugucaggaagugcucagcaugucgaagagugcucuugcuauccucgauauccuggugucagaugugucugcagagacaacuggaaaggcuccaaucggcccaucguagauauaaacauaaaggaucauagcauuguuuccaguuauguguguucaggacuuguuggagacacacccagaaaaaacgacagcuccagcaguagccauuguuuggauccuaacaaugaagaagguggucauggagugaaaggcugggccuuugaugauggaaaugacguguggaugggaagaacaaucaacgagacgucacgcuuaggguaugaaaccuucaaagucauugaaggcugguccaacccuaaguccaaauugcagauaaauaggcaagucauaguugacagaggugauagguccgguuauucugguauuuucucuguugaaggcaaaagcugcaucaaucggugcuuuuauguggaguugauuaggggaagaaaagaggaaacugaagucuuguggaccucaaacaguguuguuguguuuuguggcaccucagguacauauggaacaggcucauggccugauggggcggaccucaaucucaugccuauauaa

SEQ ID NO: 56901 - RNA, 1410 nt, Artificial Sequence
  derived and/or modified CDS sequence (wt) from neuraminidase__InfluenzaA__AHL97784
augaauccaaaucaaaagauaauaacgauuggcucuguuucucucaccauuuccacaauaugcuucuucaugcaaauugccaucuugauaacuacuguaacauugcauuucaagcaauaugaauucaacucccccccaaacaaccaagugaugcugugugaaccaacaauaauagaaagaaacauaacagagauaguguaucuaaccaacaccaccauagagaaggaaauaugccccaaaccagcagaauacagaaauuggucaaagccgcagugugacauuacaggauuugcaccuuuuucuaaggacaauucgauuaggcuuuccgcugguggggacaucugggugacaagagaaccuuaugugucaugcgauccugacaaguguuaucaauuugcucuuggacagggaacaacacuaaacaacgugcauucaaauaacacaguacgugauaggaccccuuaucggacccuauugaugaaugaguuagguguuccuuuucaucuggggaccaagcaagugugcauagcauggucuagcucaaguugucacgauggaaaagcauggcugcauguuuguauaacgggggaugauaaaaaugcaacugcuagcuucauuuacaaugggaggcuuguagauaguguuguuucaugguccaaagaaauccucaggacccaggagucagaaugcguuuguaucaauggaacuuguacaguaguaaugacugaugggagugcuucaggaaaagcugauacuaaaauacuauucauugaggaggggaaaaucguucauacuagcacauugucaggaagugcucagcaugucgaggagugcucuugcuauccucgauauccuggugucagaugugucugcagagacaacuggaaaggcuccaauaggccuaucguagauauaaacauaaaggaucauagcauuguuuccagguauguguguucaggacuuguuggagacacacccagaaaaaacgacagcuccagcaguagccauuguuuggauccuaacaaugaagaagguggucauggagugaaaggcugggccuucgaugauggaaaugacguguggaugggaagaacgaucaacgagacgucacguuuaggguaugaaaccuucaaggucauugaaggcugguccaacccuaaguccaaauugcagauaaauaggcaggucauaguugacagaggugauagguccgguuauucugguauuuucucuguugaaggcaaaagcugcaucaaucggugcuuuuauguggaguugauuaggggaagaaaagaggaaacugaagucuuguggaccucaaacaguauuguuguguuuuguggcaccucagguacauauggaacaggcucauggccugauggggcggaccucaaucucaugccuauauaa

SEQ ID NO: 56902 - RNA, 1410 nt, Artificial Sequence
  derived and/or modified CDS sequence (wt) from neuraminidase__InfluenzaA__AHL97796
augaauccaaaucaaaagauaauaacgauuggcucuguuucucucaccauuuccacaauaugcuucuucaugcaaauugccaucuugauaacuacuguaacauugcauuucaagcaauaugaauucaacucccccccaaacaaccaagugaugcugugugaaccaacaauaauagaaagaaacauaacagagauaguguaucugaccaacaccaccauagagaaggaaauaugccccaaaccagcagaauacagaaauuggucaaaaccgcaauguggcauuacaggauuugcacccuucucuaaggacaauucgauuaggcuuuccgcugguggggacaucugggugacaagagaaccuuaugugucaugcgauccugacaaguguuaucaauuugcccuuggacagggaacaacacuaaacaacgugcauucaaauaacacaguacgugauaggaccccuuaucggacucuauugaugaaugaguuggguguuccuuuucaucuggggaccaagcaagugugcauagcaugguccagcucaaguugucacgauggaaaagcauggcugcauguuugcauaacgggggaugauaaaaaugcaacugcuagcuucauuuacaaugggaggcuuguagauaguguuguuucaugguccaaagaaauucucaggacccaggagucagaaugcguuuguaucaauggaacuuguacaguaguaaugacugauggaagugcuucaggaaaagcugauacuaaaauacuauucauugaggagggaaaaaucguucauacuagcacauugucaggaagugcucagcaugucgaagagugcucuugcuauccucgauauccuggugucagaugugucugcagagacaacuggaaaggcuccaaucggcccaucguagauauaaacauaaaggaucauagcauuguuuccaguuauguguguucaggacuuguuggagacacacccagaaaaaacgacagcuccagcaguagccauuguuuggauccuaacaaugaagaagguggucauggagugaaaggcugggccuuugaugauggaaaugacguguggaugggaagaacaaucaacgagacgucacgcuuaggguaugaaaccuucaaagucauugaaggcugguccaacccuaaguccaaauugcagauaaauaggcaagucauaguugacagaggugauagguccgguuauucugguauuuucucuguugaaggcaaaagcugcaucaaucggugcuuuuauguggaguugauuaggggaagaaaagaggaaacugaagucuuguggaccucaaacaguauuguuguguuuuguggcaccucagguacauauggaacaggcucauggccugauggggcggaccucaaucucaugccuauauaa

SEQ ID NO: 56903 - RNA, 1410 nt, Artificial Sequence; identical to SEQ ID NO: 55877
  derived and/or modified CDS sequence (wt) from neuraminidase__InfluenzaA__AHL97808

SEQ ID NO: 56904 - RNA, 1410 nt, Artificial Sequence; identical to SEQ ID NO: 55880
  derived and/or modified CDS sequence (wt) from neuraminidase__InfluenzaA__AHL97820

SEQ ID NO: 56905 - RNA, 1410 nt, Artificial Sequence
  derived and/or modified CDS sequence (wt) from neuraminidase__InfluenzaA__AHL97832
augaauccaaaucaaaagauaauaacgauuggcucuguuucucucaccauuuccacaauaugcuucuucaugcaaauugccaucuugauaacuacuguaacauugcauuucaagcaauaugaauucgacucccccccaaacaaccaagugaugcugugugaaccaacaauaauagaaagaaacauaacagagauaguguaucugaccaacaccaccauagagaaggaaauaugccccaaaccagcagaauacagaaguuggucaaaaccgcaauguggcauuacaggauuugcaccuuucucuaaggacaauucgauuaggcuuuccgcugguggggacaucugggugacaagagaaccuuaugugucaugcgauccugacaaguguuaucaauuugcccuuggacagggaacaacacuaaacaacgugcauucaaauaacacaguacgugauaggaccccuuaucggacucuauugaugaaugaguuggguguuccuuuucaucuggggaccaagcaagugugcauagcaugguccagcucaaguugucacgauggaaaagcauggcugcauguuuguauaacgggggaugauaaaaaugcaacugcuagcuucauuuacaaugggaggcuuguagauaguguuguuucaugguccaaagaaauucucaggacccaggagucagaaugcguuuguaucaauggaacuuguacaguaguaaugacugauggaagugcuucaggaaaagcugauacuaaaauacuauucauugaggaggggaaaaucguucauacuagcacauugucaggaagugcucagcauguugaagagugcucuugcuauccucgauauccuggugucagaugugucugcagagacaacuggaaaggcuccaaucggcccaucguagauauaaacauaaaggaucauagcauuguuuccaguuauguguguucaggacuuguuggagacacacccagaaaaaacgacagcuccagcaguagccauuguuuggauccuaacaaugaagaagguggucauggagugaaaggcugggccuuugaugauggaaaugacguguggaugggaagaacaaucaacgagacgucacgcuuaggguaugaaaccuucaaagucauugaaggcugguccaacccuaaguccaaauugcagauaaauaggcaagucauaguugacagaggugauagguccgguuauucugguauuuucucuguugaaggcaaaagcugcaucaaucggugcuuuuauguggagcugauuaggggaagaaaagaggaaacugaaguuuuguggaccucaaacaguauuguuguguuuuguggcaccucagguacauauggaacaggcucauggccugauggggcggaccucaaccucaugccuauauaa

SEQ ID NO: 56906 - RNA, 1410 nt, Artificial Sequence; identical to SEQ ID NO: 55865
  derived and/or modified CDS sequence (wt) from neuraminidase__InfluenzaA__AHL97844

SEQ ID NO: 56907 - RNA, 1410 nt, Artificial Sequence; identical to SEQ ID NO: 56899
  derived and/or modified CDS sequence (wt) from neuraminidase__InfluenzaA__AHL97856

SEQ ID NO: 56908 - RNA, 1410 nt, Artificial Sequence; identical to SEQ ID NO: 55877
  derived and/or modified CDS sequence (wt) from neuraminidase__InfluenzaA__AHL97868

SEQ ID NO: 56909 - RNA, 1410 nt, Artificial Sequence; identical to SEQ ID NO: 55883
  derived and/or modified CDS sequence (wt) from neuraminidase__InfluenzaA__AHL97880

SEQ ID NO: 56910 - RNA, 1410 nt, Artificial Sequence; identical to SEQ ID NO: 55880
  derived and/or modified CDS sequence (wt) from neuraminidase__InfluenzaA__AHL97892

SEQ ID NO: 56911 - RNA, 1410 nt, Artificial Sequence
  derived and/or modified CDS sequence (wt) from neuraminidase__InfluenzaA__AHL97904
augaauccaaaucaaaaaauaauaacgauuggcucuguuucucucaccauuuccacaauaugcuucuucaugcaaauugccaucuugauaacuacuguaacauugcauuucaagcaauaugaauucaacucccccccaaacaaccaagugaugcugugugaaccaacaauaauagaaagaaacauaacagagauaguguaucugaccaacaccaccauagagaaggaaauaugccccaaaccagcagaauacagaaauuggucaaaaccgcaauguggcauuacaggauuugcaccuuucucuaaggacaauucgauuaggcuuuccgcugguggggacaucugggugacaagagaaccuuaugugucaugcgaucccgacaaguguuaucaauuugcccuuggacagggaacaacacuaaacaacgugcauucaaauaacacaguacgugauaggaccccuuaucggacucuauugaugaaugaguuggguguuccuuuucaucuggggaccaagcaagugugcauagcaugguccagcucaaguugucacgauggaaaagcauggcugcauguuuguauaacgggggaugauaaaaaugcaacugcuagcuucauuuacaaugggaggcuuguagauaguguuguuucaugguccaaagaaauucucaggacccaggagucagaaugcguuuguaucaauggaacuuguacaguaguaaugacugauggaagugcuucaggaaaagcugauacuaaaauacuauucauugaggaggggaaaaucguucauacuagcacauugucaggaagugcccagcaugucgaagagugcucuugcuauccucgauauccuggugucagaugugucugcagagacaacuggaaaggcuccaaucggcccaucguagauauaaacauaaaggaucauagcauuguuuccaguuauguguguucaggacuuguuggagacacacccagaaaaaacgacagcuccagcaguagccauuguuuggauccuaacaaugaagaagguggucauggagugaaaggcugggccuuugaugauggaaaugacguguggaugggaagaacaaucaacgagacgucacgcuuaggguaugaaaccuucaaagucauugaaggcugguccaacccuaaguccaaauugcagauaaauaggcaagucauaguugacagaggugauagguccgguuauucugguauuuucucuguugaaggcaaaagcugcaucaaucggugcuuuuauguggaguugauuaggggaagaaaagaggaaacugaagucuuguggaccucaaacaguauuguuguguuuuguggcaccucagguacauauggaacaggcucauggccugauggggcggaccucaaucucaugccuauauaa

SEQ ID NO: 56912 - RNA, 1410 nt, Artificial Sequence; identical to SEQ ID NO: 55895
  derived and/or modified CDS sequence (wt) from neuraminidase__InfluenzaA__AHL97916

SEQ ID NO: 56913 - RNA, 1410 nt, Artificial Sequence; identical to SEQ ID NO: 55866
  derived and/or modified CDS sequence (wt) from neuraminidase__InfluenzaA__AHL97928

SEQ ID NO: 56914 - RNA, 1410 nt, Artificial Sequence; identical to SEQ ID NO: 56874
  derived and/or modified CDS sequence (wt) from neuraminidase__InfluenzaA__AHL97952

SEQ ID NO: 56915 - RNA, 1410 nt, Artificial Sequence; identical to SEQ ID NO: 55880
  derived and/or modified CDS sequence (wt) from neuraminidase__InfluenzaA__AHL97964

SEQ ID NO: 56916 - RNA, 1410 nt, Artificial Sequence; identical to SEQ ID NO: 55952
  derived and/or modified CDS sequence (wt) from neuraminidase__InfluenzaA__AHL97976

SEQ ID NO: 56917 - RNA, 1410 nt, Artificial Sequence; identical to SEQ ID NO: 55880
  derived and/or modified CDS sequence (wt) from neuraminidase__InfluenzaA__AHL97988

SEQ ID NO: 56918 - RNA, 1410 nt, Artificial Sequence
  derived and/or modified CDS sequence (wt) from neuraminidase__InfluenzaA__AHL98000
augaauccaaaucaaaagauaauaacgauuggcucuguuucucucaccauuuccacaauaugcuucuucaugcaaauugccaucuugauaacuacuguaacauugcauuucaagcaauaugaauucaacucccccccaaacaaccaagugaugcugugugaaccaacaauaauagaaagaaacauaacagagauaguguaucugaccaacaccaccauagagaaggaaauaugccccaaaccagcagaauacagaaauuggucaaaaccgcaauguggcauuacaggauuugcaccuuucucuaaggacaauucgauuaggcuuuccgcugguggggacaucugggugacaagagaaccuuaugugucaugcgauccugacaaguguuaucaauuugcccuuggacagggaacaacacuaaacaacgugcauucaaauaacacaguacgugauaggaccccuuaucggacucuauugaugaaugaguuggguguuccuuuucaucuggggaccaagcaagugugcauagcaugguccagcucaaguugucacgauggaaaagcauggcugcauguuuguauaacgggggaugauaaaaaugcaacugcuagcuucauuuacaaugggaggcuuguagauaguguuguuucaugguccaaagaaauucucaggacccaugagucagaaugcguuuguaucaauggaacuuguacaguaguaaugacugauggaagugcuucaggaaaagcugauacuaaaauacuauucauugaggaggggaaaaucguucauacuagcacauugucaggaagugcucagcaugucgaagagugcucuugcuauccucgauauccuggugucagaugugucugcagagacaacuggaaaggcuccaaucggcccaucguagauauaaacauaaaggaucauagcauuguuuccaguuauguguguucaggacuuguuggagacacacccagaaaaaaagacagcuccagcaguagccauuguuuggauccuaacaaugaagaagguggucauggagugaaaggcugggccuuugaugauggaaaugacguguggaugggaagaacaaucaacgagacgucacgcuuaggguaugaaaccuucaaagucauugaaggcugguccaauccuaaguccaaauugcagauaaauaggcaagucauaguugacagaggugauagguccgguuauucugguauuuucucuguugaaggcaaaagcugcaucaaucggugcuuuuauguagaguugauuaggggaagaaaagaggaaacugaagucuuguggaccucaaacaguauuguuguguuuuguggcaccucagguacauauggaacaggcucauggccugauggggcggaccucaaucucaugccuauauaa

SEQ ID NO: 56919 - RNA, 1410 nt, Artificial Sequence
  derived and/or modified CDS sequence (wt) from neuraminidase__InfluenzaA__AHL98012
augaauccaaaucaaaagauaauaacgauuggcucuguuucucucaccauuuccacaauaugcuucuucaugcaaauugccaucuugauaacuacuguaacauugcauuucaagcaauaugaauucaacucccccccaaacaaccaagugaugcugugugaaccaacaauaauagaaagaaacauaacagagauaguguaucugaccaacaccaccauagaaaaggaaauaugccccaaaccagcagaauacagaaauuggucaaaaccgcaauguggcauuacaggauuugcaccuuucucuaaggacaauucgauuaggcuuuccgcugguggggacaucugggugacaagagaaccuuaugugucaugcgauccugacaaguguuaucaauuugcccuuggacagggaacaacacuaaacaacgugcauucaaauaacacaguacgugauaggaccccuuaucggacucuauugaugaaugaguuggguguuccuuuucaucuggggaccaagcaagugugcauagcaugguccagcucaaguugucacgauggaaaagcauggcugcauguuugcauaacgggggaugauaaaaaugcaacugcuagcuucauuuacaaugggaggcuuguagauaguguuguuucaugguccaaagaaguucucaggacccaggagucagaaugcguuuguaucaauggaacuuguacaguaguaaugacugauggaagugcuucaggaaaagcugauacuaaaauacuauucauugaggagggaaaaaucguucauacuagcacauugucaggaagugcucagcaugucgaagagugcucuugcuauccucgauauccuggugucagaugugucugcagagacaacuggaaaggcuccaaucggcccaucguagauauaaacauaaaggaucauagcauuguuuccaguuauguguguucaggacuuguuggagacacacccagaaaaaacgacagcuccagcaguagccauuguuuggauccuaacaaugaagaaggugaucauggagugaaaggcugggccuuugaugauggaaaugacguguggaugggaagaacaaucaacgagacgucacgcuuaggguaugaaaccuucaaagucauugaaggcugguccaacccuaaguccaaauugcagauaaauaggcaagucauaguugacagaggugauagguccgguuauucugguauuuucucuguugaaggcaaaagcugcaucaaucggugcuuuuauguggaguugauuaggggaagaaaagaggaaacugaagucuuguggaccucaaacaguauuguuguguuuuguggcaccucagguacauauggaacaggcucauggccugauggggcggaccucaaucucaugccuauauaa

SEQ ID NO: 56920 - RNA, 1410 nt, Artificial Sequence; identical to SEQ ID NO: 55895
  derived and/or modified CDS sequence (wt) from neuraminidase__InfluenzaA__AHL98048

SEQ ID NO: 56921 - RNA, 1410 nt, Artificial Sequence; identical to SEQ ID NO: 55895
  derived and/or modified CDS sequence (wt) from neuraminidase__InfluenzaA__AHL98060

SEQ ID NO: 56922 - RNA, 1410 nt, Artificial Sequence; identical to SEQ ID NO: 55895
  derived and/or modified CDS sequence (wt) from neuraminidase__InfluenzaA__AHL98072

SEQ ID NO: 56923 - RNA, 1410 nt, Artificial Sequence
  derived and/or modified CDS sequence (wt) from neuraminidase__InfluenzaA__AHL98084
augaauccaaaucaaaagauaauaacgauuggcucuguuucucucaccauuuccacaauaugcuucuucaugcaaauugccaucuugauaacuacuguaacauugcauuucaagcaauaugaauucaacucccccccaaacaaccaagugaugcugugugaaccaacaauaauagaaagaaacauaacagagauaguguaucugaccaacaccaccauagagaaggaaauaugccccaaaccagcagaauacagaaauuggucaaaaccgcaauguggcauuacaggauuugcaccuuucucuaaggacaauucgauuaggcuuuccgcugguggggacaucugggugacaagagaaccuuaugugucaugcgauccugacaaguguuaucaauuugcucuuggacagggaacaacacuaaacaacgugcauucaaauaacacaguacgugauaggaccccuuaucggacucuauugaugaaugaguuggguguuccuuuucaucuggggaccaagcaagugugcauagcaugguccagcucaaguugucacgauggaaaagcauggcugcauguuuguauaacgggggaugauaaaaaugcaacugcuagcuucauuuacaaugggaggcuuguagauaguguuguuucaugguccaaagaaauucucaggacccaggagucagaaugcguuuguaucaauggaacuuguacaguaguaaugacugauggaagugcuucaggaaaagcugauacuaaaauacuauucauugaggaggggaaaaucguucauacuagcacauugucaggaagugcucagcaugucgaagagugcucuugcuauccucgauauccuggugucagaugugucugcagagacaacuggaaaggcuccaaucggcccaucguagauauaaacauaaaggaucauagcauuguuuccaguuauguguguucaggacuuguuggagacacacccagaaaaaacgacagcuccagcaguagccauuguuuggauccuaacaaugaagaagguggucauggagugaaaggcugggccuuugaugauggaaaugacguguggaugggaagaacaaucaacgagacgucacgcuuaggguaugaaaccuucaaagucauugaaggcugguccaacccuaaguccaaauugcagauaaauaggcaagucauaguugacagaggugauagguccgguuauucugguauuuucucuguugaaggcaaaagcugcaucaaucggugcuuuuauguggaguugauuaggggaagaaaagaggaaacugaagucuuguggaccucaaacaguauuguuguguuuuguggcaccucagguacauauggaacaggcucauggccugauggggcggaccucaaucucaugccuauauaa

SEQ ID NO: 56924 - RNA, 1410 nt, Artificial Sequence; identical to SEQ ID NO: 55895
  derived and/or modified CDS sequence (wt) from neuraminidase__InfluenzaA__AHL98096

SEQ ID NO: 56925 - RNA, 1410 nt, Artificial Sequence
  derived and/or modified CDS sequence (wt) from neuraminidase__InfluenzaA__AHL98119
augaauccaaaucaaaagauaauaacgauuggcucuguuucucucaccauuuccacaauaugcuucuucaugcaaauugccaucuugauaacuacuguaacauugcauuucaagcaauaugaauucaacucccccccaaacaaccaagugaugcugugugaaccaacaauaauagaaagaaacauaacagagauaguguauuugaccaacaccaccauagagaaggaaauaugccccaaaccagcagaauacagaaauuggucaaaaccgcaauguggcauuacaggauuugcaccuuucucuaaggacaauucgauuaggcuuuccgcugguggggacaucugggugacaagagaaccuuaugugucaugcgauccugacaaguguuaucaauuugcccuuggacagggaacaacacuaaacaacgugcauucaaauaacacaguacgugauaggaccccuuaucggacucuauugaugaaugaguuggguguuccuuuucaucuggggaccaagcaagugugcauagcaugguccagcucaaguugucacgauggaaaagcauggcugcauguuuguauaacgggggaugauaaaaaugcaacugcuagcuucauuuacaaugggaggcuuguagauaguguuguuucaugguccaaagaaauucucaggacccaggagucagaaugcguuuguaucaauggaacuuguacaguaguaaugacugauggaagugcuucaggaaaagcugauacuaaaauacuauucauugaggaggggaaaaucguucauacuagcacauugucaggaagugcucagcaugucgaagagugcucuugcuauccucgauauccuggugucagaugugucugcagagacaacuggaaaggcuccaaucggcccaucguagauauaaacauaaaggaucauagcauuguuuccaguuauguguguucaggacuuguuggagacacacccagaaaaaacgacagcuccagcaguagccauuguuuggauccuaacaaugaagaagguggucauggagugaaaggcugggccuuugaugauggaaaugacguauggaugggaagaacaaucaacgagacgucacgcuuaggguaugaaaccuucaaagucauugaaggcugguccaacccuaaguccaaauugcagauaaauaggcaagucauaguugacagaggugauagguccgguuauuccgguauuuuuucuguugaaggcaaaagcugcaucaaucggugcuuuuauguggaguugauuaggggaagaaaagaggaaacugaagucuuguggaccucaaacaguauuguuguguuuuguggcaccucagguacauauggaacaggcucauggccugauggggcggaccucaaucucaugccuauauaa

SEQ ID NO: 56926 - RNA, 1410 nt, Artificial Sequence; identical to SEQ ID NO: 55880
  derived and/or modified CDS sequence (wt) from neuraminidase__InfluenzaA__AHL98131

SEQ ID NO: 56927 - RNA, 1410 nt, Artificial Sequence
  derived and/or modified CDS sequence (wt) from neuraminidase__InfluenzaA__AHL98143
augaauccaaaucaaaagauaauaacgauuggcucuguuucucucaccauuuccacaauaugcuucuucaugcaaauugccaucuugauaacuacuguaacauugcauuucaagcaauaugaauucaacucccccccaaacaaccaagugaugcugugugaaccaacaauaauagaaagaaacauaacagagauaguguauuugaccaacaccaccauagagaaggaaauaugccccaaaccagcagaauacagaaauuggucaaaaccgcaauguggcauuacaggauuugcaccuuucucuaaggacaauucgauuaggcuuuccgcugguggggacaucugggugacaagagaaccuuaugugucaugcgacccugacaaguguuaucaauuugcccuuggacagggaacaacacuaaacaacgugcauucaaauaacacaguacgugauaggaccccuuaucggacucuauugaugaaugaguuggguguuccuuuucaucuggggaccaagcaaguguguauagcaugguccagcucaaguugucacgauggaaaagcauggcugcauguuuguauaacgggggaugauaaaaaugcaacugcuagcuucauuuacaaugggaggcuuguagauaguguuguuucaugguccaaagaaauucucaggacccaggagucagaauguguuuguaucaauggaacuuguacaguaguaaugacugauggaagugcuucaggaaaagcugauacuaaaauacuauucauugaggaggggaaaaucguucauacuagcacauugucaggaagugcucagcaugucgaagagugcucuugcuauccucgauauccuggugucagaugugucugcagagacaacuggaaaggcuccaaucggcccaucguagauauaaacauaaaggaucauagcauuguuuccaguuauguguguucaggacuuguuggagacacacccagaaaaaacgacagcuccagcaguagccauuguuuggauccuaacaaugaagaagguggucauggagugaaaggcugggccuuugaugauggaaaugacguauggaugggaagaacaaucaacgagacgucacgcuuaggguaugaaaccuucaaagucauugaaggcugguccaacccuaaguccaaauugcagauaaauaggcaagucauaguugacagaggugauagguccgguuauucugguauuuucucuguugaaggcaaaagcugcaucaaucggugcuuuuauguggaguugauuaggggaagaaaagaggaaacugaagucuuguggaccucaaacaguauuguuguguuuuguggcaccucagguacauauggaacaggcucauggccugauggggcggaccucaaucucaugccuauauaa

SEQ ID NO: 56928 - RNA, 1410 nt, Artificial Sequence
  derived and/or modified CDS sequence (wt) from neuraminidase__InfluenzaA__AHL98155
augaauccaaaucaaaagauaauaacgauuggcucuguuucucucaccauuuccacaauaugcuucuucaugcaaauugccaucuugauaacuacuguaacauugcauuucaagcaauaugaauucaacucccccccaaacaaccaagugaugcugugugaaccaacaauaauagaaagaaacauaacagagauaguguauuugaccaacaccaccauagagaaggaaauaugccccaaaccagcagaauacagaaauuggucaaaaccgcaauguggcauuacaggauuugcaccuuucucuaaggacaauucgauuaggcuuuccgcugguggggacaucugggugacaagagaaccuuaugugucaugcgauccugacaaguguuaucaauuugcccuuggacagggaacaacacuaaacaacgugcauucaaauaacacaguacgugauaggaccccuuaucggacucuauugaugaaugaguuggguguuccuuuucaucuggggaccaagcaagugugcauagcaugguccagcucaaguugucacgauggaaaagcauggcugcauguuuguauaacgggggaugauaaaaaugcaacugcuagcuucauuuacaaugggaggcuuguagauaguguuguuucaugguccaaagaaauucucaggacccaggagucagaaugcguuuguaucaauggaacuuguacaguaguaaugacugauggaagugcuucaggaaaagcugauacuaaaauacuauucauugaggaggggaaaaucguucauacuagcacauugucaggaagugcucagcaugucgaagagugcucuugcuauccucgauauccuggugucagaugugucugcagagacaacuggaaaggcuccaaucggcccaucguagauauaaacauaaaggaucauagcauuguuuccaguuauguguguucaggacuuguuggagacacacccagaaaaaacgacagcuccagcaguagccauuguuuggauccuaacaaugaagaagguggucauggagugaaaggcugggccuuugaugauggaaaugacguauggaugggaagaacaaucaacgagacgucacgcuuaggguaugaaaccuucaaagucauugaaggcugguccaacucuaaguccaaauugcagauaaauaggcaagucauaguugacagaggugauagguccgguuauucugguauuuucucuguugaaggcaaaagcugcaucaaucggugcuuuuauguggaguugauuaggggaagaaaagaggaaacugaagucuuguggaccucaaacaguauuguuguguuuuguggcaccucagguacauauggaacaggcucauggccugauggggcggaccucaaucucaugccuauauaa

SEQ ID NO: 56929 - RNA, 1410 nt, Artificial Sequence; identical to SEQ ID NO: 55880
  derived and/or modified CDS sequence (wt) from neuraminidase__InfluenzaA__AHL98167

SEQ ID NO: 56930 - RNA, 1410 nt, Artificial Sequence; identical to SEQ ID NO: 55880
  derived and/or modified CDS sequence (wt) from neuraminidase__InfluenzaA__AHL98179

SEQ ID NO: 56931 - RNA, 1410 nt, Artificial Sequence; identical to SEQ ID NO: 55957
  derived and/or modified CDS sequence (wt) from neuraminidase__InfluenzaA__AHL98191

SEQ ID NO: 56932 - RNA, 1410 nt, Artificial Sequence; identical to SEQ ID NO: 55895
  derived and/or modified CDS sequence (wt) from neuraminidase__InfluenzaA__AHL98215

SEQ ID NO: 56933 - RNA, 1410 nt, Artificial Sequence
  derived and/or modified CDS sequence (wt) from neuraminidase__InfluenzaA__AHL98227
augaauccaaaucaaaagauaauaacgauuggcucuguuucucucaccauuuccacaauaugcuucuucaugcaaauugccaucuugauaacuacuguaacauugcauuucaagcaauaugaguucaacucccccccaaacaaccaagugaugcugugugaaccaacaauaauagaaagaaacauaacagauauaguguauuugaccaacaccaccauagagaaggaaauaugccccaaaccagcagaauacagaaauuggucaaaaccgcaauguggcauuacaggauuugcaccuuucucuaaggacaauucgauuaggcuuuccgcugguggggacaucugggugacaagagaaccuuaugugucaugcgauccugacaaguguuaucaauuugcccuuggacagggaacaacacuaaacaacaugcauucaaauaacacaguacgugauaggaccccuuaucggacucuauugaugaaugaguuggguguuccuuuucaucuggggaccaagcaagugugcauagcaugguccagcucaaguugucacgauggaaaagcauggcugcauguuuguauaacgggggaugauaaaaaugcaacugcuagcuucauuuacaaugggaggcuuguagauaguguuguuucaugguccaaagaaauucucaggacccaggagucagaaugcguuuguaucaauggaacuuguacaguaguaaugacugauggaagugcuucaggaaaagcugauacuaaaauauuauucauugaggaggggaaaaucguucauacuagcacauugucaggaagugcucagcaugucgaagagugcucuugcuauccucgauauccuggugucagaugugucugcagagacaacuggaaaggcuccaaucggcccaucguagauauaaacauaaaggaucauagcauugucuccaguuauguguguucaggacuuguuggagacacacccagaaaaaacgacagcuccagcaguagccauuguuuggauccuaacaaugaagaagguggucauggagugaaaggcugggccuuugaugauggaaaugacguguggaugggaagaacaaucaaugagacgucacgcuuaggguaugaaaccuucaaagucauugaaggcugguccaacccuaaguccaaauugcagauaaauaggcaagucauaguugacagaggugauagguccgguuauucugguauuuucucuguugaaggcaaaagcugcaucaaucggugcuuuuauguggaguugauuaggggaagaaaagaggaaacugaagucuuguggaccucaaacaguauuguuguguuuuguggcaccucagguacauauggaacaggcucauggccugauggggcggaccucaaucucaugccuauauaa

SEQ ID NO: 56934 - RNA, 1410 nt, Artificial Sequence
  derived and/or modified CDS sequence (wt) from neuraminidase__InfluenzaA__AHL98239
augaauccaaaucaaaagauaauaacgauuggcucuguuucucucaccauuuccacaauaugcuucuucaugcaaauugccaucuugauaacuacuguaacauugcauuucaagcaauaugaauucaacucccccccaaacaaccaagugaugcugugugaaccaacaauaauagaaagaaacauaacagagauaguguaucugaccaacaccaccauagagaaggaaauaugccccaaaccagcagaauacagaaauuggucaaaaccgcaauguggcauuacaggauuugcaccuuucucuaaggacaauucgauuaggcuuuccgcugguggggacaucugggugacaagagaaccuuaugugucaugcgauccugacaaguguuaucaauuugcccuuggacagggaacaacacuaaacaacgugcauucaaauaacacaguacgcgauaggaccccuuaucggacucuauugaugaaugaguuggguguuccuuuucaucuggggaccaagcaagugugcauagcaugguccagcucaaguugucacgauggaaaagcauggcugcauguuugcauaacgggggaugauaaaaaugcaacugcuagcuucauuuacaaugggaggcuuguagauaguguuguuucaugguccaaagaaauucucaggacccaggagucagaaugcguuuguaucaauggaacuuguacaguaguaaugacugauggaagugcuucaggaaaagcugauacuaaaauacuauucauugaggagggaaaaaucguucauacuagcacauugucaggaagugcucagcaugucgaagagugcucuugcuauccucgauauccuggugucagaugugucugcagagacaacuggaaaggcuccaaucggcccaucguagauauaaacauaaaggaucauagcauuguuuccaguuauguguguucaggacuuguuggagacacacccagaaaaaacgacagcuccagcaguagccauuguuuagauccuaacaaugaagaagguggucauggagugaaaggcugggccuuugaugauggaaaugacguguggaugggaagaacaaucaacgagacgucacgcuuaggguaugaaaccuucaaagucauugaaggcugguccaacccuaaguccaaauugcagauaaauaggcaagucauaguugacagaggugauagguccgguuauucugguauuuucucuguugaaggcaaaagcugcaucaaucggugcuuuuauguggaguugauuaggggaaggaaagaggaaacugaagucuuguggaccucaaacaguauuguuguguuuuguggcaccucagguacauauggaacaggcucauggccugauggggcggaccucaaucucaugccuauauaa

SEQ ID NO: 56935 - RNA, 1410 nt, Artificial Sequence; identical to SEQ ID NO: 55880
  derived and/or modified CDS sequence (wt) from neuraminidase__InfluenzaA__AHL98251

SEQ ID NO: 56936 - RNA, 1410 nt, Artificial Sequence; identical to SEQ ID NO: 56699
  derived and/or modified CDS sequence (wt) from neuraminidase__InfluenzaA__AHL98263

SEQ ID NO: 56937 - RNA, 1410 nt, Artificial Sequence; identical to SEQ ID NO: 55952
  derived and/or modified CDS sequence (wt) from neuraminidase__InfluenzaA__AHL98275

SEQ ID NO: 56938 - RNA, 1410 nt, Artificial Sequence; identical to SEQ ID NO: 56804
  derived and/or modified CDS sequence (wt) from neuraminidase__InfluenzaA__AHL98287

SEQ ID NO: 56939 - RNA, 1410 nt, Artificial Sequence
  derived and/or modified CDS sequence (wt) from neuraminidase__InfluenzaA__AHL98298
augaauccaaaucaaaagauaauaacgauuggcucuguuucucucaccauuuccacaauaugcuucuucaugcaaauugccaucuugauaacuacuguaacauugcauuucaagcaauaugaauucaacucccccccaaacaaccaagugaugcugugugaaccaacaauaauaggaagaaacauaacagagauaguguaucugaccaacaccaccauagagaaggaaauaugccccaaaccagcagaauacagaaauuggucaaaaccgcaauguggcauuacaggauuugcaccuuucucuaaggacaauucgauuaggcuuuccgcugguggggacaucugggugacaagagaaccuuaugugucaugcgaucccgacaaguguuaucaauuugcccuuggacagggaacaacacuaaacaacgugcauucaaauaacacaguacgugauaggaccccuuaucggacucuauugaugaaugaguuggguguuccuuuucaucuggggaccaagcaagugugcauagcaugguccagcucaaguugucacgauggaaaagcauggcugcauguuuguauaacgggggaugauaaaaaugcaacugcuagcuucauuuacaaugggaggcuuguagauaguguuguuucaugguccaaagaaauucucaggacccaggagucagaaugcguuuguaucaauggaacuuguacaguaguaaugacugauggaagugcuucagggaaagcugauacuaaaauacuauucauugaggaggggaaaaucguucauacuagcacauugucaggaagugcucagcaugucgaagagugcucuugcuauccucgauauccuggugucagaugugucugcagagacaacuggaaaggcuccaaucggcccaucguagauauaaacauaaaggaucauagcauuguuuccaguuauguguguucaggacuuguuggagacacacccagaaaaaacgacagcuccagcaguagccauuguuuggauccuaacaaugaagaagguggucauggagugaaaggcugggccuuugaugauggaaaugacguguggaugggaagaacaaucaacgagacgucacgcuuaggguaugaaaccuucaaagucauugaaggcugguccaacccuaaguccaaauugcagauaaauaggcaagucauaguugacagaggugauagguccggcuauucugguauuuucucuguugaaggcaaaagcugcaucaaucggugcuuuuauguggaguugauuaggggaagaaaagaggaaacugaagucuuguggaccucaaacaguauuguuguguuuuguggcaccucagguacauauggaacaggcucauggccugauggggcggaccucaaucucaugccuauauaa

SEQ ID NO: 56940 - RNA, 1410 nt, Artificial Sequence; identical to SEQ ID NO: 55880
  derived and/or modified CDS sequence (wt) from neuraminidase__InfluenzaA__AHL98310

SEQ ID NO: 56941 - RNA, 1410 nt, Artificial Sequence; identical to SEQ ID NO: 55880
  derived and/or modified CDS sequence (wt) from neuraminidase__InfluenzaA__AHL98322

SEQ ID NO: 56942 - RNA, 1410 nt, Artificial Sequence
  derived and/or modified CDS sequence (wt) from neuraminidase__InfluenzaA__AHL98334
augaauccaaaucaaaagauaauaacgauuggcucuguuucucucaccauuuccacaauaugcuucuucaugcaaauugccaucuugauaacuacuguaacauugcauuucaagcaauaugaauucaacucccccccaaacaaccaagugaugcugugugaaccaacaauaauagaaagaaacauaacagaggugguguaucugaccaacaccaccauagagaaggaaauaugccccaaaccagcagaauauagaaauuggucaaaaccgcaauguggcauuacaggauuugcaccuuucucuaaggacaauucgauuaggcuuuccgcugguggggacaucugggugacaagagaaccuuaugugucaugcgaucccgacaaguguuaucaauuugcccuuggacagggaacaacacuaaacaacgugcauucaaauaacacaguacgugauaggaccccuuaucggacucuauugaugaaugaguuggguguuccuuuucaucuggggaccaagcaagugugcauagcaugguccagcucaaguugucacgauggaaaagcauggcugcauguuuguauaacgggggaugauaaaaaugcaacugcuagcuucauuuacaaugggaggcuuguagauaguguuguuucaugguccaaagaaauucucaggacccaggagucagaaugcguuuguaucaauggaacuuguacaguaguaaugacugauggaagugcuucaggaaaagcugauacuaaaauacuauucauugaggaggggaaaaucguucauacuagcacauugucaggaagugcucagcaugucgaagagugcucuugcuauccucgauauccuggugucagaugugucugcagagacaacuggaaaggcuccaaucggcccaucguagauauaaacauaaaggaucauagcauuguuuccaguuauguguguucaggacuuguuggagacacacccagaaaaaacgacagcuccagcaguagccauuguuuggauccuaacaaugaagaagguggucauggagugaaaggcugggccuuugaugauggaaaugacguguggaugggaagaacaaucaacgagacgucacgcuuaggguaugaaaccuucaaagucauugaaggcugguccaacccuaaguccaaauugcagauaaauaggcaagucauaguugacagaggugauagguccgguuauucugguauuuucucuguugaaggcaaaagcugcaucaaucggugcuuuuauguggaguugauuaggggaagaaaagaggaaacugaagucuuguggaccucaaacaguauuguuguguuuuguggcaccucagguacauauggaacaggcucauggccugauggggcggaccucaaucucaugccuauauaa

SEQ ID NO: 56943 - RNA, 1410 nt, Artificial Sequence
  derived and/or modified CDS sequence (wt) from neuraminidase__InfluenzaA__AHL98346
augaauccaaaucaaaagauaauaacgauuggcucuguuucucucaccauuuccacaauaugcuucuucaugcaaauugccaucuugauaacuacuguaacauugcauuucaagcaauaugaauucgacucccccccaaacaaccaagugaugcugugugaaccaacaauaauagaaagaaacauaacagagauaguguaucugaccaacaccaccauagagaaggaaauaugccccaaaccagcagaauacagaaauuggucaaagccgcaauguggcauuacaggauuugcaccuuucucuaaggacaauucgauuaggcuuuccgcugguggggacaucugggugacaagagaaccuuaugugucaugcgauccugacaaguguuaucaauuugcccuuggacagggaacaacacuaaacaacgugcauucaaauaacacaguacgugauaggaccccuuaucggacucuauugaugaaugaguuggguguuccuuuucaucuggggaccaagcaagugugcauagcaugguccagcucaaguugucacgauggaaaagcauggcugcauguuuguauaacgggggaugauaaaaaugcaacugcuagcuucauuuacaaugggaggcuuguagauaguguuguuucaugguccaaagaaauucucaggacccaggagucagaaugcguuuguaucaauggaacuuguacaguaguaaugacugauggaagugcuucaggaaaagcugauacuaaaauacuauucauugaggaggggaaaaucguucauacuagcacauugucaggaagugcucagcauguugaagagugcucuugcuauccucgauauccuggugucagaugugucugcagagacaacuggaaaggcuccaaucggcccaucguagauauaaacauaaaggaucauagcauuguuuccaguuauguguguucaggacuuguuggagacacacccagaaaaaacgacagcuccagcaguagccauuguuuggauccuaacaaugaagaagguggucauggagugaaaggcugggccuuugaugauggaaaugacguguggaugggaagaacaaucaacgagacgucacgcuuaggguaugaaaccuucaaagucauugaaggcugguccaacccuaaguccaaauugcagauaaauaggcaagucauaguugacagaggugauagguccgguuauucugguauuuucucuguugaaggcaaaagcugcaucaaucggugcuuuuauguggaguugauuaggggaagaaaagaggaaaaugaagucuuguggaccucaaacaguauuguuguguuuuguggcaccucagguacauauggaacaggcucauggccugauggggcggaccucaaccucaugccuauauaa

SEQ ID NO: 56944 - RNA, 1410 nt, Artificial Sequence; identical to SEQ ID NO: 55880
  derived and/or modified CDS sequence (wt) from neuraminidase__InfluenzaA__AHL98357

SEQ ID NO: 56945 - RNA, 1410 nt, Artificial Sequence
  derived and/or modified CDS sequence (wt) from neuraminidase__InfluenzaA__AHL98369
augaauccaaaucaaaagauaauaacgauuggcucuguuucucucaccauuuccacaauaugcuucuucaugcaaauugccaucuugauaacuacuguaacauugcauuucaagcaauaugaauucaacucccccccaaacaaccaagugaugcugugugaaccaacaauaauagaaagaaacauaacagagauaguguauuugaccaacaccaccauagagaaggaaauaugccccaaaccagcagaauacagaaauuggucaaaaccgcaauguggcauuacaggauuugcaccuuucucuaaggacaauucgauuaggcuuucagcugguggggacaucugggugacaagagaaccuuaugugucaugcgguccugacaaguguuaucaauuugcccuuggacagggaacaacacuaaacaacaugcauucaaauaacacaguacgugauaggaccccuuaucggacucuauugaugaaugaguuggguguuccuuuucaucuggggaccaagcaagugugcauagcaugguccagcucaaguugucacgauggaaaagcauggcugcauguuuguauaacgggggaugauaaaaaugcaacugcuagcuucauuuacaaugggaggcuuguagauaguguuguuucaugguccaaagaaauucucaggacccaggagucagaaugcguuuguaucaauggaacuuguacaguaguaaugacugauggaagugcuucaggaaaagcugauacuaaaauauuauucauugaggaggggaaaaucguucauacuagcacauugucaggaagugcucagcaugucgaagagugcucuugcuauccucgauauccuggugucagaugugucugcagagacaacuggaaaggcuccaaucggcccaucguagauauaaacauaaaggaucauagcauugucuccaguuauguguguucaggacuuguuggagacacacccagaaaaaacgacagcuccagcaguagccauuguuuggauccuaacaaugaagaagguggucauggagugaaaggcugggccuuugaugauggaaaugacguguggaugggaagaacaaucaacgagacgucacgcuuaggguaugaaaccuucaaagucauugaaggcugguccaacccuaaguccaaauugcagauaaauaggcaagucauaguugacagaggugauagguccgguuauucugguauuuucucuguugaaggcaaaagcugcaucaaucggugcuuuuauguggaguugauuaggggaagaaaagaggaaacugaagucuuguggaccucaaacaguauuguuguguuuuguggcaccucagguacauauggaacaggcucauggccugauggggcggaccucaaucucaugccuauauaa

SEQ ID NO: 56946 - RNA, 1410 nt, Artificial Sequence
  derived and/or modified CDS sequence (wt) from neuraminidase__InfluenzaA__AHL98381
augaauccaaaucaaaagauaauaacgauuggcucuguuucucucaccauuuccacaauaugcuucuucaugcaaauugccaucuugauaacuacuguaacauugcauuucaagcaauaugaauucaacucccccccaaacaaccaagugaugcugugugaaccaacaauaauagaaagaaacauaacagagauaguauauuugaccaacaccaccauagagaaggaaauaugccccaaaccagcagaauacagaaauuggucaaaaccgcaauguggcauuacaggauuugcaccuuucucuaaggacaauucgauuaggcuuuccgcugguggggacaucugggugacaagagaaccuuaugugucaugcgguccugacaaguguuaucaauuugcccuuggacagggaacaacacuaaacaacaugcauucaaauaacacaguacgugauaggaccccuuaucggacucuauugaugagugaguuggguguuccuuuucaucuggggaccaagcaagugugcauagcaugguccagcucaaguugucacgauggaaaagcauggcugcauguuuguauaacgggggaugauaaaaaugcaacugcuagcuucauuuacaaugggaggcuuguagauaguguuguuucaugguccaaagaaauucucaggacccaggagucagaaugcguuuguaucaauggaacuuguacaguaguaaugacugauggaagugcuucaggaaaagcugauacuaaaauauuauucauugaggaggggaaaaucguucauacuagcacauuaucaggaagugcucagcaugucgaagagugcucuugcuauccucgauauccuggugucagaugugucugcagagacaacuggaaaggcuccaaucggcccaucguagauauaaacauaaaggaucauagcacugucuccaguuauguguguucaggacuuguuggagacacacccagaaaaaacgacagcuccagcaguagccauuguuuggauccuaacaaugaagaagguggucauggagugaaaggcugggccuuugaugauggaaaugacguguggaugggaagaacaaucaacgagacgucacgcuuaggguaugaaaccuucaaagucauugaaggcugguccaacccuaaguccaaauugcagauaaauaggcaagucauaguugacagaggugauagguccgguuauucugguauuuucucuguugaaggcaaaagcugcaucaaucggugcuuuuauguggaguugauuaggggaagaaaagaggaaacugaagucuuguggaccucaaacaguauuguuguguuuuguggcaccucagguacauauggaacaggcucauggccugauggggcggaccucaaucucaugccuauauaa

SEQ ID NO: 56947 - RNA, 1410 nt, Artificial Sequence
  derived and/or modified CDS sequence (wt) from neuraminidase__InfluenzaA__AHL98393
augaauccaaaucaaaagauaauaacgauuggcucuguuucucucaccauuuccacaauaugcuucuucaugcaaauugccauccugauaacuaccguaacauugcauuucaagcaauaugaauucaacucccccccaaacaaccaaaugaugcugugugaaccaacaauaauagaaagaaacauaacagagauaguguauuugaccaacaccaccauagagaaggaaauaugccccaaaccagcagaauacagaaauuggucaaaaccgcaauguggcauuacaggauuugcaccuuucucuaaggacaauucgauuaggcuuuccgcugguggggacaucugggugacaagagaaccuuaugugucaugcgguccugacaaguguuaucaauuugcccuuggacagggaacaacacuaaacaacaugcauucaaauaacacaguacgugauaggaccccuuaucggacucuauugaugaaugaguuggguguuccuuuucaucuggggaccaagcaagugugcauagcaugguccagcucaaguugucacgauggaaaagcauggcugcauguuuguauaacgggggaugauaaaaaugcaacugcuagcuucauuuacaaugggaggcuuguagauaguguuguuucaugguccaaagaaauucucaggacccaggagucagaaugcguuuguaucaauggaacuuguacaguaguaaugacugauggaagugcuucaggaaaagcugauacuaaaauauuauucauugaggaggggaaaaucguucauacuagcacauugucaggaagugaucagcauaucgaagagugcucuugcuauccucgauauccuggugucagaugugucugcagagacaacuggaaaggcuccaaucggcccaucguagauauaaacauaaaggaucauagcauugucuccaguuauguguguucaggacuuguuggagacacacccagaaaaaacgacagcuccagcaguagccauuguuuggauccuaacaaugaagaagguggucauggagugaaaggcugggccuuugaugauggaaaugacguguggaugggaagaacaaucaacgagacgucacgcuuaggguaugaaaccuucaaagucauugaaggcugguccaacccuaaguccaaauugcagauaaauaggcaagucauaguugacagaggugauagguccgguuauucugguauuuucucuguugaaggcaaaagcugcaucaaucggugcuuuuauguggaguugauuaggggaagaaaagaggaaacugaagucuuguggaccucaaacaguauuguuguguuuuguggcaccucagguacauauggaacaggcucauggccugauggggcggaccucaaucucaugccuauauaa

SEQ ID NO: 56948 - RNA, 1410 nt, Artificial Sequence; identical to SEQ ID NO: 55957
  derived and/or modified CDS sequence (wt) from neuraminidase__InfluenzaA__AHL98405

SEQ ID NO: 56949 - RNA, 1410 nt, Artificial Sequence
  derived and/or modified CDS sequence (wt) from neuraminidase__InfluenzaA__AHL98417
augaauccaaaucaaaagauaauaacgauuggcucuguuucucucaccauuuccacaauaugcuucuucaugcaaauugccaucuugauaacuacuguaacauugcauuucaagcaauaugaauucaacucccccccaaacaaccaagugaugcugugugaaccaacaauaauagaaagaaacauaacagagauaguguaucugaccaacaccaccauagagaaggaaauaugccccaaaccagcagaauacagaaauuggucaaaaccgcaauguggcauuacaggauuugcaccuuucucuaaggacaauucgauuaggcuuuccgcugguggggacaucugggugacaagagaaccuuaugugucaugcgaucccgacaaguguuaucaauuugcccuuggacagggaacaacacuaaacaacgugcauucaaauaacacaguacgugauaggaccccuuaucggacucuauugaugaaugaguuggguguuccuuuucaucuggggaccaagcaagugugcauagcaugguccagcucaaguugucacgauggaaaagcauggcugcauguuuguauaacgggggaugauaaaaaugcaacugcuagcuucauuuacaaugggaggcuuguagauaguguuguuucaugguccaaagaaauucucaggacccaggagucagaaugcguuuguaucaacggaacuuguacaguaguaaugacugauggaagugcuucaggaaaagcugauacuaaaauacuauucauugaggaggggaaaaucguucauacuagcacauugucaggaagugcucagcaugucgaagagugcucuugcuauccucgauauccuggugucagaugugucugcagagacaacuggaaaggcuccaaucggcccaucguagauauaaacauaaaggaucauagcauuguuuccaguuauguguguucaggacuuguuggagacacacccagaaaaaacgacagcuccagcaguagccauuguuuggauccuaacaaugaagaagguggucauggagugaaaggcugggccuuugaugauggaaaugacguguggaugggaagaacaaucaacgagacgucacgcuuaggguaugaaaccuucaaagucauugaaggcugguccaacccuaaguccaaauugcagauaaauaggcaagucauaguugacagaggugauagguccgguuauucugguauuuucuccguugaaggcaaaagcugcaucaaucggugcuuuuauguggaguugauuaggggaagaaaagaggaaacugaagucuuguggaccucaaacaguauuguuguguuuuguggcaccucagguacauauggaacaggcucauggccugauggggcggaccucaaucucaugccuauauaa

SEQ ID NO: 56950 - RNA, 1410 nt, Artificial Sequence
  derived and/or modified CDS sequence (wt) from neuraminidase__InfluenzaA__AHL98429
augaauccaaaucaaaagauaauaacgauuggcucuguuucucucaccauuuccacaauaugcuucuucaugcaaauugccaucuugauaacuacuguaacauugcauuucaagcaauaugaauucaacucccccccaaacaaccaagugaugcugugugaaccaacaauaauagaaagaaacauaacagagauaguguaucugaccaacaccaccauagagaaggaaauaugccccaaaccagcagaauacagaaauuggucaaagccgcaauguggcauuacaggauuugcaccuuucucuaaggacaauucgauuaggcuuuccgcugguggggacaucugggugacaagagaaccuuaugugucaugcgauccugacaaguguuaucaauuugcccuuggacagggaacaacacuaaacaacgugcauucaaauaacacaguacgugauaggaccccuuaucggacucuauugaugaaugaguuggguguuccuuuucaucuggggaccaagcaagugugcauagcaugguccagcucaaguugucacgauggaaaagcauggcugcauguuuguauaacgggggaugauaaaaaugcaacugcuagcuucauuuacaaugggaggcuuguagauaguguuguuucaugguccaaagaaauucucagaacccaggagucagaaugcguuuguaucaauggaacuuguacaguaguaaugacugauggaagugcuucaggaaaagcugauacuaaaauacuauucauugaggaggggaaaaucguucauacuagcacauugucaggaagugcucagcaugucgaagagugcucuugcuauccucgauauccuggugucagaugugucugcagagacaacuggaaaggcuccaaucggcccaucguagauauaaacauaaaggaucauagcauuguuuccaguuauguguguucaggacuuguuggagacacacccagaaaaaacgacagcuccagcaguagccauuguuuggauccuaacaaugaagaagguggucauggagugaaaggcugggccuuugaugauggaaaugacguguggaugggaagaacaaucaacgagacgucacgcuuaggguaugaaaccuucaaagucauugaaggcugguccaacccuaaguccaaauugcagauaaauaggcaagucauaguugacagaggugauagguccgguuauucugguauuuucucuguugaaggcaaaagcugcaucaaucggugcuuuuauguggaguugauuaggggaagaaaagaggaaacugaagucuuguggaccucaaacaguauuguuguguuuuguggcacuucagguacauauggaacaggcucauggccugauggggcggaccucaaucucaugccuauauaa

SEQ ID NO: 56951 - RNA, 1410 nt, Artificial Sequence
  derived and/or modified CDS sequence (wt) from neuraminidase__InfluenzaA__AHL98452
augaauccaacccaaaagauaauaaccauugguucggucuguaugacaauuggaauggcuaacuuaauauuacaaauuggaaacauaaucucaauauggauuagccacucaauucaacuugggaaucaaagucagauugaaacaugcaaucaaagcgucauuacuuaugaaaacaacacuuggguaaaucagacauauguuaacaucagcaacaccaacuuugcugcuggacagucagugguuuccguaaaauuagcgggcaauuccucucucugcccuguuaguggaugggcuauauacaguaaagacaacaguguaagaaucgguuccaagggggauguguuugucauaagggaaccauucauaucaugcucccccuuggaaugcagaaccuucuucuugacucaaggggccuugcuaaaugacaaacacuccaauggaaccauuaaagacaggagcccauaucgaacccuaaugagcuguccuauuggugaaguucccucuccauacaacucaagauuugagucagucgcuuggucagcaagugcuugucaugauggcaucaauuggcuaacaauuggaauuucuggcccagacaguggggcaguggcuguguuaaaguacaauggcauaauaacagacacuaucaagaguuggaaaaauaauauauugagaacacaagagucugaaugugcauguguaaaugguucuugcuuuaccauaaugaccgauggaccaagugacggacaggccucauacaagaucuucagaauagaaaagggaaagauagucaaaucagucgaaaugaaugccccuaauuaucacuaugaggaaugcuccuguuauccugauucuagugaaaucacaugugugugcagggauaacuggcauggcucaaaucgaccgugggugucuuucaaccagaaucuggaauaucagauaggauacauaugcagugggguuuucggagacaauccacgcccuaaugauaagacaggcaguugugguccaguaucgucuaauggagcaaauggaguaaaaggauuuucauucaaauacggcaaugguguuuggauagggagaacuaaaagcauuaguucaagaaaagguuuugagaugauuugggauccaaauggauggacugggacagacaauaauuucucaauaaagcaagauaucguaggaauaaaugaguggucaggauauagcgggaguuuuguucagcauccagaacuaacagggcuggauuguauaagaccuugcuucuggguugaacuaaucagagggcgacccaaagagaacacaaucuggacuagcgggagcagcauauccuuuugugguguaaacagugacacuguggguuggucuuggccagacggugcugaguugccauuuaccauugacaaguaa

SEQ ID NO: 56952 - RNA, 1410 nt, Artificial Sequence
  derived and/or modified CDS sequence (wt) from neuraminidase__InfluenzaA__AHL98474
augaauccaaaccaaaagauaauaaccauugguucggucuguaugacaauuggaauggcuaacuuaauauuacaaauuggaaacauaaucucaauauggauuagccacucaauucaacuugggaaucaaagucagauugaaacaugcaaucaaagcgucauuacuuaugaaaacaacacuuggguaaaucagacauauguuaacaucagcaacaccaacuuugcugcuggacagucggugguuuccgugaaauuagcgggcaauuccucucucugcccuguuaguggaugggcuauauacaguaaagacaacaguguaagaaucgguuccaagggggauguguuugucauaagggaaccauucauaucaugcucccccuuggaaugcagaaccuucuucuugacucaaggggccuugcuaaaugacaaacauuccaauggaaccauuaaagacaggagcccauaucgaacccuaaugagcuguccuauuggugaaguucccucuccauacaacucaagauuugagucggucgcuuggucagcaagugcuugucaugauggcaucaauuggcuaacaauuggaauuucuggcccaaacaguggggcaguggcuguauuaaaguacaauggcauaauaacagacacuaucaagaguuggagaaacaauauauugagaacacaagagucugaaugugcauguguaaaugguucuugcuuuaccauaaugaccgauggaccaagugauggacaggccucauacaagaucuucagaauagaaaagggaaagauagucaaaucagucgaaaugaaugccccuaauuaucacuaugaggaaugcuccuguuauccugauucuagugaaaucacaugugugugcagggauaacuggcauggcucgaaucgaccgugggugucuuucaaccagaaucuggaauaucagauaggauacauaugcagugggguuuucggagacaauccacgcccuaaugauaagacaggcaguugugguccaguaucgucuaauggagcaaauggaguaaaaggauuuucauucaaauacggcaaugguguuuggauagggagaacuaaaagcauuaguucaagaaaagguuuugagaugauuugggauccaaauggauggacugggacagacaauaacuucucaauaaagcaagauaucguaggaauaaaugaguggucaggauauagcgggaguuuuguucagcauccagaacuaacagggcuggauuguauaagaccuugcuucuggguugaacuaaucagagggcgacccaaagagaacacaaucuggacuagcgggagcagcauauccuuuugugguguaaacagugacacuguggguuggucuuggccagacggugcugaguugccauuuaccauugacaaguaa

SEQ ID NO: 56953 - RNA, 1410 nt, Artificial Sequence
  derived and/or modified CDS sequence (wt) from neuraminidase__InfluenzaA__AHL98485
augaauccaaaucaaaagauaauaacgauuggcucuguuucucucaccauuuccacaauaugcuucuucaugcaaauugccaucuugauaacuacuguaacauugcauuucaagcaauaugaauucaacucccccccaaacaaccaagugaugcugugugaaccaacaauaauagaaagaaacauaacagagauaguguaucugaccaacaccaccauagagaaggaaauaugccccaaaccagcagaauacagaaauuggucaaaaccgcaauguggcauuacaggauuugcaccuuucucuaaggacaauucgauuaggcuuuccgcugguggggacaucugggugacaagagaaccuuaugugucaugcgauccugacaaguguuaucaauuugcccuuggacagggaacaacacuaaacaacgugcauucaaauaacacaguacgugauaggaccccuuaucggacucuauugaugaaugaguuggguguuccuuuucaucuggggaccaagcaagugugcauagcaugguccagcucaaguugucacgauggaaaagcauggcugcauguuuguauaacgggggaugauaaaaaugcaacugcuagcuucauuuacaaugggaggcuuguagauaguguuguuucaugguccaaagaaauucucaggacccaggagucagaaugcguuuguaucaauggaacuuguacaguaguaaugacugauggaagugcuucaggaaaagcugauacuaaaauacuauucauugaggaggggaaaaucguucauacuagcauauugucaggaagugcucagcaugucgaagagugcucuugcuauccucgauauccuggugucagaugugucugcagagacaacuggaaaggcuccaaucggcccaucguagauauaaacauaaaggaucauagcauuguuuccaguuauguguguucaggacuuguuggagacacacccagaaaaaacgacagcuccagcaguagccauuguuuggauccuaacaaugaagaagguggucauggagugaaaggcugggccuuugaugauggaaaugacguguggaugggaagaacaaucaacgagacgucacgcuuaggguaugaaaccuucaaagucauugaaggcugguccaacccuaaguccaaauugcagauaaauaggcaagucauaguugacagaggugauagguccgguuauucugguauuuucucuguugaaggcaaaagcugcaucaaucggugcuuuuauguggaguugauuaggggaagaaaagaggaaacugaagucuuguggaccucaaacaguauuguuguguuuuguggcaccucagguacauauggaacaggcucauggccugauggggcggaccucaaucucaugccuauauaa

SEQ ID NO: 56954 - RNA, 1410 nt, Artificial Sequence; identical to SEQ ID NO: 55976
  derived and/or modified CDS sequence (wt) from neuraminidase__InfluenzaA__AHL98497

SEQ ID NO: 56955 - RNA, 1410 nt, Artificial Sequence; identical to SEQ ID NO: 55869
  derived and/or modified CDS sequence (wt) from neuraminidase__InfluenzaA__AHL98509

SEQ ID NO: 56956 - RNA, 1410 nt, Artificial Sequence; identical to SEQ ID NO: 55865
  derived and/or modified CDS sequence (wt) from neuraminidase__InfluenzaA__AHL98521

SEQ ID NO: 56957 - RNA, 1410 nt, Artificial Sequence; identical to SEQ ID NO: 55976
  derived and/or modified CDS sequence (wt) from neuraminidase__InfluenzaA__AHL98533

SEQ ID NO: 56958 - RNA, 1410 nt, Artificial Sequence; identical to SEQ ID NO: 55869
  derived and/or modified CDS sequence (wt) from neuraminidase__InfluenzaA__AHL98545

SEQ ID NO: 56959 - RNA, 1410 nt, Artificial Sequence; identical to SEQ ID NO: 55869
  derived and/or modified CDS sequence (wt) from neuraminidase__InfluenzaA__AHL98557

SEQ ID NO: 56960 - RNA, 1410 nt, Artificial Sequence; identical to SEQ ID NO: 55880
  derived and/or modified CDS sequence (wt) from neuraminidase__InfluenzaA__AHL98569

SEQ ID NO: 56961 - RNA, 1410 nt, Artificial Sequence
  derived and/or modified CDS sequence (wt) from neuraminidase__InfluenzaA__AHL98581
augaauccaaaucaaaagauaauaacgauuggcucuguuucucucaccauuuccacaauaugcuucuucaugcaaauugccaucuugauaacuacuguaacauugcauuucaagcaauaugaauucaacucccccccaaacaaccaagugaugcugugugaaccaacaauaauagaaagaaacauaacagagauaguguaucugaccaacaccaccauagagaaggaaauaugccccaaaccagcagaauauagaaauuggucaaaaccgcaauguggcauuacaggauuugcaccuuucucuaaggacaauucgauuaggcuuuccgcuggugggaacaucugggugacaagagaaccuuaugugucaugcgaucccgacaaguguuaucaauuugcccuuggacagggaacaacacuaaacaacgugcauucaaauaacacaguacgugauaggaccccuuaucggacucuauugaugaaugaguuggguguuccuuuucaucuggggaccaagcaagugugcauagcaugguccagcucaaguugucacgauggaaaagcauggcugcauguuuguauaacgggggaugauaaaaaugcaacugcuagcuucauuuacaaugggaggcuuguagauaguguuguuucaugguccaaagaaauucucaggacccaggagucagaaugcguuuguaucaauggaacuuguacaguaguaaugacugauggaagugcuucaggaaaagcugauacuaaaauacuauucauugaggaggggaaaaucguucauacuagcacauugucaggaagugcucagcaugucgaagagugcucuugcuauccucgauauccuggugucagaugugucugcagagacaacuggaaaggcuccaaucggcccaucguagauauaaacauaaaggaucauagcauuguuuccaguuauguguguucaggacuuguuggagacacacccagaaaaaacgacagcuccagcaguagccauuguuuggauccuaacaaugaagaagguggucauggagugaaaggcugggccuuugaugauggaaaugacguguggaugggaagaacaaucaacgagacgucacgcuuaggguaugaaaccuucaaagucauugaaggcugguccaacccuaaguccaaauugcagauaaauaggcaagucauaguugacagaggugauagguccgguuauucugguauuuucucuguugaaggcaaaagcugcaucaaucggugcuuuuauguggaguugauuaggggaagaaaagaggaaacugaagucuuguggaccucaaacaguauuguuguguuuuguggcaccucagguacauauggaacaggcucauggccugauggggcggaccucaaucucaugccuauauaa

SEQ ID NO: 56962 - RNA, 1410 nt, Artificial Sequence; identical to SEQ ID NO: 55865
  derived and/or modified CDS sequence (wt) from neuraminidase__InfluenzaA__AHL98593

SEQ ID NO: 56963 - RNA, 1410 nt, Artificial Sequence; identical to SEQ ID NO: 55944
  derived and/or modified CDS sequence (wt) from neuraminidase__InfluenzaA__AHL98605

SEQ ID NO: 56964 - RNA, 1410 nt, Artificial Sequence; identical to SEQ ID NO: 55976
  derived and/or modified CDS sequence (wt) from neuraminidase__InfluenzaA__AHL98617

SEQ ID NO: 56965 - RNA, 1410 nt, Artificial Sequence; identical to SEQ ID NO: 55976
  derived and/or modified CDS sequence (wt) from neuraminidase__InfluenzaA__AHL98629

SEQ ID NO: 56966 - RNA, 1410 nt, Artificial Sequence
  derived and/or modified CDS sequence (wt) from neuraminidase__InfluenzaA__AHL98641
augaauccaaaucaaaagauaauaacgauuggcucuguuucucucaccauuuccacaauaugcuucuucaugcaaauugccaucuugauaacuacuguaacauugcauuucaagcaauaugaauucaacucccccccaaacaaccaagugaugcugugugaaccaacaauaauagaaagaaacauaacagagauaguguauuugaccaacaccaccauagagaaggaaauaugccccaaaccagcagaauacagaaauuggucaaaaccgcaauguggcauuacaggauuugcaccuuucucuaaggacaauucgauuaggcuuuccgcugguggggacaucugggugacaagagaaccuuaugugucaugcgauccugacaaguguuaucaauuugcccuuggacagggaacaacacuaaacaacgugcauucaaauaacacaguacgugauaggaccccuuaucggacucuauugaugaaugaguuggguguuccuuuucaucuggggaccaagcaagugugcauagcaugguccagcucaaguugucacgauggaaaagcauggcugcauguuuguauaacgggggaugauaaaaaugcaacugcuagcuucauuuacaaugggaggcuuguagauaguguuguuucaugguccaaagaaauucucaggacccaggaaucagaaugcguuuguaucaauggaacuuguacaguaguaaugacugauggaagugcuucaggaaaagcugauacuaaaauauuauucauugaggaggggaaaaucguucauacuagcacauugucaggaagugcucagcaugucgaagagugcucgugcuauccucgauauccuggugucagaugugucugcagagacaacuggaaaggcuccaaucggcccaucguagauauaaacauaaaggaucauagcauuguuuccaguuauguguguucaggacuuguuggagacacacccagaaaaaacgacagcuccagcaguagccauuguuuggauccuaacaaugaagaagguggucauggaguaaaaggcugggccuuugaugaugggaaugacguguggaugggaagaacaaucaacgagacgucacgcuuaggguaugaaaccuucaaagucauugaaggcugguccaacccuaaguccaaauugcagauaaauaggcaagucauaguugacagaggugauagguccgguuauucugguauuuucucuguugaaggcaaaagcugcaucaaucggugcuuuuauguggaguugauuaggggaagaaaagaggaaacugaagucuuguggaccucaaacaguauuguuguguuuuguggcaccucagguacauauggaacaggcucauggccugauggggcggaccucaaucucaugccuauauaa

SEQ ID NO: 56967 - RNA, 1410 nt, Artificial Sequence
  derived and/or modified CDS sequence (wt) from neuraminidase__InfluenzaA__AHL98653
augaauccaaaucaaaagauaauaacgauuggcucuguuucucucaccauuuccacaauaugcuucuucaugcaaauugccaucuugauaacuacuguaacauugcauuucaagcaauaugaauucaacucccccccaaacaaccaagugaugcugugugaaccaacaauaauagaaagaaacauaacagagauaguguaucugaccaacaccaccauagagaaggaaauaugccccaaaccagcagaauacagaaauuggucaaaaccgcaauguggcauuacaggauuugcaccuuucucuaaggacaauucgauuaggcuuuccgcugguggggacaucugggugacaagagaaccuuaugugucaugcgaucccgacaaguguuaucaauuugcccuuggacagggaacaacacuaaacaacgugcauucaaauaacacaguacgugauaggaccccuuaucggacucuauugaugaaugaguuggguguuccuuuucaucuggggaccaagcaagugugcauagcaugguccagcucaaguugucacgauggaaaagcauggcugcauguuuguauaacgggggaugauaaaaaugcaacugcuagcuucauuuacaaugggaggcuuguagauaguguuguuucaugguccaaagaaauucucaggacccaggagucagaaugcguuuguaucaauggaacuuguacaguaguaaugacugauggaagugcuucaggaaaagcugauacuaaaauacuauucauugaggaggggaaaaucguucauacuagcacauugucaggaagugcucagcaugucgaagagugcucuugcuauccucgauauccuggugucagaugugucugcagagacaacuggaaaggcuccaaucggcccaucguagauauaaacauaaaggaucauagcauuguuuccaguuauguguguucaggacuuguuggagacacacccagaaaaaacgacaucuccagcaguagccauuguuuggauccuaacaaugaagaagguggucauggagugaaaggcugggccuuugaugauggaaaugacguguggaugggaagaacaaucaacgagacgucacgcuuaggguaugaaaccuucaaagucauugaaggcugguccaacccuaaguccaaauugcagauaaauaggcaagucauaguugacagaggugauagguccgguuauucugguauuuucucuguugaaggcaaaagcugcaucaaucggugcuuuuauguggaguugauuaggggaagaaaagaggaaacugaagucuuauggaccucaaacaguauuguuguguuuuguggcaccucagguacauauggaacaggcucauggccugauggggcggaccucaaucucaugccuauauaa

SEQ ID NO: 56968 - RNA, 1410 nt, Artificial Sequence
  derived and/or modified CDS sequence (wt) from neuraminidase__InfluenzaA__AHL98665
augaauccaaaucaaaagauaauaacgauuggcucuguuucucucaccauuuccacaauaugcuucuucaugcaaauugccaucuugauaacuacuguaacauugcauuucaagcaauaugaauucaacucccccccaaacaaccaagugaugcugugugaaccaacaauaauagaaagaaacauaacagagauaguguaucugaccaacaccaccauagagaaggaaauaugccccaaaccagcagaauacagaaauuggucaaagccgcaauguggcauuacaggauuugcaccuuucucuaaggacaauucgauuaggcuuuccgcugguggggacaucugggugacaagagaaccuuaugugucaugcgauccugacaaguguuaucaauuugcccuuggacagggaacaacacuaaacaacgugcauucaaauaacacaguacgugauaggaccccuuaucggacucuauugaugaaugaguuggguguuccuuuucaucuggggaccaagcaagugugcauagcaugguccagcucaaguugucacgauggaaaagcauggcugcauguuuguauaacgggggaugauaaaaaugcaacugcuagcuucauuuacaaugggaggcuuguagauaguguuguuucaugguccaaagaaauucucaggacccaggagucagaaugcguuuguaucaauggaacuuguacaguaguaaugacugauggaagugcuucaggaaaagcugauacuaaaauacuauucauugaggaggggaaaaucguucauacuagcacauugucaggaagugcucagcaugucgaagagugcucuugcuauccucgauauccuggugucaggugugucugcagagacaacuggaaaggcuccaaucggcccaucguagauauaaacauaaaggaucauagcauuguuuccaguuauguguguucaggacuuguuggagacacacccagaaaaaacgacagcuccagcaguagccauuguuuggauccuaacaaugaagaagguggucauggagugaaaggcugggccuuugaugauggaaaugacguguggaugggaagaacaaucaacgagacgucacgcuuaggguaugaaaccuucaaagucauugaaggcugguccaacccuaaguccaaauugcagauaaauaggcaagucauaguugacagaggugauagguccgguuauucugguauuuucucuguugaaggcaaaagcugcaucaaucggugcuuuuauguggaguugauuaggggaagaaaagaggaaacugaagucuuguggaccucaaacaguauuguuguguuuuguggcaccucugguacauauggaacaggcucauggccugauggggcggaccucaaucucaugccuauauaa

SEQ ID NO: 56969 - RNA, 1410 nt, Artificial Sequence
  derived and/or modified CDS sequence (wt) from neuraminidase__InfluenzaA__AHL98677
augaauccaaaucaaaagauaauaacgauuggcucuguuucucucaccauuuccacaauaugcuucuucaugcaaauugccaucuugauaacuacuguaacauugcauuucaagcaauaugaauucaacucccccccaaacaaccaagugaugcugugugaaccaacaauaauagaaagaaacauaacagagauaguguaucugaccaacaccaccauagagaaggaaauaugccccaaaccagcagaauacagaaauuggucaaaaccgcaauguggcauuacaggauuugcaccuuucucuaaggacaauucgauuaggcuuuccgcugguggggacaucugggugacaagagaaccuuaugugucaugcgaucccgacaaguguuaucaauuugcccuuggacagggaacaacacuaaacaacgugcauucaaauaacacaguacgugauaggaccccucaucggacucuauugaugaaugaguuggguguuccuuuucaucuggggaccaagcaagugugcauagcaugguccagcucaaguugucacgauggaaaagcauggcugcauguuuguauaacgggggaugauaaaaaugcaacugcuagcuucauuuacaaugggaggcuuguagauaguguuguuucaugguccaaagaaauucucaggacccaggagucagaaugcguuuguaucaauggaacuuguacaguaguaaugacugauggaagugcuucaggaaaagcugauacuaaaauacuauucauugaggaggggaaaaucguucauacuagcacauugucaggaaaugcucagcaugucgaagagugcucuugcuauccucgauauccuggugucagaugugucugcagagacaacuggaaaggcuccaaucggcccaucguagauauaaacauaaaggaucauagcauuguuuccaguuauguguguucaggacuuguuggagacacacccagaaaaaacgacagcuccagcaguagccauuguuuggauccuaacaaugaagaagguggucauggagugaaaggcugggccuuugaugauggaaaugacguguggaugggaagaacaaucaacgagacgucacgcuuaggguaugaaaccuucaaagucauugaaggcugguccaacccuaaguccaaauugcagauaaauaggcaagucauaguugacagaggugauagguccgguuauucugguauuuucucuguugaaggcaaaagcugcaucaaucggugcuuuuauguggaguugauuaggggaagaaaagaggaaacugaagucuuguggaccucaaacaguauuguuguguuuuguggcaccucagguacauauggaacaggcucauggccugauggggcggaccucaaucucaugccuauauaa

SEQ ID NO: 56970 - RNA, 1410 nt, Artificial Sequence
  derived and/or modified CDS sequence (wt) from neuraminidase__InfluenzaA__AHL98689
augaauccaaaucaaaagauaauaacgauuggcucuguuucucucaccauuuccacaauaugcuucuucaugcaaauugccaucuugauaacuacuguaacauugcauuucaagcaauaugaauucaacucccccccaaacaaccaagugaugcugugugaaccaacaauaauagaaagaaacauaacagagauaguguauuugaccaacaccaccauagagaaggaaauaugccccaaaccagcagaauacagaaauuggucaaaaccgcaauguggcauuacaggauuugcaccuuucucuaaggacaauucgauuaggcuuuccgcugguggggacaucugggugacaagagaaccuuaugugucaugcgguccugacaaguguuaucaauuugcccuuggacagggaacaacacuaaacaacaugcauucaaauaacacaguacgugauaggaccccuuaucggacucuauugaugaaugaguuggguguuccuuuucaucuggggaccaagcaagugugcauagcaugguccagcucaaguugucacgauggaaaagcauggcugcauguuuguauaacgggggaugauaaaaaugcaacugcuagcuucauuuacaaugggaggcuuguagauaguguuguuucaugguccaaagaaauucucaggacccaggagucagaaugcguuuguaucaauggaacuuguacaguaguaaugacugauggaagugcuucaggaaaagcugauacuaaaauauuauucauugaggaggggaaaaucguucauacuagcacauugucaggaagugcucagcaugucgaagagugcucuugcuauccucgauauccuggugucagaugugucugcagagacaacuggaaaggcuccaaucggcccaucguagauauaaacauaaaggaucauagcauugucuccaguuauguguguucaggacuuguuggagacacacccagaaaaaacgacagcuccagcaguagccauuguuuggauccuaacaaugaagaagguggucauggagugaaaggcugggccuuugaugauggaaaugacguguggaugggaagaacaaucaacgagacaucacgcuuaggguaugaaaccuucaaagucauugaaggcugguccaacccuaaguccaaauugcagauaaauaggcaagucauaguugacagaggugauagguccgguuauucugguauuuucucuguugaaggcaaaagcugcaucaaucggugcuuuuauguggaguugauuaggggaagaaaagaggaaacugaagucuuguggaccucaaacaguauuguuguguuuuguggcaccucagguacauauggaacaggcucauggccugauggggcggaccucaaucucaugccuauauaa

SEQ ID NO: 56971 - RNA, 1410 nt, Artificial Sequence
  derived and/or modified CDS sequence (wt) from neuraminidase__InfluenzaA__AHL98702
augaauccaaaucaaaagauaauaacgauuggcucuguuucucucaccauuuccacaauaugcuucuucaugcaaauugccaucuugauaacuacuguaacauugcauuucaagcaauaugaauucgacucccccccaaacaaccaagugaugcugugugaaccaacaauaauagaaagaaacauaacagagauaguguaucugaccaacaccaccauagagaaggaaauaugccccaaaccagcagaauacagaaauuggucaaaaccgcaauguggcauuacaggauuugcaccuuucucuaaggacaauucgauuaggcuuuccgcugguggggacaucugggugacaagagaaccuuaugugucaugcgauccugacaaguguuaucaauuugcccuuggacagggaacaacacuaaacaacgggcauucaaauaacacaguacgugauaggaccccuuaucggacucuauugaugaaugaguuggguguuccuuuucaucuggggaccaagcaagugugcauagcaugguccagcucaaguugucacgauggaaaagcauggcugcauguuuguauaacgggggaugauaaaaaugcaacugcuagcuucauuuacaaugggaggcuuguagauaguguuguuucaugguccaaagaaauucucaggacccaggagucagaaugcguuuguaucaauggaacuuguacaguaguaaugacugauggaagugcuucaggaaaagcugauacuaaaauacuauucauugaggaggggaaaaucguucauacuagcacauugucaggaagugcucagcauguugaagagugcucuugcuauccucgauauccuggugucagaugugucugcagagacaacuggaaaggcuccaaucggcccaucguagauauaaacauaaaggaucauagcauuguuuccaguuauguguguucaggacuuguuggagacacacccagaaaaaacgacaguuccagcaguagccauuguuuggauccuaacaaugaagaagguggucauggagugaaaggcugggccuuugaugauggaaaugacguguggaugggaagaacaaucaacgagacgucacgcuuaggguaugaaaccuucaaagucauugaaggcugguccaacccuaaguccaaauugcagauaaauaggcaagucauaguugacagaggugauagguccgguuauucugguauuuucucuguugaaggcaaaagcugcaucaaucggugcuuuuauguggaguugauuaggggaagaaaagaggaaacugaagucuuguggaccucaaacaguauuguuguguuuuguggcaccucagguacauauggaacaggcucauggccugauggggcggaccucaaccucaugccuauauaa

SEQ ID NO: 56972 - RNA, 1410 nt, Artificial Sequence; identical to SEQ ID NO: 55813
  derived and/or modified CDS sequence (wt) from neuraminidase__InfluenzaA__AHL98714

SEQ ID NO: 56973 - RNA, 1410 nt, Artificial Sequence
  derived and/or modified CDS sequence (wt) from neuraminidase__InfluenzaA__AHL98725
augaauccaaaucaaaagauaauaacgauuggcucuguuucucucaccauuuccacaauaugcuucuucaugcaaauugccaucuugauaacuacuguaacauugcauuucaagcaauaugaauucaacucccccccaaacaaccaagugaugcugugugaaccaacaauaauagaaagaaacauaacagagauaguguaucugaccaacaccaccauagagaaggaaauaugccccaaaccagcagaauacagaaauuggucaaagccgcaauguggcauuacaggauuugcaccuuucucuaaggacaauucgauuaggcuuuccgcuggugggggcaucugggugacaagagaaccuuaugugucaugcgauccugacaaguguuaucaauuugcccuuggacagggaacaacacuaaacaacgugcauucaaauaacacaguacgugauaggaccccuuaucggacucuauugaugaaugaguuggguguuccuuuucaucuggggaccaagcaagugugcauagcaugguccagcucaaguugucacgauggaaaagcauggcugcauguuuguauaacgggggaugauaaaaaugcaacugcuagcuucauuuacaaugggaggcuuguagauaguguuguuucaugguccaaagaaauucucaggacccaggagucagaaugcguuuguaucaauggaacuuguacaguaguaaugacugauggaaaugcuucaggaaaagcugauacuaaaauacuauucauugaggaggggaaaaucguucauacuagcacauugucaggaagugcucagcaugucgaagagugcucuugcuauccucgauauccuggugucagauguguuugcagagacaacuggaaaggcuccaaucggcccaucguagauauaaacauaaaggaucauagcauuguuuccaguuauguguguucaggacuuguuggagacacacccagaaaaaacgacagcuccagcaguagccauuguuuggauccuaacaaugaagaagguggucauggagugaaaggcugggccuuugaugaugaaaaugacguguggaugggaagaacaaucaacgagacgucacgcuuaggguaugaaaccuucaaagucauugaaggcugguccaacccuaaguccaaauugcagauaaauaggcaagucauaguugacagagguaauagguccgguuauucugguauuuucucuguugaaggcaaaagcugcaucaaucggugcuuuuauguggaguugauuaggggaagaaaagaggaaacugaagucuuguggaccucaaacaguauuguuguguuuuguggcaccucagguacauauggaacaggcucauggccugauggggcggaccucaaucucaugccuauauaa

SEQ ID NO: 56974 - RNA, 1410 nt, Artificial Sequence
  derived and/or modified CDS sequence (wt) from neuraminidase__InfluenzaA__AHL98737
augaauccaaaucaaaagauaauaacgauuggcucuguuucucucaccauuuccacaauaugcuucuucaugcaaauugccaucuugauaacuacuguaacauuacauuucaagcaauaugaauucaacucccccccaaacaaccaagugaugcugugugaaccaacaauaauagaaagaaacauaacagagauaguguaucugaccaacaccaccauagagaaggaaauaugccccaaaccagcagaauauagaaauuggucaaaaccgcaauguggcauuacaggauuugcaccuuucucuaaggacaauucgauuaggcuuuccgcugguggggacaucugggugacaagagaaccuuaugugucaugcgaucccgacaaguguuaucaauuugcccuuggacagggaacaacacuaaacaacaugcauucaaauaacacaguacgugauaggaccccuuaucggacucuauugaugaaugaguuggguguuccuuuucaucuggggaccaagcaagugugcauagcaugguccagcucaaguugucacgauggaaaagcauggcugcauguuuguauaacgggggaugauaaaaaugcaacugcuagcuucauuuacaaugggaggcuuguagauaguguuguuucaugguccaaagaaauucucaggacccaggagucagaaugcguuuguaucaauggaacuuguacaguaguaaugacugauggaagugcuucaggaaaagcugauacuaaaauacuauucauugaggaggggaaaaucguucauacuagcacauugucaggaagugcucagcaugucgaagagugcucuugcuauccucgauauccuggugucagaugugucugcagagacaacuggaaaggcuccaaucggcccaucguagauauaaacauaaaggaucauagcauuguuuccaguuauguguguucaggacuuguuggagacacacccagaaaaaacgacagcuccagcaguagccauuguuuggauccuaacaaugaagaagguggucauggagugaaaggcugggccuuugaugauggaaaugacguguggaugggaagaacaaucaacgagacgucacgcuuaggguaugaaaccuucaaagucauugaaggcugguccaacccuaaguccaaauugcagauaaauaggcaagucauaguugacagaggugauagguccgguuauucugguauuuucucuguugaaggcaaaagcugcaucaaucggugcuuuuauguggaguugauuaggggaagaaaagaggaaacugaagucuuguggaccucaaacaguauuguuguguuuuguggcaccucagguacauauggaacaggcucauggccugauggggcggaccucaaucucaugccuauauaa

SEQ ID NO: 56975 - RNA, 1410 nt, Artificial Sequence; identical to SEQ ID NO: 55883
  derived and/or modified CDS sequence (wt) from neuraminidase__InfluenzaA__AHL98749

SEQ ID NO: 56976 - RNA, 1410 nt, Artificial Sequence; identical to SEQ ID NO: 56974
  derived and/or modified CDS sequence (wt) from neuraminidase__InfluenzaA__AHL98761

SEQ ID NO: 56977 - RNA, 1410 nt, Artificial Sequence
  derived and/or modified CDS sequence (wt) from neuraminidase__InfluenzaA__AHL98773
augaauccaaaucaaaagauaauaacgauuggcucuguuucucucaccauuuccacaauaugcuucuucaugcaaauugccaucuugauaacuacuguaacauugcauuucaagcaauaugaauucaacucccccccaaacaaccaagugaugcugugugaaccaacaauaauagaaagaaacauaacagagauaguguauuugaccaacaccaccauagagaaggaaauaugccccaaaccagcagaauacagaaauuggucaaaaccgcaauguggcauuacaggauuugcaccuuucucuaaggacaauucgauuaggcuuuccgcuggugggaacaucugggugacaagagaaccuuaugugucaugcgauccugacaagugcuaucaauuugcccuuggacagggaacaacacuaaacaacgugcauucaaauaacacagcacgugauaggaccccuuaucggacucuauugaugaaugaguuggguguuccuuuucaucuggggaccaagcaagugugcauagcaugguccagcucaaguugucacgauggaaaagcauggcugcauguuuguauaacgggggaugauaaaaaugcaacugcuagcuucauuuacaaugggaggcuuguagauaguguuguuucaugguccaaagaaauucucaggacccaggagucagaaugcguuuguaucaauggaacuuguacaguaguaaugacugauggaagugcuucaggaaaagcugauacuaaaauacuauucauugaggaggggaaaaucguucauacuagcacauugucaggaagugcucagcaugucgaagagugcucuugcuauccucgauauccuggugucagaugugucugcagagacaacuggaaaggcuccaaucggcccaucguagauauaaacauaaaggaucauagcauuguuuccaguuauguguguucaggacuuguuggagacacacccagaaaaaacgacagcuccagcaguagccauuguuuggauccuaacaaugaagaagguggucauggagugaaaggcugggccuuugaugauggaaaugacguauggaugggaagaacaaucaacgagacgucacgcuuaggguaugaaaccuucaaagucauugaaggcugguccaacccuaaguccaaauugcagauaaauaggcaagucauaguugacagaggugauagguccgguuauucugguauuuucucuguugaaggcaaaagcugcaucaaucggugcuuuuauguggaguugauuaggggaagaaaagaggaaacugaagucuuguggaccucaaacaguauuguuguguuuuguggcaccucagguacauauggaacaggcucauggccugauggggcggaccucaaucucaugccuauauaa

SEQ ID NO: 56978 - RNA, 1410 nt, Artificial Sequence; identical to SEQ ID NO: 55915
  derived and/or modified CDS sequence (wt) from neuraminidase__InfluenzaA__AHL98785

SEQ ID NO: 56979 - RNA, 1410 nt, Artificial Sequence
  derived and/or modified CDS sequence (wt) from neuraminidase__InfluenzaA__AHL98797
augaauccaaaucaaaagauaauaacgauuggcucuguuucucucaccauuuccacaauaugcuucuucacgcaaauugccaucuugauaacuacuguaacauugcauuucaagcaauaugaauucaacucccccccaaacaaccaagugaugcugugugaaccaacaauaauagaaagaaacauaacagagauaguguaucugaccaacaccaccaucgagaaggaaauaugccccaaaccagcagaauacagaaauuggucaaaaccgcaauguggcauuacaggauuugcaccuuucucuaaggacaauucgauuaggcuuuccgcugguggggacaucugggugacaagagaaccuuaugugucaugcgauccugacaaguguuaucaauuugcccuuggacagggaacaacacuaaacaacgugcauucaaauaacacaguacgugauaggaccccuuaucggacucuauugaugaaugaguuggguguuccuuuucaucuggggaccaagcaagugugcauagcaugguccagcucaaguugucacgauggaaaagcauggcugcauguuuguauaacgggggaugauaaaaaugcaacugcuagcuucauuuacaaugggaggcuuguagauaguguuguuucaugguccaaagaaauucucaggacccaggagucagaaugcguuuguaucaauggaacuuguacaguaguaaugacugauggaagugcuucaggaaaagcugauacuaaaauacuauucauugaggaggggaaaaucguucauacuagcacauugucaggaagugcucagcaugucgaagagugcucuugcuauccucgauauccuggugucagaugugucugcagagacaacuggaaaggcuccaaucggcccaucguagauauaaacauaaaggaucauagcauuguuuccaguuauguguguucaggacuuguuggagacacacccagaaaaaacgacagcuccagcaguagccauuguuuggauccuaacaaugaagaagguggucauggagugaaaggcugggccuuugaugauggaaaugacguguggaugggaagaacaaucaacgagacgucacgcucaggguaugaaaccuucaaagucauugaaggcugguccaacccuaaguccaaauugcagauaaauaggcaagucauaguugacagaggugauagguccgguuauucugguauuuucucuguugaaggcaaaagcugcaucaaucggugcuuuuauguggaguugauuaggggaagaaaagaggaaacugaagucuuguggaccucaaacaguauuguuguguuuuguggcaccucagguacauauggaacaggcucauggccugauggggcggaccucaaucucaugccuauauaa

SEQ ID NO: 56980 - RNA, 1410 nt, Artificial Sequence; identical to SEQ ID NO: 55877
  derived and/or modified CDS sequence (wt) from neuraminidase__InfluenzaA__AHL98809

SEQ ID NO: 56981 - RNA, 1410 nt, Artificial Sequence
  derived and/or modified CDS sequence (wt) from neuraminidase__InfluenzaA__AHL98821
augaauccaaaucaaaagauaauaacgauuggcucuguuucucucaccauuuccacaauaugcuucuucaugcaaauugccaucuugauaacuacuguaacauugcauuucaagcaauaugaauucaacucccccccaaacaaccaagugaugcugugugaaccaacaauaauagaaagaaacauaacagagauaguguauuugaccaacaccaccauagagaaggaaauaugccccaaaccagcagaauacagaaauuggucaaaaccgcaauguggcauuacaggauuugcaccuuucucuaaggacaauucgauuaggcuuuccgcugguggggacaucugggugacaagagaaccuuaugugucaugcgauccugacagguguuaucaauuugcccuuggacagggaacaacacuaaacaacaugcauucaaauaacacaguacgugauaggaccccuuaucggacucuauugaugaaugaguuggguguuccuuuucaucuggggaccaagcaagugugcauagcaugguccagcucaaguugucacgauggaaaagcauggcugcauguuuguauaacgggggaugauaaaaaugcaacugcuagcuucauuuacaaugggaggcuuguagauaguguuguuucaugguccaaagaaauucucaggacccaggagucagaaugcguuuguaucaauggaacuuguacaguaguaaugacugauggaagugcuucaggaaaagcugauacuaaaauauuauucauugaggaggggaaaaucguucauacuagcacauugucaggaagugcucagcaugucgaagagugcucuugcuauccucgauauccuggugucagaugugucugcagagacaacuggaaaggcuccaaucggcccaucguagauauaaacauaaaggaucauagcauugucuccaguuauguguguucaggacuuguuggagacacacccagaaaaaacgacagcuccagcaguagccauuguuuggauccuaacaaugaagaagguggucauggagugaaaggcugggccuuugaugauggaaaugacguguggaugggaagaacaaucaacgagacgucacgcuuaggguaugaaaccuucaaagucauugaaggcugguccaacccuaaguccaaauugcagauaaauaggcaagucauaguugacagaggugauagguccgguuauucugguauuuucucuguugaaggcaaaagcugcaucaaucggugcuuuuauguggaguugauuaggggaagaaaagaggaaacugaagucuuguggaccucaaacaguauuguuguguuuuguggcaccucagguacauauggaacaggcucauggccugauggggcggaccucaaucucaugccuauauaa

SEQ ID NO: 56982 - RNA, 1410 nt, Artificial Sequence; identical to SEQ ID NO: 55880
  derived and/or modified CDS sequence (wt) from neuraminidase__InfluenzaA__AHL98833

SEQ ID NO: 56983 - RNA, 1410 nt, Artificial Sequence
  derived and/or modified CDS sequence (wt) from neuraminidase__InfluenzaA__AHL98845
augaauccaaaucaaaagauaauaacgauuggcucuguuucucucaccauuuccacaauaugcuucuucaugcaaauugccaucuugauaacuacuguaacauugcauuucaagcaauaugaauucaacucccccccaaacaaccaagugaugcugugugaaccaacaauaauagaaagaaacauaacagagauaguguauuugaucaacaccaccauagagaaggaaauaugccccaaaccagcagaauacagaaauuggucaaaaccgcaauguggcauuacaggauuugcaccuuucucuaaggacaauucgauuaggcuuuccgcugguggggacaucugggugacaagagaaccuuaugugucaugcgguccugacaaguguuaucaauuugcccuuggacagggaacaacacuaaacaacaugcauucaaauaacacaguacgugauaggaccccuuaucggacucuauugaugaaugaguuggguguuccuuuucaucuggggaccaagcaagugugcauagcaugguccagcucaaguugucacgauggaaaagcauggcugcauguuuguauaacgggggaugauaaaaaugcaacugcuagcuucauuuacaaugggaggcuuguagauaguguuguuucaugguccaaagaaauucucaggacccaggagucagaaugcguuuguaucaauggaacuuguacaguaguaaugacugauggaagugcuucaggaaaagcugauacuaaaauauuauucauugaggaggggaaaaucguucauacuagcacauugucaggaagugcucagcaugucgaagagugcucuugcuauccucgauauccuggugucagaugugucugcagagacaacuggaaaggcuccaaucggcccaucguagauauaaacauaaaggaucauagcauugucuccaguuauguguguucaggacuuguuggagacacacccagaaaaaacgacagcuccagcaguagccauuguuuggauccuaacaaugaagaagguggucauggagugaaaggcugggccuuugaugauggaaaugacguguggaugggaagaacaaucaacgagacgucacgcuuaggguaugaaaccuucaaagucauugaaggcugguccaacccuaaguccaaauugcagauaaauaggcaagucauaguugacagaggugauagguccgguuauucugguauuuucucuguugaaggcaaaagcugcaucaaucggugcuuuuauguggaguugauuaggggaagaaaagaggaaacugaagucuuguggaccucaaacaguauuguuguguuuuguggcaccucagguacauauggaacaggcucauggccugauggggcggaccucaaucucaugccuauauaa

SEQ ID NO: 56984 - RNA, 1410 nt, Artificial Sequence
  derived and/or modified CDS sequence (wt) from neuraminidase__InfluenzaA__AHL98857
augaauccaaaucaaaagauaauaacgauuggcucuguuucucucaccauuuccacaauaugcuucuucaugcaaauugccaucuugauaacuacuguaacauugcauuucaagcaauaugaauucaacucccccccaaacaaccaagugaugcugugugaaccaacaauaauagaaagaaacauaacagagauaguguauuugaccaacaccaccauagagaaggaaauaugccccaaaccagcagaauacagaaauuggucaaaaccgcaauguggcauuacaggauuugcaccuuucucuaaagacaauucgauuaggcuuuccgcugguggggacaucugggugacaagagaaccuuaugugucaugcgauccugacaaguguuaucaauuugcccuuggacagggaacaacacuaaacaacaugcauucaaauaacacaguacgugauaggaccccuuaucggacucuauugaugaaugaguuggguguuccuuuucaucuggggaccaagcaagugugcauagcaugguccagcucaaguugucacgauggaaaagcauggcugcauguuuguauaacgggggaugauaaaaaugcaacugcuagcuucauuuacaaugggaggcuuguagauaguguuguuucaugguccaaagaaauucucaggacccaggagucagaaugcguuuguaucaauggaacuugcacaguaguaaugacugauggaagugcuucaggaaaagcugauacuaaaauauuauucauugaggaggggaaaaucguucauacuagcacauugucaggaagugcucagcaugucgaagagugcucuugcuauccucgauauccuggugucagaugugucugcagagacaacuggaaaggcuccaaucggcccaucguagauauaaacauaaaggaucauagcauugucuccaguuauguguguucaggacuuguuggagacacacccagaaaaaacgacagcuccagcaguagccauuguuuggauccuaacaaugaagaagguggucauggagugaaaggcugggccuuugaugauggaaaugacguguggaugggaagaacaaucaaugagacgucacgcuuaggguaugaaaccuucaaagucauugaaggcugguccaacccuaaguccaaauugcagauaaauaggcaagucauaguugacagaggugauagguccgguuauucugguauuuucucuguugaaggcaaaagcugcaucaaucggugcuuuuauguggaguugauuaggggaagaaaagaggaaacugaagucuuguggaccucaaacaguauuguuguguuuuguggcaccucagguacauauggaacaggcucauggccugauggggcggaccucaaucucaugccuauauaa

SEQ ID NO: 56985 - RNA, 1410 nt, Artificial Sequence; identical to SEQ ID NO: 55895
  derived and/or modified CDS sequence (wt) from neuraminidase__InfluenzaA__AHL98869

SEQ ID NO: 56986 - RNA, 1410 nt, Artificial Sequence; identical to SEQ ID NO: 55922
  derived and/or modified CDS sequence (wt) from neuraminidase__InfluenzaA__AHL98881

SEQ ID NO: 56987 - RNA, 1410 nt, Artificial Sequence
  derived and/or modified CDS sequence (wt) from neuraminidase__InfluenzaA__AHL98893
augaauccaaaucaaaagauaauaacgauuggcucuguuucucucaccauuuccacaauaugcuucuucaugcaaauugccaucuugauaacuacuguaacauugcauuucaagcaauaugaauucgacucccccccaaacaaccaagugaugcugugugaaccaacaauaauagaaagaaacauaacagagauaguguaucugaccaacaccaccauagagaaggaaauaugccccaaaccagcagaauacagaaauuggucaaaaccgcaauguggcauuacaggauuugcaccuuucucuaaggacaauucgauuaggcuuuccgcugguggggacaucugggugacaagagaaccuuaugugucaugcgauccugacaaguguuaucaauuugcccuuggacagggaacaacacuaaacaacgugcauucaaauaacacaguacgugauaggaccccuuaucggacucuauugaugaaugaguuggguguuccuuuucaucuggggaccaagcaagugugcauagcaugguccagcucaaguugucacgauggaaaagcauggcugcauguuuguauaacgggggaugauaaaaaugcaacugcuagcuucauuuacaaugggaggcuuguagauaguguuguuucaugguccaaagaaauucucaggacccaggagucagaaugcguuuguaucaauggaacuuguacaguaguaaugacugauggaagugcuucaggaaaagcugauacuaaaauacuauucauugaggaggggaaaaucguucauacuagcacauugucaggaagugcucagcauguugaagagugcucuugcuauccucgauauccuggugucagaugugucugcagagacaacuggaaaggcuccaaucggcccaucguagauauaaacauaaaggaucauagcauuguuuccaguuauguguguucaggacuuguuggagacacacccagaaaaaacgacagcuccagcaguagccauuguuuggauccuaacaaugaagaagguggucauggagugaaaggcugggccuuugaugauggaaaugacguguggaugggaagaacaaucaacgagacgucacgcuuaggguaugaaaccuucaaagucuuugaaggcugguccaacccuaaguccaaauugcagauaaauaggcaagucauaguugacagaggugauagguccgguuauucugguauuuucucuguugaaggcaaaagcugcaucaaucggugcuuuuauguggaguugauuaggggaagaaaagaggaaacugaagucuuguggaccucaaacaguauuguuguguuuuguggcaccucagguacauauggaacaggcucauggccugauggggcggaccucaaccucaugccuauauaa

SEQ ID NO: 56988 - RNA, 1410 nt, Artificial Sequence; identical to SEQ ID NO: 55883
  derived and/or modified CDS sequence (wt) from neuraminidase__InfluenzaA__AHL98905

SEQ ID NO: 56989 - RNA, 1410 nt, Artificial Sequence; identical to SEQ ID NO: 55880
  derived and/or modified CDS sequence (wt) from neuraminidase__InfluenzaA__AHL98916

SEQ ID NO: 56990 - RNA, 1410 nt, Artificial Sequence; identical to SEQ ID NO: 56699
  derived and/or modified CDS sequence (wt) from neuraminidase__InfluenzaA__AHL98928

SEQ ID NO: 56991 - RNA, 1410 nt, Artificial Sequence; identical to SEQ ID NO: 56700
  derived and/or modified CDS sequence (wt) from neuraminidase__InfluenzaA__AHL98940

SEQ ID NO: 56992 - RNA, 1410 nt, Artificial Sequence
  derived and/or modified CDS sequence (wt) from neuraminidase__InfluenzaA__AHL98952
augaauccaaaucaaaagauaauaacgauuggcucuguuucucucaccauuuccacaauaugcuucuucaugcaaauugccaucuugauaacuacuguaacauugcauuucaagcaauaugaauucaacucccccccaaacaaccaagugaugcugugugaaccaacaauaauagaaagaaacauaacagagauaguguaucugaccaacaccaccauagagaaggaaauaugccccaaaccagcagaauacagaaauuggucaaaaccgcaauguggcauuacaggauuugcaccuuucucuaaggacaauucgauuaggcuuuccgcugguggggacaucugggugacaagagaaccuuaugugucaugcgauccugacaaguguuaucaauuugcccuuggacagggaacaacacuaaacaacgugcauucaaauaacacaguacgugauaggaccccuuaucggacucuauugaugaaugaguuggguguuccuuuucaucuggggaccaagcaagugugcauagcaugguccagcucaaguugucacgauggaaaagcauggcugcauguuugcauaacgggggaugauaaaaaugcaacugcuagcuucauuuacaaugggaggcuuguagauaguguuguuucaugguccaaagaaauucucaggacccaggagucagaaugcguuuguaucaauggaacuuguacaguaguaaugacugauggaagugcuucaggaaaagcugauacuaaaauacuauucauugaggagggaaaaaucguucauacuagcacauugucaggaagugcucagcaugucgaagagugcucuugcuauccucgauauccuggugucagaugugucugcagagacaauuggaaaggcuccaaucggcccaucguagauauaaacauaaaggaucauagcauuguuuccaguuauguguguucaggacuuguuggagacacacccagaaaaaacgacagcuccagcaguagccauuguuuggauccuaacaaugaagaagguggucauggagugaaaggcugggccuuugaugauggaaaugacguguggaugggaagaacaaucaacgagacgucacgcuuaggguaugaaaccuucaaagucauugaaggcugguccaacccuaaguccaaauugcagauaaauaggcaagucauaguugacagaggugauagguccgguuauucugguauuuucucuguugaaggcaaaagcugcaucaaucggugcuuuuauguggaguugauuaggggaaggaaagaggaaacugaagucuuguggaccucaaacaguauuguuguguuuuguggcaccucagguacauauggaacaggcucauggccugauggggcggaccucaaucucaugccuauauaa

SEQ ID NO: 56993 - RNA, 1410 nt, Artificial Sequence
  derived and/or modified CDS sequence (wt) from neuraminidase__InfluenzaA__AHL98964
augaauccaaaucaaaagauaauaacgauuggcucuguuucucucaccauuuccacaauaugcuucuucaugcaaauugccaucuugauaacuacuguaacauugcauuucaagcaauaugaauucgacucccccccaaacaaccaagugaugcugugugaaccaacaauaauagaaagaaacauaacagagauaguguaucugaccaacaccaccauagagaaggaaauaugccccaaaccagcagaauacagaaauuggucaaaaccgcaauguggcauuacaggauuugcaccuuucucuaaggacaauucgauuaggcuuuccgcugguggggacaucugggugacaagagaaccuuaugugucaugcgauccugacaaguguuaucaauuugcccuuggacagggaacaacacuaaacaacgugcauucaaauaacacaguacgugauaggaccccuuaucggacucuauugaugaaugaguuggguguuccuuuucaucuggggaccaagcaagugugcauagcaugguccagcucaaguugucacgauggaaaagcauggcugcauguuuguauaacgggggaugauaaaaaugcaacugcuagcuucauuuacaaugggaggcuuguagauaguguuguuucaugguccaaagaaauucucaggacccaggagucagaaugcguuuguaucaauggaacuuguacaguaguaaugacugauggaagugcuucaggaaaagcugauacuaaaauacuauucauugaggaggggaaaaucguucauacuagcacauugucaggaagugcucagcauguugaagagugcucuugcuauccucgauauccuggugucagaugugucugcagagacaacuggaaaggcuccaaucggcccaucguagauauaaacauaaaggaucauagcauuguuuccaguuauguguguucaggacuuguuggagacacacccagaaaaaacgacagcuccagcaguagccauuguuuggaucccaacaaugaagaagguggucauggagugaaaggcugggccuuugaugauggaaaugacguguggaugggaagaacaaucaacgagacgucacgcuuaggguaugaaaccuucaaagucauugaaggcugguccaauccuaaguccaaauugcagauaaauaggcaagucauaguugacagaggugauagguccgguuauucugguauuuucucuguugaaggcaaaagcugcaucaaucggugcuuuuauguggaguugauuaggggaagaaaagaggaaacugaagucuuguggaccucaaacaguauuguuguguuuuguggcaccucagguacauauggaacaggcucauggccugauggggcggaccucaaccucaugccuauauaa

SEQ ID NO: 56994 - RNA, 1410 nt, Artificial Sequence
  derived and/or modified CDS sequence (wt) from neuraminidase__InfluenzaA__AHL98976
augaauccaaaucaaaagauaauaacgauuggcucuguuucucucaccauuuccacaauaugcuucuucaugcaaauugccaucuugauaacuacuguaacauugcauuucaagcaauaugaauucaacucccccccaaacaaccaagugaugcugugugaaccaacaauaguagaaagaaacauaacagagauaguguaucugaccaacaccaccauagagaaggaaauaugccccaaaccagcagaauacagaaauuggucaaaaccgcaauguggcauuacaggauuugcaccuuucucuaaggacaauucgauuaggcuuucugcugguggggacaucugggugacaagagaaccuuaugugucaugugauccugacaaguguuaucaauuugcccuuggacagggaacaacacuaaacaacgugcauucaaauaacacaguacgugauaggaccccuuaucggacucuauugaugaaugaguuggguguuccuuuucaucuggggaccaagcaagugugcauagcaugguccagcucaaguugucacgauggaaaagcauggcugcauguuuguauaacgggggaugauaaaaaugcaacugcuagcuucauuuacaaugggagacuuguagauaguguugcuucaugguccaaagaaguucucaggacccaggagucagaaugcguuuguaucaauggaacuugugcaguaguaaugacugauggaagugcuucaggaaaagcugauacuaaaauacuauucauugaggaggggaaaaucguucauacuagcacauugucaggaagugcucagcaugucgaagagugcucuugcuauccucgauauccuggugucagaugugucugcagagacaacuggaaaggcuccaaucggcccaucguagacauaaacauaaaggaucauagcauuguuuccaguuauguguguucaggacuuguuggagacacacccagaaaaaacgacagcuccagcaguagccauuguuuggauccuaacaaugaagaagguggucauggagugaaaggcugggccuuugaugauggaaaugacguguggaugggaagaacaaucaacgagacaucacgcuuaggguaugaaaccuucaaaguuauugaaggcugguccaacccuaaguccaaauugcagauaaauaggcaagucauaguugacagaggugauagguccgguuauucugguauuuucucuguugaaggcaaaagcugcaucaaucggugcuuuuauguggaguugauuaggggaagaaaagaggaaacugaagucuuguggaccucaaacaguauuguuguguuuuguggcaccucagguacauauggaacaggcucauggccugauggggcggaccucaaucucaugccuauauaa

SEQ ID NO: 56995 - RNA, 1410 nt, Artificial Sequence; identical to SEQ ID NO: 55883
  derived and/or modified CDS sequence (wt) from neuraminidase__InfluenzaA__AHL98988

SEQ ID NO: 56996 - RNA, 1410 nt, Artificial Sequence; identical to SEQ ID NO: 55869
  derived and/or modified CDS sequence (wt) from neuraminidase__InfluenzaA__AHL99000

SEQ ID NO: 56997 - RNA, 1410 nt, Artificial Sequence
  derived and/or modified CDS sequence (wt) from neuraminidase__InfluenzaA__AHL99012
augaauccaaaucaaaagauaauaacgauuggcucuguuucucucaccauuuccacaauaugcuucuucaugcaaauugccaucuugauaacuacuguaacauugcauuucaagcaauaugaauucaacucccccccaaacaaccaagugaugcugugugaaccaacaauaauagaaagaaacauaacagagauaguguauuugaccaacaccaccauagagaaggaaauaugccccaaaccagcagaauacagaaauuggucaaaaccgcaauguggcauuacaggauuugcaccuuucucuaaggacaauucgauuaggcuuuccgcugguggggacaucugggugacaagagaaccuuaugugucaugcgauccugacaaguguuaucaauuugcccuugggcagggaacaacacuaaacaacgugcauucaaauaacacaguacgugauaggaccccuuaucggacucuauugaugaaugaguuggguguuccuuuucaucuggggaccaagcaagugugcauagcaugguccagcucaaguugucacgauggaaaagcauggcugcauguuuguauaacgggggaugauaaaaaugcaacugcuagcuucauuuacaaugggaggcuuguagauaguguuguuucaugguccaaagaaauucucaggacccaggagucagaaugcguuuguaucaauggaacuuguacaguaguaaugacugauggaagugcuucaggaaaagcugauacuaaaauacuauucauugaggaggggaaaaucguucauacuagcacauugucaggaagugcucagcaugucgaagagugcucuugcuauccucgauauccuggugucagaugugucugcagagacaacuggaaaggcuccaaucggcccaucguagauauaaacauaaaggaucauagcauuguuuccaguuauguguguucaggacuuguuggagacacacccagaaaaaacgacagcuccagcaguagccauuguuuggauccuaacaaugaagaagguggucauggagugaaaggcugggccuuugaugauggaaaugacguauggaugggaagaacaaucaacgagacgucacgcuuaggguaugaaaccuucaaagucauugaaggcugguccaacccuaaguccaaauugcagauaaauaggcaagucauaguugacagaggugauagguccgguuauucugguauuuucucuguugaaggcaaaagcugcaucaaucggugcuuuuauguggaguugauuaggggaagaaaagaggaaacugaagucuuguggaccucaaacaguauuguuguguuuuguggcaccucagguacauauggaacaggcucauggccugauggggcggaccucaaucucaugccuauauaa

SEQ ID NO: 56998 - RNA, 1410 nt, Artificial Sequence
  derived and/or modified CDS sequence (wt) from neuraminidase__InfluenzaA__AHL99024
augaauccaaaucaaaagauaauaacgauuggcucuguuucucucaccauuuccacaauaugcuucuucaugcaaauugccaucuugauaacuacuguaacauugcauuucaagcaauaugaauucaacucccccccgaacaaccaagugaugcugugugaaccaacaauaauagaaagaaacauaacagagauaguguaucugaccaacaccaccauagagaaggaaauaugccccaaaccagcagaauacagaaauuggucaaaaccgcaauguggcauuacaggauuugcaccuuucucuaaggacaauucgauuaggcuuuccgcugguggggacaucugggugacaagagaaccuuaugugucaugcgaucccgacaaguguuaucaauuugcccuuggacagggaacaacacuaaacaacgugcauucaaauaacacaguacgugauaggaccccuuaucggacucuauugaugaaugaguuggguguuccuuuucaucuggggaccaagcaagugugcauagcaugguccagcucaaguugucacgauggaaaagcauggcugcauguuuguauaacgggggaugauaaaaaugcaacugcuagcuucauuuacaaugggaggcuuguagauaguguuguuucaugguccaaagaaauucucaggacccaggagucagaaugcguuuguaucaauggaacuuguacaguaguaaugacugauggaagugcuucaggaaaagcugauacuaaaauacuauucauugaggaggggaaaaucguucauacuagcacauugucaggaagugcucagcaugucgaagagugcucuugcuauccucgauacccuggugucagauguaucugcagagacaacuggaaaggcuccaaucggcccaucguagauauaaacauaaaggaucauagcauuguuuccaguuauguguguucaggacuuguuggagacacacccagaaaaaacgacagcuccagcaguagccauuguuuggauccuaacaaugaagaagguggucauggagugaaaggcugggccuuugaugauggaaaugacguguggaugggaagaacaaucaacgagacgucacgcuuaggguaugaaaccuucaaagucauugaaggcugguccaacccuaaguccaaauugcagauaaauaggcaagucauaguugacagaggugauagguccgguuauucugguauuuucucuguugaaggcaaaagcugcaucaaucggugcuuuuauguggaguugauuaggggaagaaaagaggaaacugaagucuuguggaccucaaacaguauuguuguguuuuguggcaccucagguacauauggaacaggcucauggccugauggggcggaccucaaucucaugccuauauaa

SEQ ID NO: 56999 - RNA, 1410 nt, Artificial Sequence
  derived and/or modified CDS sequence (wt) from neuraminidase__InfluenzaA__AHL99036
augaauccaaaucaaaagauaauaacgauuggcucuguuucucucaccauuuccacaauaugcuucuucaugcaaauugccaucuugauaacuacuguaacauugcauuucaagcaauaugaauucaacucccccccaaacaaccaagugaugcugugugaaccaacaauaauagaaagaaacauaacagagauaguguaucugaccaacaccaccauagagaaggaaauaugccccaaaccagcagaauacagaaauuggucaaaaccgcaauguggcauuacaggauuugcaccuuucucuaaggacaauucgauuaggcuuuccgcugguggggacaucugggugacaagagaaccuuaugugucaugcgauccugacaaguguuaucaauuugcccuuggacagggaacaacacuaaacaacgugcauucaaauaacacaguacgugauaggaccccuuaucggacucuauugaugaaugaguuggguguuccuuuucaucuggggaccaagcaagugugcauagcaugguccagcucaaguugucacgauggaaaagcauggcugcauguuuguauaacgggggaggauaaaaaugcaacugcuagcuucauuuacaaugggaggcuuguagauaguguuguuucaugguccaaagaaauucucaggacccaggagucagaaugcguuuguaucaauggaacuuguacaguaguaaugacugauggaagugcuucaggaaaagcugauacuaaaauacuauucauugaggaggggaaaaucguucauacuagcacauugucaggaagugcucagcaugucgaagagugcucuugcuauccucgauauccuggugucagaugugucugcagagacaacuggaaaggcuccaaucggcccaucguagauauaaacauaaaggaucauagcauuguuuccaguuauguguguucaggacuuguuggagacacacccagaaaaaacgacagcuccagcaguagccauuguuuggauccuaacaaugaagaagguggucauggagugaaaggcugggccuuugaugauggaaaugacguguggaugggaagaacaaucaacgaaacgucacgcuuaggguaugaaaccuucaaagucauugaaggcuggucuaacccuaaguccaaauugcagauaaauaggcaagucauaguugacagaggugauagguccgguuauucugguauuuucucuguugaaggcaaaagcugcaucaaucggugcuuuuauguggaguugauuaggggaagaaaagaggaaacugaagucuuguggaccucaaacaguauuguuguguuuuguggcaccucagguacauauggaacaggcucauggccugauggggcggaccucaaucucaugccuauauaa

SEQ ID NO: 57000 - RNA, 1410 nt, Artificial Sequence
  derived and/or modified CDS sequence (wt) from neuraminidase__InfluenzaA__AHL99048
augaauccaaaucaaaagauaauaacgauuggcucuguuucucucaccauuuccacaauaugcuucuucaugcaaauugccaucuugauaacuacuguaacauugcauuucaagcaauaugaauucaacucccccccaaacaaccaagugaugcugugugaaccaacaauaauagaaagaaacauaacagagauaguguaucugaccaacaccaccauagagaaggaaauaugccccaaaccagcagaauacagaaauuggucaaaaccgcaauguggcauuacaggauuugcaccuuucucuaaggacaauucgauuaggcuuuccgcugguggggacaucugggugacaagagaaccuuaugugucaugcgauccugacaaguguuaucaauuugcccuuggacagggaacaacacuaaacaacgugcauucaaauaacacaguacgugauaggaccccuuaucggacucuauugaugaaugaguuggguguuccuuuucaucuggggaccaagcaagugugcauagcaugguccagcucaaguugucacgauggaaaagcauggcugcauguuuguauaacgggggaugauaaaaaugcaacugcuagcuucauuuacaaugggaggcuuguagauaguguuguuucaugguccaaagaaauucucaggacccaggagucagaaugcguuuguaucaauggaacuuguacaguaguaaugacugauggaagugcuucaggaaaagcugauacuaaaauacuauucauugaggaggggaaaaucguucauacuagcacauugucaggaagugcucagcauguugaagagugcucuugcuauccucgauauccuggugucaggugugucugcagagacaacuggaaaggcuccaaucggcccaucguagauauaaacauaaaggaucauagcauuguuuccaguuauguguguucaggacuuguuggagacacacccagaaaaaacgacagcuccagcaguagccauuguuuggguccuaacaaugaagaagguggucauggagugaaaggcugggccuuugaugauggaaaugacguguggaugggaagaacaaucaacgagacgucacgcuuaggguaugaaaccuucaaagucauugaaggcugguccaauccuaaguccaaauugcagauaaauaggcaagucauaguugacagaggugauagguccgguuauucugguauuuucucuguugaaggcaaaagcugcaucaaucggugcuuuuauguagaguugauuaggggaagaaaagaggaaacugaagucuuguggaccucaaacaguauuguuguguuuuguggcaccucagguacauauggaacaggcucauggccugauggggcggaccucaaucucaugccuauauaa

SEQ ID NO: 57001 - RNA, 1410 nt, Artificial Sequence
  derived and/or modified CDS sequence (wt) from neuraminidase__InfluenzaA__AHL99060
augaauccaaaucaaaagauaauaacgauuggcucuguuucucucaccauuuccacaauaugcuucuucaugcaaauugccaucuugauaacuacuguaacauugcauuucaagcaauaugaauucaacucccccccaaacaaccaagugaugcugugugaaccaacaauaauagaaagaaacauaacagagauaguguaucugaccaacaccaccauagagaaggaaauaugccccaaaccagcagaauacagaaauuggucaaaaccgcaauguggcauuacaggauuugcaccuuucucuaaggacaauucgauuaggcuuuccgcugguggggacaucugggugacaagagaaccuuaugugucaugcgauccugacaaguguuaucaauuugcccuuggacagggaacaacacuaaacaacgugcauucaaauaacacaguacgugauaggaccccuuaucggacucuauugaugaaugaguuggguguuccuuuucaucugggaaccaagcaagugugcauagcaugguccagcucaaguugucacgauggaaaagcauggcugcauguuuguauaacgggggaugauaaaaaugcaacugcuagcuucauuuacaaugggaggcuuguagauaguguuguuucaugguccaaagaaauucucaggacccaggagucagaaugcguuuguaucaauggaacuuguacaguaguaaugacugauggaagugcuucaggaaaagcugauacuaaaauacuauucauugaggaggggaaaaucguucauacuagcacauugucaggaagugcucagcaugucgaagagugcucuugcuauccucgauauccuggugucagaugugucugcagagacaacuggaaaggcuccaaucggcccaucguagauauaaacauaaaggaucauagcauuguuuccaguuauguguguucaggacuuguuggagacacacccagaaaaaacgacagcuccagcaguagccauuguuuggauccuaacaaugaagaagguggucauggagugaaaggcugggccuuugaugauggaaaugacguguggaugggaagaacaaucaacgagacgucacgcuuaggguaugaaaccuucaaagucauugaaggcugguccaacccuaaguccaaauugcagauaaauaggcaagucauaguugacagaggugauagguccgguuauucugguauuuucucuguugaaggcaaaagcugcaucaaucggugcuuuuauguggaguugauuaggggaagaaaagaggaaacugaagucuuguggaccucaaacaguauuguuguguuuuguggcaccucagguacauauggaacaggcucauggccugauggggcggaccucaaucucaugccuauauaa

SEQ ID NO: 57002 - RNA, 1410 nt, Artificial Sequence
  derived and/or modified CDS sequence (wt) from neuraminidase__InfluenzaA__AHL99072
augaauccaaaucaaaagauaauaacgauuggcucuguuucucucaccauuuccacaauaugcuucuucaugcaaauugccaucuugauaacuacuguaacauugcauuucaagcaauaugaauucaacucccccccaaacaaccaagugaugcugugugaaccaacaauaauagaaagaaacauaacagagauaguguaucugaccaacaccaccauagagaaggaaauaugccccaaaccagcagaauauagaaauuggucaaaaccgcaauguggcauuacaggauuugcaccuuucucuaaggacaauucgauuaggcuauccgcugguggggacaucugggugacaagagaaccuuaugugucaugcgauccugacaaguguuaucaauuugcccuuggacagggaacaacacuaaacaacgugcauucaaauaacacaguacgugauaggaccccuuaucggacucuauugaugaaugaguuggguguuccuuuucaucuggggaccaagcaagugugcauagcaugguccagcucaaguugucacgauggaaaagcauggcugcauguuuguauaacgggggaugauaaaaaugcaacugcuagcuucauuuacaaugggaggcuuguagauaguguuguuucaugguccaaagaaauucucaggacccaggagucagaaugcguuuguaucaauggaacuuguacaguaguaaugacugauggaagugcuucaggaaaagcugauacuaaaauacuauucauugaggaggggaaaaucguucauacuagcacauugucaggaagugcucagcaugucgaagagugcucuugcuauccucgauauccuggugucagaugugucugcagagacaacuggaaaggcuccaaucggccuauuguagauauaaacaugaaggaucauagcauuguuuccaguuauguguguucaggacuuguuggagacacacccagaaaaaacgacagcuccagcaguagccauuguuuggauccuaacaaugaagaagguggucauggagugaaaggcugggccuuugaugauggaaaugacguguggaugggaagaacaaucaacgagacgucacgcuuaggguaugaaaccuucaaagucauugaaggcugguccaacccuaaguccaaauugcagauaaauaggcaggucauaguugacagaggugauagguccgguuauucugguauuuucucuguugaaggcaaaagcugcaucaaucggugcuuuuauguggaguugauuaggggaagaaaagaggaaacugaagucuuguggaccucaaacaguauuguuguguuuuguggcaccucagguacauauggaacaggcucauggccugauggggcggaccucaaucucaugccuauauaa

SEQ ID NO: 57003 - RNA, 1410 nt, Artificial Sequence
  derived and/or modified CDS sequence (wt) from neuraminidase__InfluenzaA__AHL99084
augaauccaaaucaaaagauaauaacgauuggcucuguuucucucaccauuuccacaauaugcuucuucaugcaaauugccaucuugauaacuacuguaacauugcauuucaagcaauaugaauucaacucccccccaaacaaccaagugaugcugugugaaccaacaauaauagaaagaaacauaacagagauaguguauuugaccaacaccaccauagagaaggaaauaugccccaaaccagcagaauacagaaauuggucaaaaccgcaauguggcauuacaggauuugcaccuuucucuaaggacaauucgauuaggcuuuccgcugguggggacaucugggugacaagagaaccuuaugugucaugcgauccugacagguguuaucaauuugcccuuggacagggaacaacacuaaacaacaugcauucaaauaacacaguacgugauaggaccccuuaucggacucuauugaugaaugaguuggguguuccuuuucaucuggggaccaagcaagugugcauagcaugguccagcucaaguugucacgauggaaaagcauggcugcauguuuguauaacgggggaugauaaaaaugcaacugcuagcuucauuuacaaugggaggcuuguagauaguguuguuucaugguccaaagaaauucucaggacccaggagucagaaugcguuuguaucaauggaacuuguacaguaguaaugacugauggaagugcuucaggaaaagcugauacuaaaauauuauucauugaggaggggaaaaucguucauacuagcacauugucaggaagugcucagcaugucgaagagugcucuugcuauccucgauauccuggugucagaugugucugcagagacaacuggaaaggcuccaaucggcccaucguagauauaaacauaaaggaucauaacauugucuccaguuauguguguucaggacuuguuggagacacacccagaaaaaacgacagcuccagcaguagccauuguuuggauccuaacaaugaagaagguggucauggagugaaaggcugggccuuugaugauggaaaugacguguggaugggaagaacaaucaacgagacgucacgcuuaggguaugaaaccuucaaagucauugaaggcugguccaacccuaaguccaaauugcagauaaauaggcaagucauaguugacagaggugauagguccgguuauucugguauuuucucuguugaaggcaaaagcugcaucaaucggugcuuuuauguggaguugauuaggggaagaaaagaggaaacugaagucuuguggaccucaaacaguauuguuguguuuuguggcaccucagguacauauggaacaggcucauggccugauggggcggaccucaaucucaugccuauauaa

SEQ ID NO: 57004 - RNA, 1410 nt, Artificial Sequence; identical to SEQ ID NO: 55922
  derived and/or modified CDS sequence (wt) from neuraminidase__InfluenzaA__AHL99096

SEQ ID NO: 57005 - RNA, 1410 nt, Artificial Sequence; identical to SEQ ID NO: 55957
  derived and/or modified CDS sequence (wt) from neuraminidase__InfluenzaA__AHL99108

SEQ ID NO: 57006 - RNA, 1410 nt, Artificial Sequence
  derived and/or modified CDS sequence (wt) from neuraminidase__InfluenzaA__AHL99120
augaauccaaaucaaaagauaauaacgauuggcucuguuucucucaccauuuccacaauaugcuucuucaugcaaauugccaucuugauaacuacuguaacauugcauuucaagcaauaugaauucaacucccccccaaacaaccaagugaugcugugugaaccaacaauaauagaaagaaacauaacagagauaguguauuugaccaacaccaccauagagaaggaaauaugccccaaaccagcagaauacagaaauuggucaaaaccgcaauguggcauuacaggauuugcaccuuucucuaaggacaauucgauuaggcuuuccgcugguggggacaucugggugacaagagaaccuuaugugucaugcgauccugacaaguguuaucaauuugcccuuggacagggaacaacacuaaacaacgugcauucaaauaacacaguacgugauaggaccccuuaucggacucuauugaugaaugaguuggguguuccuuuucaucuggggaccaagcaagugugcauagcaugguccagcucaaguugucacgauggaaaagcauggcugcauguuuguauaacgggggaugauaaaaaugcaacugcuagcuucauuuacaaugggaggcuuguagauaguguuguuucaugguccaaagaaauucucaggacccaggagucagaaugcguuuguaucaauggaacuuguacaguaguaaugacugauggaagugcuucaggaaaagcugauacuaaaauacuauucauugaggaggggaaaaucguucauacuagcacauugucaggaagugcucagcaugucgaagagugcucuugcuauccucgauauccuggugucagaugugucugcagagacaacuggaaaggcuccaaucggcccaucguagauauaaacauaaaggaucauagcauuguuuccaguuauguguguucaggacuuguuggagacacacccagaaaaaacgacagcuccagcaguagccauuguuuggauccuaacaaugaagaagguggucauggagugaaaggcugggccuuugaugauggaaaugacguauggaugggaagaacaaucaacgagacgucacgcuuaggguaugaaaccuucaaagucauugaaggcugguccaacccuaaguccaaauugcagauaaauaggcaagucauaguugacagaggugauagguccgguuauucugguauuuuuucuguugaaggcaaaagcugcaucaaucggugcuuuuauguggaguugauuaggggaagaaaagaggaaacugaagucuuguggaccucaaacaguauuguuguguuuuguggcaccucagguacguauggaacaggcucauggccugauggggcggaccucaaucucaugccuauauaa

SEQ ID NO: 57007 - RNA, 1410 nt, Artificial Sequence; identical to SEQ ID NO: 55957
  derived and/or modified CDS sequence (wt) from neuraminidase__InfluenzaA__AHL99132

SEQ ID NO: 57008 - RNA, 1410 nt, Artificial Sequence
  derived and/or modified CDS sequence (wt) from neuraminidase__InfluenzaA__AHL99144
augaauccaaaucaaaagauaauaacgauuggcucuguuucucucaccauuuccacaauaugcuucuucaugcaaauugccaucuugauaacuacuguaacauugcauuucaagcaauaugaauucaacucccccccaaacaaccaagugaugcugugugaaccaacaauaauagaaagaaacauaacagagauaguguaucugaccaacaccaccauagagaaggaaauaugccccaaaccagcagaauacagaaauuggucaaaaccgcaauguggcauuacaggauuugcaccuuucucuaaggacaauucgauuaggcuuuccgcugguggggacaucugggugacaagagaaccuuaugugucaugcgauccugacaaguguuaucaauuugcccuuggacagggaacaacacuaaacaacgugcauucaaauaacacaguacgugauagaaccccuuaucggacucuauugaugaaugaguuggguguuccuuuucaucuggggaccaagcaagugugcauagcaugguccagcucaaguugucacgauggaaaagcauggcugcauguuuguauaacgggggaugauaaaaaugcaacugcuagcuucauuuacaaugggaggcuuguagauaguguuguuucaugguccaaagaaauucucaggacccaggagucagaaugcguuuguaucaauggaacuuguacaguaguaaugacugauggaagugcuucaggaaaagcugauacuaaaauacuauucauugaggaggggagaaucguucauacuagcacauugucaggaagugcucagcaugucgaagagugcucuugcuauccucgauauccuggugucagaugugucugcagagacaacuggaaaggcuccaaucggcccaucguagauauaaacauaaaggaucauagcauuguuuccaguuauguguguucagggcuuguuggagacacacccagaaaaaacgacagcuccagcaguagccauuguuuggauccuaacaaugaagaagguggucauggagugaaaggcugggccuuugaugauggaaaugacguguggaugggaagaacaaucaacgagacgucacgcuuaggguaugaaaccuucaaagucauugaaggcugguccaauccuaaguccaaauugcagauaaauaggcaagucauaguugacagaggugauagguccgguuauucugguauuuucucuguugaaggcaaaagcugcaucaaucggugcuuuuauguagaguugauuaggggaagaaaagaggaaacugaagucuuguggaccucaaacaguauuguuguguuuuguggcaccucagguacauauggaacaggcucauggccugauggggcggaccucaaucucaugccuauauaa

SEQ ID NO: 57009 - RNA, 1410 nt, Artificial Sequence; identical to SEQ ID NO: 55880
  derived and/or modified CDS sequence (wt) from neuraminidase__InfluenzaA__AHL99156

SEQ ID NO: 57010 - RNA, 1410 nt, Artificial Sequence
  derived and/or modified CDS sequence (wt) from neuraminidase__InfluenzaA__AHL99168
augaauccaaaucaaaagauaauaacgauuggcucuguuucucucaccauuuccacaauaugcuucuucaugcaaauugccaucuugauaacuacuguaacauugcauuucaagcaauaugaauucaacucccccccaaacaaccaagugaugcugugugaaccaacaauaauagaaagaaacacaacagagauaguguaucuaaccaacaccaccauagagaaggaaauaugccccaaaccagcagaauacagaaauuggucaaaaccgcaauguggcauuacaggauuugcaccuuucucuaaggacaauucgauuaggcuauccgcugguggggacaucugggugacaagagaaccuuaugugucaugcgauccugacaaguguuaucaauuugcccuuggacagggaacaacacuaaacaacgugcauucaaauaacacaguacgugauaggaccccuuaucggacucuauugaugaaugaguuggguguuccuuuucaucuggggaccaagcaagugugcauagcaugguccagcucaaguugucacgauggaaaagcauggcugcauguuuguauaacgggggaugauaaaaaugcaacugcuagcuuuauuuacaaugggaggcuuguagauaguguuguuucaugguccaaagaaauucucaggacccaggagucagaaugcguuuguaucaauggaacuuguacaguaguaaugacugauggaagugcuucagggaaagcugauacuaaaauacuauucauugaggaggggaaaaucguucauacuagcacauugucaggaagugcucagcaugucgaagagugcucuugcuauccucgauauccuggugucagaugugucugcagagacaacuggaaaggcuccaaucggcccaucguagauauaaacauaaaggaucauagcauuguuuccaguuauguguguucaggacuuguuggagacacacccagaaaaaacgacagcuccagcaguagccauuguuuggauccuaacaaugaagaagguggucauggagugaaaggcugggccuuugaugauggaaaugacguguggaugggaagaacaaucaacgagacgucacgcuuaggguaugaaaccuucaaagucauugaaggcugguccaacccuaaguccaaauugcagauaaauaggcaggucauaguugacagaggugauagguccgguuauucugguauuuucucuguugaaggcaaaagcugcaucaaucggugcuuuuauguggaguugauuaggggaagaaaagaggaaacugaagucuuguggaccucaaacaguauuguuguguuuuguggcaccucagguacauauggaacaggcucauggccugauggggcggaccucaaucucaugccuauauaa

SEQ ID NO: 57011 - RNA, 1410 nt, Artificial Sequence
  derived and/or modified CDS sequence (wt) from neuraminidase__InfluenzaA__AHL99180
augaauccaaaucaaaagauaauaacgauuggcucuguuucucucaccauuuccacaauaugcuucuucaugcaaauugccaucuugauaacuacuguaacauugcauuucaagcaauaugaauucaacucccccccaaacaaccaagugaugcugugugaaccaacaauaauagaaagaaacauaacagagauaguguaucugaccaacaccaccauagagaaggaaauaugccccaaaccagcagaauacagaaauuggucaaaaccgcaauguggcauuacaggauuugcaccuuucucuaaggacaauucgauuaggcuuuccgcugguggggacaucugggugacaagagaaccuuaugugucaugcgauccugacaaguguuaucaauuugcccuuggacagggaacaacacuaaacaacgugcauucaaauaacacaguacgugauaggaccccuuaucggacucuauugaugaaugaguuggguguuccuuuucaucuggggaccaagcaagugugcauagcaugguccagcucaaguugucacgauggaaaagcauggcugcauguuuguauaacgggggaugauaaaaaugcaacugcuagcuucauuuacaaugggaggcuuguagauaguguuguuucaugguccaaagaaauucucaggacccaggagucagaaugcguuuguaucaauggaacuuguacaguaguaaugacugauggaagugcuucaggaaaagcugauacuaaaauacuauucauugaggaggggaaaaucguucauacuagcacauugucaggaagugcucagcaugucgaagagugcucuugcuauccucgauauccuggugucagaugugucugcagagacaacuggaaaggcuccaaccggcccaucguagauauaaacauaaaggaucauagcauuguuuccaguuauguguguucaggacuuguuggagacacacccagaaaaaacgacagcuccagcaguagccauuguuuggauccuaacaaugaagaagguggucauggagugaaaggcugggccuuugaugauggaaaugacguguggaugggaagaacaaucaacgagacgucacgcuuaggguaugaaaccuucaaagucauugaaggcugguccaauccuaaguccaaauugcagauaaauaggcaagucauaguugacagaggugauagguccgguuauucugguauuuucucuguugaaggcaaaagcugcaucaaucggugcuuuuauguagaguugauuaggggaagaaaagaggaaacugaagucuuguggaccucaaacaguauuguuguguuuuguggcaccucagguacauauggaacaggcucauggccugauggggcggaccucaaucucaugccuauauaa

SEQ ID NO: 57012 - RNA, 1410 nt, Artificial Sequence
  derived and/or modified CDS sequence (wt) from neuraminidase__InfluenzaA__AHL99204
augaauccaaaucaaaaaauaauaacgauuggcucuguuucucucaccauuuccacaauaugcuucuucaugcaaauugccaucuugauaacuacuguaacauugcauuucaagcaauaugaauucaacucccccccaaacaaccaagugaugcugugugaaccaacaauaauagaaagaaacauaacagagauaguguaucugaccaacaccaccauagagaaggaaauaugccccaaaccagcagaauacagaaauuggucaaaaccgcaauguggcauuacaggauuugcaccuuucucuaaggacaauucgauuaggcuuuccgcugguggggacaucugggugacaagagaaccuuaugugucaugcgauccugacaaguguuaucaauuugcccuuggacagggaacaacacuaaacaacgugcauucaaauaacacaguacgugauaggaccccuuaucggacucuauugaugaaugaguuggguguuccuuuucaucuggggaccaagcaagugugcauagcauggucaagcucaaguugucacgauggaaaagcauggcugcauguuuguauaacgggggaugauaaaaaugcaacugcuagcuucauuuacaaugggaggcuuguagauaguguuguuucaugguccaaagaaauucucaggacccaggagucagaaugcguuuguaucaauggaacuuguacaguaguaaugacugauggaagugcuucaggaaaagcugauacuaaaauacuauucauugaggaggggaaaaucguucauacuagcacauugucaggaagugcucagcaugucgaagagugcucuugcuauccucgauauccuggugucagaugugucugcagagacaauuggaaaggcuccaaucggcccaucguagauauaaacauaaaggaucauagcauuguuuccaguuauguguguucaggacuuguuggagacacacccagaaaaaccgacagcuccagcaguagccauuguuuggauccuaacaaugaagaagguggucauggagugaaaggcugggccuuugaugauggaaaugacguguggaugggaagaacaaucaacgagacgucacgcuuaggguaugaaaccuucaaagucauugaaggcugguccaacccuaaguccaaauugcagauaaauaggcaagucauaguugacagaggugauagguccgguuauucugguauuuucucuguugaaggcaaaagcugcaucaaucggugcuuuuauguggaguugauuaggggaagaaaagaggaaacugaagucuuguggaccucaaacaguauuguuguguuuuguggcaccucagguacauauggaacaggcucauggccugauggugcggaccucaaucucaugccuauauaa

SEQ ID NO: 57013 - RNA, 1410 nt, Artificial Sequence
  derived and/or modified CDS sequence (wt) from neuraminidase__InfluenzaA__AHL99216
augaauccaaaucaaaagauaauaacgauuggcucuguuucucucaccauuuccacaauaugcuucuucaugcaaauugccaucuugauaacuacuguaacauugcauuucaagcaauaugaauucaacucccccccaaacaaccaagugaugcugugugaaccaacaauaauagaaagaaacauaacagagauaguguaucugaccaacaccaccguagagaaggaaauaugccccaaaccagcagaauacagaaauuggucaaaaccgcaauguggcauuacaggauuugcaccuuucucuaaggacaauucgauuaggcuuuccgcugguggggacaucugggugacaagagaaccuuaugugucaugcgauccugacaaguguuaucaauuugcccuuggacagggaacaacacuaaacaacgugcauucaaauaacacaguacgugauaggaccccuuaucggacucuauugaugaaugaguuggguguuccuuuucaucuggggaccaagcaagugugcauagcaugguccagcucaaguugucacgauggaaaagcauggcugcauguuuguauaacgggggaugauaaaaaugcaacugcuagcuucauuuacaaugggaggcuuguagauaguguuguuucaugguccaaagaaauucucaggacccaggagucagaaugcguuuguaucaauggaacuuguacaguaguaaugacugauggaagugcuucaggaaaagcugauacuaaaauacuauucauugaggaggggaaaaucguucauacuagcacauugucaggaagugcucagcaugucgaagagugcucuugcuauccucgauauccuggugucagaugugucugcagagacaacuggaaaggcuccaaucggcccaucauagauauaaacauaaaggaucauagcauuguuuccaguuauguguguucaggacuuguuggagacacacccagaaaaaacgacagcuccagcaguagccauuguuuggauccuaacaaugaagaagguggucauggagugaaaggcugggccuuugaugauggaaaugacguguggaugggaagaacaaucaacgagacgucacgcuuaggguaugaaaccuucaaagucauugaaggcugguccaauccuaaguccaaauugcagauaaauaggcaagucauaguugacagaggugauagguccgguuauucugguauuuucucuguugaaggcaaaagcugcaucaaucggugcuuuuauguagaguugauuaggggaagaaaaaaggaaacugaagucuuguggaccucaaacaguauuguuguguuuuguggcaccucagguacauauggaacaggcucauggccugauggggcggaccucaaucucaugccuauauaa

SEQ ID NO: 57014 - RNA, 1410 nt, Artificial Sequence; identical to SEQ ID NO: 55869
  derived and/or modified CDS sequence (wt) from neuraminidase__InfluenzaA__AHL99228

SEQ ID NO: 57015 - RNA, 1410 nt, Artificial Sequence
  derived and/or modified CDS sequence (wt) from neuraminidase__InfluenzaA__AHL99240
augaauccaaaucaaaagauaauaacgauuggcucuguuucucucaccauuuccacaauaugcuucuucaugcaaauugccaucuugauaacuacuguaacauugcauuucaagcaauaugaauucaacucccccccaaacaaccaagugaugcugugugaaccaacaauaauagaaagaaacauaacagagauaguguaucugaccaacaccaccauagagaaggaaauaugccccaaaccagcagaauacagaaauuggucaaagccgcaauguggcauuacaggauuugcaccuuucucuaaggacaauucgauuaggcuuuccgcugguggggacaucugggugacaagagaaccuuaugugucaugcgauccugacaaguguuaucaauuugcccuuggacagggaacaacacuaaacaacgugcauucaaauaacacaguacgugauaggaccccuuaucggacucuauugaugaaugaguuggguguuccuuuucaucuggggaccaagcaagugugcauagcaugguccagcucaaguugucacgauggaaaagcauggcugcauguuuguauaacgggggaugauaaaaaugcaacugcuagcuucauuuacaaugggaggcuuguagauaguguuguuucaugguccaaagaaauucucaggacccaggagucagaaugcguuuguaucaauggaacuuguacaguaguaaugacugauggaagugcuucaggaaaagcugauacuaaaauacuauucauugaggaagggaaaaucguucauacuagcacauugucaggaagugcucagcaugucgaagagugcucuugcuauccucgauauccuggugucagaugugucugcagagacaacuggaaaggcuccaaucggcccaucguagauauaaacauaaaggaucacagcauuguuuccaguuauguguguucaggacuuguuggagacacacccagaaaaaacgacagcuccagcaguagccauuguuuggauccuaacaaugaagaagguggucauggagugaaaggcugggccuuugaugauggaaaugacguguggaugggaagaacaaucaacgagacgucacgcuuaggguaugaaaccuucaaagucauugaaggcugguccaacccuaaguccaaauugcagauaaauaggcaagucauaguugacagaggugauagguccgguuauucugguauuuucucuguugaaggcaaaagcugcaucaaucggugcuuuuauguggaguugauuaggggaagaaaagaggaaacugaagucuuguggaccucaaacaguauuguuguguuuuguggcaccucagguacauauggaacaggcucauggccugauggggcggaccucaaucucaugccuauauaa

SEQ ID NO: 57016 - RNA, 1410 nt, Artificial Sequence
  derived and/or modified CDS sequence (wt) from neuraminidase__InfluenzaA__AHL99252
augaauccaaaucaaaagauaauaacgauuggcucuguuucucucaccauuuccacaauaugcuucuucaugcaaauugcuaucuugauaacuacuguaacauugcauuucaagcaauaugaauucaacucccccccgaacaaccaagugaugcugugugaaccaacaauaauagaaagaaacauaacagagauaguguaucugaccaacaccaccauagagaaggaaauaugccccaaaccagcagaauacagaaauuggucaaaaccgcaauguggcauuacaggauuugcaccuuucucuaaggacaauucgauuaggcuuuccgcugguggggacaucugggugacaagagaaccuuaugugucaugcgaucccgacaaguguuaucaauuugcccuuggacagggaacaacacuaaacaacgugcauucaaauaacacaguacgugauaggaccccuuaucggacucuauugaugaaugaguuggguguuccuuuucaucuggggaccaagcaagugugcauagcaugguccagcucaaguugucacgauggaaaagcauggcugcauguuuguauaacgggggaugauaaaaaugcaacugcuagcuucauuuacaaugggaggcuuguagauaguguuguuucaugguccaaagaaauucucaggacccaggagucagaaugcguuuguaucaauggaacuuguacaguaguaaugacugauggaagugcuucaggaaaagcugauacuaaaauacuauucauugaggaggggaaaaucguucauacuagcacauugucaggaagugcucagcaugucgaagagugcucuugcuauccucgauacccugguguuagaugugucugcagagacaacuggaaaggcuccaaucggcccaucguagauauaaacauaaaggaucauagcauuguuuccaguuauguauguucaggacuuguuggagacacacccagaaaaaacgacagcuccagcaguagccauuguuuggauccuaacaaugaagaagguggucauggagugaaaggcugggccuuugaugauggaaaugacguguggaugggaagaacaaucaacgagacgucacgcuuaggguaugaaaccuucaaagucauugaaggcugguccaacccuaaguccaaauugcagauaaauaggcaagucauaguugacagaggugauaggucagguuauucugguauuuucucuguugaaggcaaaagcugcaucaaucggugcuuuuauguggaguugauuaggggaagaaaagaggaaacugaaguccuguggaccucaaacaguauuguuguguuuuguggcaccucagguacauauggaacaggcucauggccugauggggcggaccucaaucucaugccuauauaa

SEQ ID NO: 57017 - RNA, 1410 nt, Artificial Sequence
  derived and/or modified CDS sequence (wt) from neuraminidase__InfluenzaA__AHL99264
augaauccaaaucaaaagauaauaacgauuggcucuguuucucucaccauuuccacaauaugcuucuucaugcaaauugccaucuugauaacuacuguaacauugcauuucaagcaauaugaauucaacucccccccaaacaaccaagugaugcugugugaaccaacaauaauagaaagaaacauaacagagauaguguauuugaccaacaccaccauagagaaggaaauaugccccaaaccagcagaauacagaaauuggucaaaaccgcaauguggcauuacaggauuugcaccuuucucuaaggacaauucgauuaggcuuuccgcugguggggacaucugggugacaagagaaccuuaugugucaugcgauccugacaaguguuaucaauuugcccuuggacagggaacaacacuaaacaacgugcauucaaauaacacaguacgugauaggaccccuuaucggacucuauugaugaaugaguuggguguuccuuuucaucuggggaccaagcaagugugcauagcaugguccagcucaaguugucacgauggaaaagcauggcugcauguuuguauaacgggggaugauaaaaaugcaacugcuagcuucauuuacaaugggaggcuuguagauaguguuguuucaugguccaaagaaauucucaggacccaggaaucagaaugcguuuguaucaauggaacuuguacaguaguaaugacugauggaagugcuucaggaaaagcugauacuaaaauauuauucauugaggaggggaaaaucguucauacuagcacauugucaggaagugcucagcaugucgaagagugcucgugcuauccucgauauccuggugucagaugugucugcagagacaacuggaaaggcuccaaucggcccaucguagauauaaacauaaaggaucauagcauuguuuccaguuauguguguucaggacuuguuggagacacacccagaaaaaacgacagcuccagcaguagccauuguuuggauccuaacaaugaagaagguggucauggaguaaaaggcugggccuuugaugauggaaaugacguguggaugggaagaacaaucaacgagacgucacgcuuaggguaugaaaccuucaaagucauugaaggcugguccaacccuaaguccaaauugcagauaaauaggcaagucauaguugacagaggugauagguccgguuauucugguauuuucucuguugaaggcaaaagcugcaucaaucggugcuuuuauguggaguugauuaggggaagaaaagaggaaacugaagucuuguggaccucaaacaguauuguuguguuuuguggcaccucagguacauauggaacaggcucauggccugauggggcggaccucaaucucaugccuauauaa

SEQ ID NO: 57018 - RNA, 1410 nt, Artificial Sequence; identical to SEQ ID NO: 56700
  derived and/or modified CDS sequence (wt) from neuraminidase__InfluenzaA__AHL99276

SEQ ID NO: 57019 - RNA, 1410 nt, Artificial Sequence
  derived and/or modified CDS sequence (wt) from neuraminidase__InfluenzaA__AHL99288
augaauccaaaucaaaagauaauaacgauuggcucuguuucucucaccauuuccacaauaugcuucuucaugcaaauugccaucuugauaacuacuguaacauugcauuucaagcaauaugaauucaacucccccccaaacaaccaagugaugcugugugaaccaacaauaauagaaagaaacauaacagagauaguguauuugaccaacaccaccauagagaaggaaauaugccccaaaccagcagaauacagaaauuggucaaaaccgcaauguggcauuacaggauuugcaccuuucucuaaggacaauucgauuaggcuuuccgcugguggggacaucugggugacaagagaaccuuaugugucaugcgauccugacaaguguuaucaauuugcccuuggacagggaacaacacuaaacaacaugcauucaaauaacacaguacgugauaggaccccuuaucggacucuauugaugaaugaguuggguguuccuuuucaucuggggaccaagcaagugugcauagcaugguccagcucaaguugucacgauggaaaagcauggcugcauguuuguauaacgggggaugauaaaaaugcaacugcuagcuucauuuacaaugggaggcuuguagauaguguuguuucaugguccaaagaaauucucaggacccaggagucagaaugcguuuguaucaauggaacuuguacaguaguaaugacugauggaagugcuucaggaaaagcugauacuaaaauauuauucauugaggaggggaaaaucguucauacuagcacauugucaggaagugcucagcaugucgaagagugcucuugcuauccucgauauccuggugucagaugugucugcagagacaacuggaaaggcuccaaucggcccaucguagauauaaacauaaaggaucauagcauugucuccaguuauguguguucaggacuuguuggagacacacccagaaaaaacgacagcuccagcaguagccauuguuuggauccuaacaaugaagaagguggucauggagugaaaggcugggccuuugaugauggaaaugacguguggaugggaagaacaaucaacgaaacgucacgcuuaggguaugaaaccuucaaagucauugaaggcugguccaacccuaaguccaaauugcagauaaauaggcaagucauaguugacagaggugauagguccgguuauucugguauuuucucuguugaaggcaaaagcugcaucaaucggugcuuuuauguggaguugauuaggggaagaaaagaggaaacugaagucuuguggaccucaaacaguauuguuguguuuuguggcaccucagguacauauggaacaggcucauggccugauggggcggaccucaaucucaugccuauauaa

SEQ ID NO: 57020 - RNA, 1410 nt, Artificial Sequence; identical to SEQ ID NO: 56885
  derived and/or modified CDS sequence (wt) from neuraminidase__InfluenzaA__AHL99300

SEQ ID NO: 57021 - RNA, 1410 nt, Artificial Sequence
  derived and/or modified CDS sequence (wt) from neuraminidase__InfluenzaA__AHL99312
augaauccaaaucaaaagauaauaacgauuggcucuguuucucucaccauuuccacaauaugcuucuucaugcaaauugccaucuugauaacuacuguaacauugcauuucaagcaauaugaauucaacucccccccaaacaaccaagugaugcugugugaaccaacaauaauagaaagaaacauaacagagauaguguaucugaccaacaccaccauagagaaggaaauaugcccuaaaccagcagaauacagaaauuggucaaaaccgcaaugugguauuacaggauuugcaccuuucucuaaggacaauucgauuaggcuuuccgcugguggggacaucuggguaacaagagaaccuuaugugucaugcgaucccgacaaguguuaucaauuugcccuuggacagggaacaacacuaaacaacgugcauucaaauaacacaguacgugauaggaccccuuaucggacucuauugaugaaugaguuggguguuccuuuucaucuggggaccaagcaagugugcauagcaugguccagcucaaguugucacgauggaaaagcauggcugcauguuuguauaacgggggaugauaaaaaugcaacugcuagcuucauuuacaaugggaggcuuguagauaguguuguuucaugguccaaagaaauucucaggacccaggagucagaaugcguuuguaucaauggaacuuguacaguaguaaugacugauggaagugcuucaggaaaagcugauacuaaaauacuauucauugaggaggggaaaaucguucauacuagcacauugucaggaagugcucagcaugucgaagagugcucuugcuauccucgauauccuggugucagaugugucugcagagacaacuggaaaggcuccaaucggcccaucguagauauaaacauaaaggaucauagcauuguuuccaguuauguguguucaggacuuguuggagacacacccagaaaaaacgacagcuccagcaguagccauuguuuggauccuaacaaugaagaagguggucauggagugaaaggcugggccuuugaugauggaaaugacguguggaugggaagaacaaucaacgagacgucacgcuuaggguaugaaaccuucaaagucauugaaggcugguccaacccuaaguccaaauugcagauaaauaggcaagucauaguugacagaggugauagguccgguuauucugguauuuucucuguugaaggcaaaagcugcaucaaucggugcuuuuauguggaguugauuaggggaagaaaagaggaaacugaagucuuguggaccucaaacaguauuguuguguuuuguggcaccucagguacauauggaacaggcucauggccugauggggcggaccucaaucucaugccuauauaa

SEQ ID NO: 57022 - RNA, 1410 nt, Artificial Sequence
  derived and/or modified CDS sequence (wt) from neuraminidase__InfluenzaA__AHL99324
augaauccaaaucaaaagauaauaacgauuggcucuguuucucucaccauuuccacaauaugcuucuucaugcaaauugccaucuugauaacuacuguaacauugcauuucaagcaauaugaauucaacucccccccaaacaaccaagugauucugugugaaccaacaauaauagaaagaaacauaacagagauaguguaucuaaccaacaccaccauagagaaggaaauaugccccaaaccagcagaauacagaaauuggucaaaaccgcaauguggcauuacaggauuugcaccuuucucuaaggacaauucgauuaggcuauccgcugguggggacaucugggugacaagagaaccuuaugugucaugcgauccugacaaguguuaucaauuugcccuuggacagggaacaacacuaaacaacgugcauucaaauaacacaguacgugauaggaccccuuaucggacucuauugaugaaugaguuggguguuccuuuucaucuggggaccaagcaagugugcauagcaugguccagcucgaguugucacgauggaaaagcauggcugcauguuuguauaacgggggaugauaaaaaugcaacugcuagcuuuauuuacaaugggaagcuuguagauaguguuguuucaugguccaaagaaauucucaggacccaggagucagaaugcguuuguaucaauggaacuuguacaguaguaaugacugauggaagugcuucagggaaagcugauacuaaaauacuauucauugaggaggggaaaaucguucauacuagcacauugucaggaagugcucagcaugucgaagagugcucuugcuauccucgauauccuggugucagaugugucugcagagacaacuggaaaggcuccaaucggcccaucguagauauaaacauaaaggaucauagcauuguuuccaguuauguguguucaggacuuguuggagacacacccagaaaaaacgacagcuccagcaguagccauuguuuggauccuaacaaugaagaagguggucauggagugaaaggcugggccuuugaugauggaaaugacguguggaugggaagaacaaucaacgagacgucacgcuuaggguaugaaaccuucaaagucauugaaggcugguccaacccuaaguccaaauugcagauaaauaggcaggucauaguugacagaggugauagguccgguuauucugguauauucucuguugaaggcaaaagcugcaucaaucggugcuuuuauguggaguugauuaggggaagaaaagaggaaacugaagucuuguggaccucaaacaguauuguuguguuuuguggcaccucagguacauauggaacaggcucauggccugauggggcggaccucaaucucaugccuauauaa

SEQ ID NO: 57023 - RNA, 1410 nt, Artificial Sequence; identical to SEQ ID NO: 55813
  derived and/or modified CDS sequence (wt) from neuraminidase__InfluenzaA__AHL99348

SEQ ID NO: 57024 - RNA, 1410 nt, Artificial Sequence
  derived and/or modified CDS sequence (wt) from neuraminidase__InfluenzaA__AHL99359
augaauccaaaccaaaagauaauaaccauugguucggucuguaugacaauuggaauggcuaacuuaauauuacaaauuggaaacauaaucucaauauggauuagccacucaauucaacuugggaaucaaagucagauugaaacaugcaaucaaagcgucauuacuuaugaaaacaacacuuggguaaaucagacauauguuaacaucagcaacaccaacuuugcugcuggacagucagugguuuccgugaaauuagcgggcaauuccucucucugcccuguuaguggaugggcuauauacaguaaagacaacaguguaagaaucgguuccaagggggauguguuugucauaagggaaccauucauaucaugcucccccuuggaaugcagaaccuucuucuugacucaaggggccuugcuaaaugacaaacauuccaauggaaccauuaaagacaggagcccauaucgaacccuaaugagcuguccuauuggugaaguucccucuccauacaacucaagauuugagucggucgcuuggucagcaagugcuugucaugauggcaucaauuggcuaacaauuggaauuucuggcccagacaguggggcaguggcuguauuaaaguacaauggcauaauaacagacacuaucaagaguuggagaaacaauauauugagaacacaagagucugaaugugcauguguaaaugguucuugcuuuaccauaaugaccgauggaccaagugauggacaggccucauacaagaucuucagaauagaaaagggaaagauagucaaaucagucgaaaugaaugccccuaauuaucacuaugaggaaugcuccuguuauccugauucuagugaaaucacaugugugugcagggauaacuggcauggcucgaaucgaccgugggugucuuucaaccagaaucuggaauaucagauaggauacauaugcagugggauuuucggcgacaauccacgcccuaaugauaagacaggcaguugugguccaguaucgucuaauggagcaaauggaguaaaaggauuuucauucaaauacggcaaugguguuuggauagggagaacuaaaagcauuaguucaagaaaagguuuugagaugauuugggauccaaauggauggacugggacagacaauaacuucucaauaaagcaagauaucguaggaauaaaugaguggucaggauauagcgggaguuuuguucagcauccagaacuaacagggcuggauuguauaagaccuugcuucuggguugaacuaaucagagggcgacccaaagagaacacaaucuggacuagcgggagcagcauauccuuuugugguguaaacagugacacuguggguuggucuuggccagacggugcugaguugccauuuaccauugacaaguaa

SEQ ID NO: 57025 - RNA, 1410 nt, Artificial Sequence
  derived and/or modified CDS sequence (wt) from neuraminidase__InfluenzaA__AHL99370
augaauccaaaucaaaagauaauaacgauuggcucuguuucucucaccauuaccacaauaugcuucuucaugcaaauugccaucuugauaacuacuguaacauugcauuucaagcaauaugaauucaacucccccccaaacaaccaaaugaugcugugugaaccaacaauaauagaaagaaacauaacagagauaguguaucugaccaacaccaccauagagaaggaaauaugccccaaaccagcagaauacagaaauuggucaaaaccgcaauguggcauuacaggauuugcaccuuucucuaaggacaauucgauuaggcuuuccgcugguggggacaucugggugacaagagaaccuuaugugucaugcgauccugacaaguguuaucaauuugcccuuggacagggaacaacacuaaacaacgugcauucaaauaacacaguacgugauaggaccccuuaucggacucuauugaugaaugaguuggguguuccuuuucaucuggggaccaagcaagugugcauagcaugguccagcucaaguugucacgauggaaaagcauggcugcauguuuguauaacgggggaugauaaaaaugcaacugcuagcuucauuuacaaugggaggcuuguagauaguguuguuucaugguccaaagaaauucucaggacccaggagucagaaugcguuuguaucaauggaacuuguacaguaguaaugacugauggaagugcuucaggaaaagcugauacuaaaauacuauucauugaggaggggaaaaucguucauacuagcacauugucaggaagugcucagcaugucgaagaaugcucuugcuauccucgauauccuggugucagaugugucugcagagacaacuggaaaggcuccaaucggcccaucguagauauaaacauaaaggaucauagcauuguuuccaguuauguguguucaggacuuguuggagacacacccagaaaaaacgacagcuccagcaguagccauuguuuggauccuaacaaugaagaagguggucauggagugaaaggcugggccuuugaugauggaaaugacguguggaugggaagaacaaucaacgagacgucacgcuuaggguaugaaaccuucaaagucauugaaggcugguccaauccuaaguccaaauugcagauaaauaggcaagucauaguugacagaggugauagguccgguuauucugguauuuucucuguugaaggcaaaagcugcaucaaucggugcuuuuauguagaguugauuaggggaagaaaagaggaaacugaagucuuguggaccucaaacaguauuguuguguuuuguggcaccucagguacauauggaacaggcucauggccugauggagcggaccucaaucucaugccuauauaa

SEQ ID NO: 57026 - RNA, 1410 nt, Artificial Sequence; identical to SEQ ID NO: 55957
  derived and/or modified CDS sequence (wt) from neuraminidase__InfluenzaA__AHL99393

SEQ ID NO: 57027 - RNA, 1410 nt, Artificial Sequence
  derived and/or modified CDS sequence (wt) from neuraminidase__InfluenzaA__AHL99417
augaauccaaaucaaaagauaauaacgauuggcucuguuucucucaccauuuccacaauaugcuucuucaugcaaauugccaucuugauaacuacuguaacauugcauuucaagcaauaugaauucaacucccccccaaacaaccaagugaugcugugugaaccaacaauaauagaaagaaacauaacagagauaguguaucugaccaacaccaccauagagaaggaaauaugccccaaaccagcagaauacagaaauuggucaaaaccgcaauguggcauuacaggauuugcaccuuucucuaaggacaauucgauuaggcuuuccgcugguggggacaucugggugacaagagaaccuuaugugucaugcgauccugacaaguguuaucaauuugcccuuggacagggaacaacacuaaacaacgugcauucaaauaacacaguacgugauaggaccccuuaucggacucuauugaugaaugaguuggguguuccuuuccaucuggggaccaagcaagugugcauagcaugguccagcucaaguugucacgauggaaaagcauggcugcauguuuguauaacgggggaugauaaaaaugcaacugcuagcuucauuuacaaugggaggcuuguagauaguguuguuucaugguccaaagaaauucucaggacccaggagucagaaugcguuuguaucaauggaacuuguacaguaguaaugacugauggaagugcuucaggaaaagcugauacuaaaauacuauucauugaggaggggaaaaucguucauacuagcacauugucaggaagugcucagcaugucgaagagugcucuugcuauccucgauauccuggugucagaugugucugcagagacaacuggaaaggcuccaaucggcccaucguagauauaaacauaaaggaucauagcauuguuuccaguuauguguguucaggacuuguuggagacacacccagaaaaaacgacagcuccagcaguagccauuguuuggauccuaacaaugaagaagguggucauggagugaaaggcugggccuuugaugauggaaaugacguguggaugggaagaacaaucaacgagacgucacgcuuaggguaugaaaccuucaaagucauugaaggcugguccaauccuaaguccaaauugcagauaaauaggcaagucauaguugacagaggugauagguccgguuauucugguauuuucucuguugaaggcaaaagcugcaucaaucggugcuuuuauguagaguugauuaggggaagaaaagaggaaacugaagucuuguggaccucaaacaguauuguuguguuuuguggcaccucagguacauauggaacaggcucauggccugauggggcggaccucaaucucaugccuauauaa

SEQ ID NO: 57028 - RNA, 1410 nt, Artificial Sequence; identical to SEQ ID NO: 57027
  derived and/or modified CDS sequence (wt) from neuraminidase__InfluenzaA__AHL99429

SEQ ID NO: 57029 - RNA, 1410 nt, Artificial Sequence
  derived and/or modified CDS sequence (wt) from neuraminidase__InfluenzaA__AHL99441
augaauccaaaucaaaaaauaauaacgauuggcucuguuucucucaccauuuccacaauaugcuucuucaugcaaauugccaucuugauaacuacuguaacauugcauuucaagcaauaugaauucaacucccccccaaacaaccaagugaugcugugugaaccaacaauaauagaaagaaacauaacagagauaguguaucugaccaacaccaccauagagaaggaaauaugccccaaaccagcagaauacagaaauuggucaaaaccgcaauguggcauuacaggauuugcaccuuucucuaaggacaauucgauuaggcuuuccgcugguggggacaucugggugacaagagaaccuuaugugucaugcgauccugacaaguguuaucaauuugcccuuggacagggaacaacacuaaacaacgugcauucaaauaacacaguacgugauaggaccccuuaucggacucuauugaugaaugaguuggguguuccuuuucaucuggggaccaagcaagugugcauagcauggucaagcucaaguugucacgauggaaaagcauggcugcauguuuguauaacgggggaugauaaaaaugcaacugcuagcuucauuuacaaugggaggcuuguagauaguguuguuucaugguccaaagaaauucucaggacccaggagucagaaugcguuuguaucaauggaacuuguacaguaguaaugacugauggaagugcuucaggaaaagcugauacuaaaauacuauucauugaggaggggaaaaucguucauacuagcacauugucaggaagugcucagcaugucgaagagugcucuugcuauccucgauauccuggugucagaugugucugcagagacaauuggaaaggcuccaaucggcccaucguagauauaaacauaaaggaucauagcauuguuuccaguuauguguguucaggacuuguuggagacacacccagaaaaaacgacagcuccagcaguagccauuguuuggauccuaacaaugaagaagguggucauggagugaaaggcugggccuuugaugauggaaaugacguguggaugggaagaacaaucaacgagacgucacgcuuaggguaugaaaccuucaaagucauugaaggcugguccaacccuaaguccaaauugcagauaaauaggcaagucauaguugacagaggugauagguccgguuauucugguauuuucucuguugaaggcaaaagcugcaucaaucggugcuuuuauguggaguugauuaggggaagaaaagaggaaacugaagucuuguggaccucaaacaguauuguuguguuuuguggcaccucagguacauauggaacaggcucauggccugauggugcggaccucaaucucaugccuauauaa

SEQ ID NO: 57030 - RNA, 1410 nt, Artificial Sequence; identical to SEQ ID NO: 55869
  derived and/or modified CDS sequence (wt) from neuraminidase__InfluenzaA__AHL99453

SEQ ID NO: 57031 - RNA, 1410 nt, Artificial Sequence
  derived and/or modified CDS sequence (wt) from neuraminidase__InfluenzaA__AHL99477
augaauccaaaucaaaagauaauaacgauuggcucuguuucucucaccauuuccacaauaugcuucuucaugcaaauugccaucuugauaacuacuguaacauugcauuucaagcaauaugaauucaauucccccccaaacaaccaagugaugcugugugaaccaacaauaauagaaagaaacauaacagagauaguguaucuaaccaacaccaccauagagaaggaaauaugccccaaaccagcagaauacagaaauuggucaaaaccgcaauguggcauuacaggauuugcaccuuucucuaaggacaauucgauuaggcuauccgcugguggggacaucugggugacaagagaaccuuaugugucaugcgauccugacaaguguuaucaauuugcccuuggacagggaacaacacuaaacaacgugcauucaaauaacacaguacgugauaggaccccuuaucggacucuauugaugaaugaguuggguguuccuuuucaucuggggaccaagcaagugugcauagcaugguccagcucaaguugucacgauggaaaagcauggcugcauguuuguauaacgggggaugauaaaaaugcaacugcuagcuuuauuuacaaugggaggcuuguagauaguguuguuucaugguccaaagaaauucucaggacccaggagucagaaugcguuuguaucaauggaacuuguacaguaguaaugacugauggaagugcuucagggaaagcugauacuaaaauacuauucauugaggaggggaaaaucguucauacuagcacauugucaggaagugcucagcaugucgaagagugcucuugcuauccucgauauccuggugucagaugugucugcagagacaacuggaaaggcuccaaucggcccaucguagauauaaacauaaaggaucauagcauuguuuccaguuauguguguucaggacuuguuggagacacacccagaaaaaacgacagcuccagcaguagccauuguuuggauccuaacaaugaagaagguggucauggagugaaaggcugggccuuugaugauggaaaugacguguggaugggaagaacaaucaacgagacgucacgcuuaggguaugaaaccuucaaagucauugaaggcugguccaacccuaaguccaaauugcagauaaauaggcaggucauaguugacagaggugauagguccgguuauucugguauuuucucuguugaaggcaaaagcugcaucaaucggugcuuuuauguggaguugauuaggggaagaaaagaggaaacugaagucuuguggaccucaaacaguauuguuguguuuuguggcaccucagguacauauggaacaggcucauggccugauggggcggaccucaaucucaugccuauauaa

SEQ ID NO: 57032 - RNA, 1410 nt, Artificial Sequence; identical to SEQ ID NO: 56885
  derived and/or modified CDS sequence (wt) from neuraminidase__InfluenzaA__AHL99489

SEQ ID NO: 57033 - RNA, 1410 nt, Artificial Sequence
  derived and/or modified CDS sequence (wt) from neuraminidase__InfluenzaA__AHL99501
augaauccaaaucaaaagauaauaacgauuggcucuguuucucucaccauuuccacaauaugcuucuucaugcaaauugccaucuugauaacuacuguaacauugcauuucaagcaauaugaauucaacucccccccaaacaaccaagugaugcugugugaaccaacaauaauagaaagaaacauaacagagauaguguaucugaccaacaccaccauagagaaggaaauaugccccaaaccagcagaauacagaaauuggucaaaaccgcaauguggcauuacaggauuugcaccuuucucuaaggacaauucgauuaggcuuuccgcugguggggacaucugggugacaagagaaccuuaugugucaugcgauccugacaaguguuaucaauuugcccuuggacagggaacaacacuaaacaacgugcauucaaauaacacaguacgugauaggaccccuuaucggacucuauugaugaaugaguuggguguuccuuuucaucuggggaccaagcaagugugcauagcaugguccagcucaaguugucacgauggaaaagcauggcugcauguuuguauaacgggggaugauaaaaaugcaacugcuagcuucauuuacaaugggaggcuuguagauaguguuguuucaugguccaaagaaauucucaggacccaggagucagaaugcguuuguaucaauggaacuuguacaguaguaaugacugauggaagugcuucaggaaaagcugauacuaaaauacuauucauugaggaggggaaaaucguucauacuagcacauugucaggaagugcucagcaugucgaagagugcucuugcuauccucgauauccuggugucagaugugucugcagagacaacuggaaaggcuccaaucggcccaucguagauauaaacauaaaggaucauagcacuguuuccaguuauguguguucaggacuuguuggagacacacccagaaaaaacgacagcuccagcaguagccauuguuuggauccuaacaaugaagaagguggucauggagugaaaggcugggccuuugaugauggaaaugacguguggaugggaagaacaaucaacgagacgucacgcuuaggguaugaaaccuucaaagucauugaaggcugguccaacccuaaguccaaauugcagauaaauaggcaagucauaguugacagaggugauagguccgguuauucugguauuuucucuguugaaggcaaaagcugcaucaaucggugcuuuuauguggaguugauuaggggaagaaaagaggaaacugaagucuuguggaccucaaacaguauuguuguguuuuguggcaccucagguacauauggaacaggcucauggccugauggggcggaccucaaucucaugccuauauaa

SEQ ID NO: 57034 - RNA, 1410 nt, Artificial Sequence
  derived and/or modified CDS sequence (wt) from neuraminidase__InfluenzaA__AHL99525
augaauccaaaucaaaagauaauaacgauuggcucuguuucucucaccauuuccacaauaugcuucuucaugcaaauugccaucuugauaacuacuguaacauugcauuucaagcaauaugaauucaacucccccccaaacaaccaagugaugcugugugaaccaacaauaauagaaagaaacauaacagagauaguguauuugaccaacaccaccauagagaaggaaauaugccccaaaccagcagaauacagaaauuggucaaaaccgcaauguggcauuacaggauuugcaccuuucucuaaggacaauucgauuaggcuuuccgcugguggggacaucugggugacaagagaaccuuaugugucaugcgauccugacaaguguuaucaauuugcucuuggacagggaacaacacuaaacaacgugcauucaaauaacacaguacgugauaggaccccuuaucggacucuauugaugaaugaguuggguguuccuuuucaucuggggaccaagcaagugugcauagcaugguccagcucaaguugucacgauggaaaagcauggcugcauguuuguauaacgggggaugauaaaaaugcaacugcuagcuucauuuacaaugggaggcuuguagauaguguuguuucaugguccaaagaaauucucaggacccaggagucagaaugcguuuguaucaauggaacuuguacaguaguaaugacugauggaagugcuucaggaaaagcugauacuaaaauacuauucauugaggaggggaaaaucguucauacuagcacauugucaggaagugcucagcaugucgaagagugcucuugcuauccucgauauccuggugucagaugugucugcagagacaacuggaaaggcuccaaucggcccaucguagauauaaacauaaaggaucauagcauuguuuccaguuauguguguucaggacuuguuggagacacacccagaaaaaacgacagcuccagcaguagccauuguuuggauccuaacaaugaagaagguggucauggagugaaaggcugggccuuugaugauggaaaugacguauggaugggaagaacaaucaacgagacgucacgcuuaggguaugaaaccuucaaagucauugaaggcugguccaacccuaaguccaaauugcaaauaaauaggcaagucauaguugacagaggugauagguccgguuauucugguauuuuuucuguugaaggcaaaagcugcaucaaucggugcuuuuauguggaguugauuaggggaagaaaagaggaaacugaagucuuguggaccucaaacaguauuguuguguuuuguggcaccucagguacauauggaacaggcucauggccugauggggcggaccucaaucucaugccuauauaa

SEQ ID NO: 57035 - RNA, 1410 nt, Artificial Sequence
  derived and/or modified CDS sequence (wt) from neuraminidase__InfluenzaA__AHL99537
augaauccaaaucaaaagauaauaacgauuggcucuguuucucucaccauuuccacaauaugcuucuucaugcaaauugccaucuugauaacuacuguaacauugcauuucaagcaauaugaauucaacucccccccaaacaaccaagugaugcugugugaaccaacaauaauagaaagaaacauaacagagauaguguaucugaccaacaccaccauagagaaggaaauaugccccaaaccagcagaauacagaaauuggucaaaaccgcaauguggcauuacaggauuugcaccuuucucuaaggacaauucgauuaggcuuuccgcugguggggacaucugggugacaagagaaccuuaugugucaugcgauccugacaaguguuaucaauuugcccuuggacagggaacaacacuaaacaacgugcauucaaauaacacaguacgugauaggaccucuuaucggacucuauugaugaaugaguuggguguuccuuuucaucuggggaccaagcaagugugcauagcaugguccagcucaaguugucacgauggaaaagcauggcugcauguuuguauaacgggggaugauaaaaaugcaacugcuaguuucauuuacaaugggaggcuuguagauaguguuguuucaugguccaaagaaauucucaggacccaggagucagaaugcguuuguaucaauggaacuuguacaguaguaaugacugauggaagugcuucaggaaaagcugauacuaaaauacuauucauugaggaggggaaaaucguucauacuagcacauugucaggaagugcucagcaugucgaagagugcucuugcuauccucgauauccuggugucagaugugucugcagagacaacuggaaaggcuccaaucggcccaucguagauauaaacauaaaggaucauagcauuguuuccaguuauguguguucaggacuuguuggagacacacccagaaaaaacgacagcuccagcaguagccauuguuuggauccuaacaaugaagaagguggucauggagugaaaggcugggccuuugaugauggaaaugacguguggaugggaagaacaaucaacgagacgucacgcuuaggguaugaaaccuucaaagucauugaaggcugguccaauccuaaguccaaauugcagauaaauaggcaagucauaguugacagaggugauagguccgguuauucugguauuuucucuguugaaggcaaaagcugcaucaaucggugcuuuuauguagaauugauuaggggaagaaaagaggaaacugaagucuuguggaccucaaacaguauuguuguguuuuguggcaccucagguacauauggaacaggcucauggccugauggggcggaccucaaucucaugccuauauaa

SEQ ID NO: 57036 - RNA, 1410 nt, Artificial Sequence
  derived and/or modified CDS sequence (wt) from neuraminidase__InfluenzaA__AHL99549
augaauccaaaucaaaagauaauaacgauuggcucuguuucucucaccauuuccacaauaugcuucuucaugcaaauugccaucuugauaacuacuguaacauugcauuucaagcaauaugaauucaacucccccccaaacaaccaagugaugcugugugaaccaacaauaauagaaagaaacauaacagagauaguguauuugaccaacaccaccauagagaaggaaauaugccccaaaccagcagaauacagaaauuggucaaaaccgcaauguggcauuacaggauuugcaccuuucucuaaggacaauucgauuaggcuuuccgcugguggggacaucugggugacaagagaaccuuaugugucaugcgauccugacaaguguuaucaauuugcccuuggacagggaacaacacuaaacaacaugcauucaaauaacacaguacgugauaggaccccuuaucggacucuauugaugaaugaguuggguguuccuuuucaucuggggaccaagcaagugugcauagcaugguccagcucaaguugucacgauggaaaagcauggcugcauguuuguauaacgggggaugauaaaaaugcaacugcuagcuucauuuacaaugggaggcuuguagauaguguuguuucaugguccaaagaaauucucaggacccaggagucagaaugcguuuguaucaauggaacuuguacaguaguaaugacugauggaagugcuucaggaaaagcugauacuaaaauauuauucauugaggaggggaaaaucguucauacuagcacauuaucaggaagugcucagcaugucgaagagugcucuugcuauccucgauauccuggugucagaugugucugcagagacaacuggaaaggcuccaaucggcccaucguagauauaaacauaaaggaucauagcauugucuccaguuauguguguucaggacuuguuggagacacacccagaaaaaacgacagcuccagcaguagccauuguuuggauccuaacaaugaagaagguggucauggagugaaaggcugggccuuugaugauggaaaugacguguggaugggaagaacaaucaacgagacgucacgcuuaggguaugaaaccuucaaagucauugaaggcugguccaacccuaaguccaaauugcagauaaauaggcaagucauaguugacagaggugauagguccgguuauucugguauuuucucuguugaaggcaaaagcugcaucaaucggugcuuuuauguggaguugauuagaggaagaaaagaggaaacugaagucuuguggaccucaaacaguauuguuguguuuuguggcaccucagguacauauggaacaggcucauggccugauggggcggaccucaaucucaugccuauauaa

SEQ ID NO: 57037 - RNA, 1410 nt, Artificial Sequence; identical to SEQ ID NO: 55957
  derived and/or modified CDS sequence (wt) from neuraminidase__InfluenzaA__AHL99561

SEQ ID NO: 57038 - RNA, 1410 nt, Artificial Sequence
  derived and/or modified CDS sequence (wt) from neuraminidase__InfluenzaA__AHL99573
augaauccaaaucaaaagauaauaacgauuggcucuguuucucucaccauuuccacaauaugcuucuucaugcaaauugccaucuugauaacuacuguaacauugcauuucaagcaauaugaauucaacucccccccaaacaaccaagugaugcugugugaaccaacaauaauagaaagaaacauaacagagauaguguaucugaccaacaccaccggagagaaggaaauaugccccaaaccagcagaauacagaaauuggucaaaaccgcaauguggcauuacaggauuugcaccuuucucuaaggacaauucgauuaggcuuuccgcugguggggacaucugggugacaagagaaccuuaugugucaugcgauccugacaaguguuaucaauuugcccuuggacagggaacaacacuaaacaacgugcauucaaauaacacaguacgugauaggaccccuuaucggacucuauugaugaaugaguuggguguuccuuuucaucuggggaccaagcaagugugcauagcaugguccagcucaaguugucacgauggaaaagcauggcugcauguuuguauaacgggggaugauaaaaaugcaacugcuagcuucauuuacaaugggaggcuuguagauaguguuguuucaugguccaaagaaauucucaggacccaggagucagaaugcguuuguaucaauggaacuuguacaguaguaaugacugauggaagugcuucaggaaaagcugauacuaaaauacuauucauugaggaggggaaaaucguucauacuagcacauugucaggaagugcucagcaugucgaagagugcucuugcuauccucgauauccuggugucagaugugucugcagagacaacuggaaaggcuccaaucggcccaucauagauauaaacauaaaggaucauagcauuguuuccaguuauguguguucaggacuuguuggagacacacccagaaaaaacgacagcuccagcaguagccauuguuuggauccuaacaaugaagaagguggucauggagugaaaggcugggccuuugaugauggaaaugacguguggaugggaagaacaaucaacgagacgucacgcuuaggguaugaaaccuucaaagucauugaaggcugguccaauccuaaguccaaauugcagauaaauaggcaagucauaguugacaaaggugauagguccgguuauucugguauuuucucuguugaaggcaaaagcugcaucaaucggugcuuuuauguagaguugauuaggggaagaaaagaggaaacugaagucuuguggaccucaaacaguauuguuguguuuuguggcaccucagguacauauggaacaggcucauggccugauggggcggaccucaaucucaugccuauauaa

SEQ ID NO: 57039 - RNA, 1410 nt, Artificial Sequence
  derived and/or modified CDS sequence (wt) from neuraminidase__InfluenzaA__AHL99585
augaauccaaaucaaaagauaauaacgauuggcucuguuucucucaccauuuccacaauaugcuucuucaugcaaauugccaucuugauaacuacuguaacauugcauuucaagcaauaugaauucaacucccccccaaacaaccaagugaugcugugugaaccaacaauaauagaaagaaacauaacagagauaguguauuugaccaacaccaccauagagaaggaaauaugccccaaaccagcagaauacagaaauuggucaaaaccgcaauguggcauuacaggauuugcaccuuucucuaaggacaauucgauuaggcuuuccgcugguggggacaucugggugacaagagaaccuuaugugucaugcgauccugacaaguguuaucaauuugcccuuggacagggaacaacacuaaacaacgugcauucaaauaacacagcacgugauaggaccccuuaucggacucuauugaugaaugaguuggguguuccuuuucaucuggggaccaagcaagugugcauagcaugguccagcucaaguugucacgauggaaaagcauggcugcauguuuguauaacgggggaugauaaaaaugcaacugcuagcuucauuuacaaugggaggcuuguagauaguguuguuucaugguccaaagaaauucucaggacccaggagucagaaugcguuuguaucaauggaacuuguacaguaguaaugacugauggaagugcuucaggaaaagcugauacuaaaauacuauucauugaggaggggaaaaucguucauacuagcacauugucaggaagugcucagcaugucgaagagugcucuugcuauccucgauauccuggugucagaugugucugcagagacaacuggaaaggcuccaaucggcccaucguagauauaaacauaaaggaucauagcauuguuuccaguuauguguguucaggacuuguuggagacacacccagaaaaaacgacagcuccagcaguagccauuguuugaauccuaacaaugaagaagguggucauggagugaaaggcugggccuuugaugauggaaaugacguauggaugggaagaacaaucaacgagacaucacgcuuaggguaugaaaccuucaaagucauugaaggcugguccaacccuaaguccaaauugcagauaaauaggcaagucauaguugacagaggugauagguccgguuauucugguauuuucucuguugaaggcaaaagcugcaucaaucggugcuuuuauguggaguugauuaggggaagaaaagaggaaacugaagucuuguggaccucaaacaguauuguuguguuuuguggcaccucagguacauauggaacaggcucauggccugauggggcggaccucaaucucaugccuauauaa

SEQ ID NO: 57040 - RNA, 1410 nt, Artificial Sequence
  derived and/or modified CDS sequence (wt) from neuraminidase__InfluenzaA__AHL99597
augaauccaaaccaaaagauaauaaccauugguucggucuguaugacaauuggaauggcuaacuuaauauuacaaauuggaaacauaaucucaauauggauuagccacucaauucaaguugggaaucaaagucagauugaaacaugcaaucaaagcgucauuacuuaugaaaacaacacuuggguaaaucagacauauguuaacaucagcaacaccaacuuugcuguugggcagucaguggucuccgugaaauuagcgggcaauuccucucucugcccuguuaguggaugggcuauauacaguaaagacaacaguguaagaaucgguuccaagggggauguguuugucauaagggaaccauucauaucaugcucccccuuggaaugcagaaccuucuucuugacucaaggggccuugcuaaaugacaaacauuccaauggaaccauuaaagacaggagcccauaucgaacccuaaugagcuguccuauuggugaaguucccucuccauacaacucaagauuugagucagucgcuuggucagcaagugcuugucaugauggcaucaauuggcuaacaauuggaauuucuggcccagacaguggggcaguggcuguguuaaaguacaacggcauaauaacagacacuaucaagaguuggagaaacgauauauugagaacacaagagucugaaugugcauguguaaaugguucuugcuuuaccauaaugaccgauggaccaagugauggacaggccucauacaagaucuucagaauagaaaagggaaagauagucaaaucagucgaaaugaaugccccuaauuaucacuaugaggaaugcuccuguuauccugauucuagugaaaucacaugugugugcagggauaacuggcauggcucgaaucgaccgugggugucuuucaaccagaaucuggaauaucagauaggauacauaugcagugggauuuucggagacaauccacgcccuaaugauaagacaggcaguugugguccaguaucgucuaauggagcaaauggaguaaaaggauuuucauucaaauacggcaaugguguuuggauagggagaacuaaaagcauuaguucaagaaaagguuuugagaugauuugggauccaaauggauggacugggacagacaauaacuucucaauaaagcaagauaucguaggaauaaaugaguggucaggauauagcgggaguuuuguucagcauccagaacuaacagggcuggauuguauaagaccuugcuucuggguugaauuaaucagagggcgacccaaagagaacacaaucuggacuagugggagcagcauauccuuuugugguguaaacagugacacuguggguuggucuuggccagacggugcugaguugccauuuaccauugacaaguaa

SEQ ID NO: 57041 - RNA, 1410 nt, Artificial Sequence
  derived and/or modified CDS sequence (wt) from neuraminidase__InfluenzaA__AHL99608
augaauccaaaucaaaagauaauaacgauuggcucuguuucucucaccauuuccacaauaugcgucuucaugcaaauugccaucuugauaacuacuguaacauugcauuucaagcaauaugaauucaacucccccccaaacaaccaagugaugcugugugaaccaacaauaauagaaagaaacauaacagagauaguguaucugaccaacaccaccauagagaaggaaauaugccccaaaccagcagaauacagaaauuggucaaagccgcaauguggcauuacaggauuugcaccuuucucuaaggacaauucgauuaggcuuuccgcugguggggacaucugggugacaagagaaccuuaugugucaugcgauccugacaaguguuaucaauuugcccuuggacagggaacaacacuaaacaacgugcauucaaauaacacaguacgugauaggaccccuuaucggacucuauugaugaaugaguuggguguuccuuuucaucuggggaccaagcaagugugcauagcaugguccagcucaaguugucacgauggaaaagcauggcugcauguuuguauaacgggggaugauaaaaaugcaacugcuagcuucauuuacaaugggaggcuuguagauaguguuguuucaugguccaaagaaauucucaggacccaggagucagaaugcguuuguaucaauggaacuuguacaguaguaaugacugauggaagugcuucaggaaaagcugauacuaaaauacuauucauugaggaggggaaaaucguucauacuagcacauugucaggaagugcucagcaugucgaagagugcucuugcuauccucgauauccuggugucagaugugucugcagagacaacuggaaaggcuccaaucggcccaucguagauauaaacauaaaggaucauagcauuguuuccaguuauguguguucaggacuuguuggagacacacccagaaaaaacgacagcuccagcaguagccauuguuuggauccuaacaaugaagaagguggucauggagugaaaggcugggccuuugaugauggaaaugacguguggaugggaagaacaaucaacgagacgucacgcuuaggguaugaaaccuucaaagucauugaaggcugguccaacccuaaguccaaauugcagauaaauaggcaagucauaguugacagaggugauagguccgguuauucugguauuuucucuguugaaggcaaaagcugcaucaaucggugcuuuuauguggaguugauuaggggaagaaaagaggaaacugaagucuuguggaccucaaacaguauuguuguguuuuguggcaccucagguacauauggaacaggcucauggccugauggggcggaccucaaucucaugccuauauaa

SEQ ID NO: 57042 - RNA, 1410 nt, Artificial Sequence
  derived and/or modified CDS sequence (wt) from neuraminidase__InfluenzaA__AHL99620
augaauccaaaucaaaagauaauaacgauuggcucuguuucucucaccauuuccacaauaugcuucuucaugcaaauugccaucuugauaacuacuguaacauugcauuucaagcaauaugaauucaacucccccccaaacaaccaagugaugcugugugaaccaacaauaauagaaagaaacauaacagagauaguguaucuaaccaacaccaccauagagaaggaaauaugccccaaaccagcagaauacagaaauuggucaaaaccgcaauguggcauuacaggauuugcaccuuucucuaaggacaauucgauuaggcuauccgcugguggggacaucugggugacaagagaaccuuaugugucaugcgauccugacaaauguuaucaauuugcccuuggacagggaacaacacuaaacaacgugcauucaaauaacacaguacgugauaggaccccuuaucggacucuauugaugaaugaguuggguguuccuuuucaucuggggaccaagcaagugugcauagcaugguccagcucgaguugucacgauggaaaagcauggcugcauguuuguauaacgggggaugauaaaaaugcaacugcuagcuuuauuuacaaugggaagcuuguagauaguguuguuucaugguccaaagaaauucucaggacccaggagucagaaugcguuuguaucaauggaacuuguacaguaguaaugacugauggaagugcuucagggaaagcugauacuaaaauacuauucauugaggaggggaaaaucguucauacuagcacauugucaggaagugcucagcaugucgaagagugcucuugcuauccucgauauccuggugucagaugugucugcagagacaacuggaaaggcuccaaucggcccaucguagauauaaacauaaaggaucauagcauuguuuccaguuauguguguucaggacuuguuggagacacacccagaaaaaacgacagcuccagcaguagccauuguuuggauccuaacaaugaagaagguggucauggagugaaaggcugggccuuugaugauggaaaugacguguggaugggaagaacaaucaacgagacgucacgcuuaggguaugaaaccuucaaagucauugaaggcugguccaacccuaaguccaaauugcagauaaauaggcaggucauaguugacagaggugauagguccgguuauucugguauuuucucuguugaaggcaaaagcugcaucaaucggugcuuuuauguggaguugauuaggggaagaaaagaggaaacugaagucuuguggaccucaaacaguauuguuguguuuuguggcaccucagguacauauggaacaggcucauggccugauggggcggaccucaaucucaugccuauauaa

SEQ ID NO: 57043 - RNA, 1410 nt, Artificial Sequence
  derived and/or modified CDS sequence (wt) from neuraminidase__InfluenzaA__AHL99632
augaauccaaaucaaaagauaauaacgauuggcucuguuucucucaccauuuccacaauaugcuucuucaugcaaauugccaucuugauaacuacuguaacauugcauuucaagcaauaugaauucaacucccccccaaacaaccaagugaugcugugugaaccaacaacaauagaaagaaacauaacagagauaguguauuugaccaacaccaccauagagaaggaaauaugccccaaaccagcagaauacagaaauuggucaaaaccgcaauguggcauuacaggauuugcaccuuucucuaaggacaauucgauuaggcuuuccgcugguggggacaucugggugacaagagaaccuuaugugucaugcgauccugacaaguguuaucaauuugcccuuggacagggaacaacacuaaacaacgugcauucaaauaacacaguacgugauaggaccccuuaucggacucuauugaugaaugaguuggguguuccuuuucaucuggggaccaagcaagugugcauagcaugguccagcucaaguugucacgauggaaaagcauggcugcauguuuguauaacgggggaugauaaaaaugcaacugcuagcuucauuuacaaugggaggcuuguagauaguguuguuucaugguccaaagaaauucucaggacccaggagucagaaugcguuuguaucaauggaacuuguacaguaguaaugacugauggaagugcuucaggaaaagcugauacuaaaauacuauucauugaggaggggaaaaucguucauacuagcacauugucaggaagugcucagcaugucgaagagugcucuugcuauccucgauauccuggugucagaugugucugcagagacaacuggaaaggcuccaaucggcccaucguagauauaaacauaaaggaucauagcauuguuuccaguuauguguguucaggacuuguuggagacacacccagaaaaaacgacagcuccagcaguagccauuguuuggauccuaacaaugaagaagguggucauggagugaaaggcugggccuuugaugauggaaaugacguauggaugggaagaacaaucaacgagacgucacgcuuaggguaugaaaccuucaaagucauugaaggcugguccaacccuaaguccaaauugcagauaaauaggcaagucauaguugacagaggugauagguccgguuauucugguauuuucucuguugaaggcaaaagcugcaucaaucggugcuuuuauguggaguugauuaggggaagaaaagaggaaacugaagucuuauggaccucaaacaguauuguuguguuuuguggcaccucagguacauauggaacaggcucauggccugauggggcggaccucaaucucaugccuauauaa

SEQ ID NO: 57044 - RNA, 1410 nt, Artificial Sequence
  derived and/or modified CDS sequence (wt) from neuraminidase__InfluenzaA__AHL99644
augaauccaaaucaaaagauaauaacgauuggcucuguuucucucaccauuuccacaauaugcuucuucaugcaaauugccaucuugauaacuacuguaacauugcauuucaagcaauaugaauucaacucccccccaaacaaccaagugaugcugugugaaccaacaauaguagaaagaaacauaacagagauaguguaucugaccaacaccaccauagagaaggaaauaugccccaaaccagcagaauacagaaauuggucaaaaccgcaauguggcauuacaggauuugcaccuuucucuaaggacaauucgauuaggcuuucugcugguggggacaucugggugacaagagaaccuuaugugucaugugauccugacaaguguuaucaauuugcccuuggacagggaacaacacuaaacaacgugcauucaaauaacacaguacgugauaggaccccuuaucggacucuauugaugaaugaguuggguguuccuuuucaucuggggaccaagcaagugugcauagcaugguccagcucaaguugucacgauggaaaagcauggcugcauguuuguauaacgggggaugauaaaaaugcaacugcuagcuucauuuacaaugggagacuuguagauaguguuguuucaugguccaaagaaguucucaggacccaggagucagaaugcguuuguaucaauggaacuugugcaguaguaaugacugauggaagugcuucaggaaaagcugauacuaaaauacuauucauugaggaggggaaaaucguucauacuagcacauugucaggaagugcucagcaugucgaagagugcucuugcuauccucgauauccuggugucagaugugucugcagagacaacuggaaaggcuccaaucggcccaucguagauauaaacauaaaggaucauagcauuguuuccaguuauguguguucaggacuuguuggagacacacccagaaaaaacgacagcuccagcaguagccauuguuuggauccuaacaaugaagaagguggucauggagugaaaggcugggccuuugaugauggaaaugacguguggaugggaagaacaaucaacgagacgucacgcuuaggguaugaaaccuucaaaguuauugaaggcugguccaacccuaaguccaaauugcagauaaauaggcaagucauaguugacagaggugauagguccgguuauucugguauuuucucuguugaaggcaaaagcugcaucaaucggugcuuuuauguggaguugauuaggggaagaaaagaggaaacugaagucuuguggaccucaaacaguauuguuguguuuuguggcaccucagguacauauggaacaggcucauggccugauggggcggaccucaaucucaugccuauauaa

SEQ ID NO: 57045 - RNA, 1410 nt, Artificial Sequence
  derived and/or modified CDS sequence (wt) from neuraminidase__InfluenzaA__AHL99668
augaauccaaaucaaaagauaauaacgauuggcucuguuucucucaccauuuccacaauaugcuucuucaugcaaauugccaucuugauaacuacuguaacauugcauuucaagcaauaugaauucaacucccccccaaacaaccaagugaugcugugugaaccaacaauaauagaaagaaacauaacagagauaguguaucugaccaacaccaccguagagaaggaaauaugccccaaaccagcagaauacagaaauuggucaaaaccgcaauguggcauuacaggauuugcaccuuucucuaaggacaauucgauuaggcuuuccgcugguggggacaucugggugacaagagaaccuuaugugucaugcgauccugacaaguguuaucaauuugcccuuggacagggaacaacacuaaacaacgugcauucaaauaacacaguacgugauaggaccccuuaucggacucuauugaugaaugaguuggguguuccuuuucaucuggggaccaagcaagugugcauagcaugguccagcucaaguugucacgauggaaaagcauggcugcauguuuguauaacgggggaugauaaaaaugcaacugcuagcuucauuuacaaugggaggcuuguagauaguguuguuucaugguccaaagaaauucucaggacccaggagucagaaugcguuuguaucaauggaacuuguacaguaguaaugacugauggaagugcuucaggaaaagcugauacuaaaauacuauucauugaggaggggaaaaucguucauacuagcacauugucaggaagugcucagcaugucgaagagugcucuugcuauccucgauauccuggugucagaugugucugcagagacaacuggaaaggcuccaaucggcccaucauagauauaaacauaaaggaucauagcauuguuuccaguuauguguguucaggacuuguuggagacacacccagaaaaaacgacagcuccagcaguagccauuguuuggauccuaacaaugaagaagguggucauggagugaaaggcugggccuuugaugauggaaaugacguguggaugggaagaacaaucaacgagacgucacgcuuaggguaugaaaccuucaaagucauugaaggcugguccaauccuaaguccaaauugcagauaaauaggcaagucauaguugacagaggugauagguccgguuauucugguauuuucucuguugaaggcaaaagcugcaucaaucggugcuuuuauguagaguugauuaggggaagaaaagaggaaacugaagucuuguggaccucaaacaguauuguuguguuuuguggcaccucagguacauauggaacaggcucauggccugauggggcggaccucaaucucaugccuauauaa

SEQ ID NO: 57046 - RNA, 1410 nt, Artificial Sequence; identical to SEQ ID NO: 55922
  derived and/or modified CDS sequence (wt) from neuraminidase__InfluenzaA__AHL99680

SEQ ID NO: 57047 - RNA, 1410 nt, Artificial Sequence
  derived and/or modified CDS sequence (wt) from neuraminidase__InfluenzaA__AHL99692
augaauccaaaucaaaagauaauaacgauuggcucuguuucucucaccauuuccacaacaugcuucuucaugcaaauugccaucuugauaacuacuguaacauugcauuucaagcaauaugaauucaacucccccccaaacaaccaagugaugcugugugaaccaacaauaauagaaagaaacauaacagagauaguguauuugaccaacaccaccauagagaaggaaauaugccccaaaccagcagaauacagaaauuggucaaaaccgcaauguggcauuacaggauuugcaccuuucucuaaggacaauucgauuaggcuuuccgcugguggggacaucugggugacaagagaaccuuaugugucaugcgauccugacaaguguuaucaauuugcccuuggacagggaacaacacuaaacaacgugcauucaaauaacacaguacgugauaggaccccuuaucggacucuauugaugaaugaguuggguguuccuuuucaucuggggaccaagcaagugugcauagcaugguccagcucaaguugucacgauggaaaagcauggcugcauguuuguauaacgggggaugauaaaaaugcaacugcuagcuucauuuacaaugggaggcuuguagauaguguuguuucaugguccaaagaaauucucaggacccaggagucagaaugcguuuguaucaauggaacuuguacaguaguaaugacugauggaagugcuucaggaaaagcugauacuaaaauacuauucauugaggaggggaaaaucguucauacuagcacauugucaggaagugcucagcaugucgaagagugcucuugcuauccucgauauccuggugucagaugugucugcagagacaacuggaaaggcuccaaucggcccaucguagauauaaacauaaaggaucauagcauuguuuccaguuauguguguucaggacuuguuggagacacacccagaaaaaacgacagcuccagcaguagccauuguuuggauccuaacaaugaagaagguggucauggagugaaaggcugggccuuugaugauggaaaugacguauggaugggaagaacaaucaacgagacgucacgcuuaggguaugaaaccuucaaagucauugaaggcugguccaacccuaaguccaaauugcagauaaauaggcaagucauaguugacagaggugauagguccgguuauucugguauuuucucuguugaaggcaaaagcugcaucaaucggugcuuuuauguggaguugauuaggggaagaaaagaggaaacugaagucuuguggaccucaaacaguauuguuguguuuuguggcaccucagguacauauggaacaggcucauggccugauggggcggaccucaaucucaugccuauauaa

SEQ ID NO: 57048 - RNA, 1410 nt, Artificial Sequence; identical to SEQ ID NO: 55880
  derived and/or modified CDS sequence (wt) from neuraminidase__InfluenzaA__AHL99704

SEQ ID NO: 57049 - RNA, 1410 nt, Artificial Sequence; identical to SEQ ID NO: 57011
  derived and/or modified CDS sequence (wt) from neuraminidase__InfluenzaA__AHL99716

SEQ ID NO: 57050 - RNA, 1410 nt, Artificial Sequence
  derived and/or modified CDS sequence (wt) from neuraminidase__InfluenzaA__AHL99740
augaauccaaaccaaaagauaauaaccauugguucggucuguaugacaauuggaauggcuaacuuaauauuacaaauuggaaacauaaucucaauauggauuagccacucaauucaaguugggaaucaaagucagauugaaacaugcaaucaaagcgucauuacuuaugaaaacaacacuuggguaaaucagacauauguuaacaucagcaacaccaacuuugcuguugggcagucagugguuuccgugaaauuagcgggcaauuccucucucugcccuguuaguggaugggcuauauacaguaaagacaacaguguaagaaucgguuccaagggggauguguuugucauaagggaaccauucauaucaugcucccccuuggaaugcagaaccuucuucuugacucaaggggccuugcuaaaugacaaacauuccaauggaaccauuaaagacaggagcccauaucgaacccuaaugagcuguccuauuggugaaguucccucuccauacaacucaagauuugagucagucgcuuggucagcaagugcuugucaugauggcaucaauuggcuaacaauuggaauuucuggcccagacaguggggcaguggcuguguuaaaguacaacggcauaauaacagacacuaucaagaguuggagaaacgauauauugagaacacaagagucugaaugugcauguguaaaugguucuugcuuuaccauaaugaccgauggaccaagugauggacaggccucauacaagaucuucagaauagaaaagggaaagauagucaaaucagucgaaaugaaugccccuaauuaucacuaugaggaaugcuccuguuauccugauucuagugaaaucacaugugugugcagggauaacuggcauggcucgaaucgaccaugggugucuuucaaccagaaucuggaauaucagauaggauacauaugcagugggauuuucggagacaauccacgcccuaaugauaagacaggcaguugugguccaguaucgucuaauggagcaaauggaguaaaaggauuuucauucaaauacggcaaugguguuuggauagggagaacuaaaagcauuaguucaagaaaagguuuugagaugauuugggauccaaauggauggacugggacagacaauaacuucucaauaaagcaagauaucguaggaauaaaugaguggucaggauauagcgggaguuuuguucagcauccagaacuaacagggcuggauuguauaagaccuugcuucuggguugaauuaaucagagggcgacccaaagagaacacaaucuggacuagugggagcagcauauccuuuugugguguaaacagugacacuguggguuggucuuggccagacggugcugaguugccauuuaccauugacaaguaa

SEQ ID NO: 57051 - RNA, 1410 nt, Artificial Sequence
  derived and/or modified CDS sequence (wt) from neuraminidase__InfluenzaA__AHL99751
augaauccaaaucaaaagauaauaacgauuggcucuguuucucucaccauuuccacaauaugcuucuucaugcaaauugccaucuugauaacuacuguaacauugcauuucaagcaauaugaauucaacucccccccaaacaaccaagugaugcugugugaaccaacaauaauagaaagaaacauaacagagauaguguauuugaccaacaccaccguagagaaggaaauaugccccaaaccagcagaauacagaaauuggucaaaaccgcaauguggcauuacaggauuugcaccuuucucuaaggacaauucgauuaggcuuuccgcugguggggacaucugggugacaagagaaccuuaugugucaugcgauccugacaaauguuaucaauuugcccuuggacagggaacaacacuaaacaacgugcauucaaauaacacagcacgugauaggaccccuuaucggacucuauugaugaaugaguuggguguuccuuuucaucuggggaccaagcaagugugcauagcaugguccagcucaaguugucacgauggaaaagcauggcugcauguuuguauaacgggggaugauaaaaaugcaacugcuagcuucauuuacaaugggaggcuuguagauaguguuguuucaugguccaaagaaauucucaggacccaggagucagaaugcguuuguaucaauggaacuuguacaguaguaaugacugauggaagugcuucaggaaaagcugauacuaaaauacuauucauugaggaggggaaaaucguucauacuagcacauugucaggaagugcucagcaugucgaagagugcucuugcuauccucgauauccuggugucagaugugucugcagagacaacuggaaaggcuccaaucggcccaucguagauauaaacauaaaggaucauagcauuguuuccaguuauguguguucaggacuuguuggagacacacccagaaaaaacgacagcuccagcaguagccauuguuugaauccuaacaaugaagaagguggucauggagugaaaggcugggccuuugaugauggaaaugacguauggaugggaagaacaaucaacgagacaucacgcuuaggguaugaaaccuucaaagucauugaaggcugguccaacccuaaguccaaauugcagauaaauaggcaagucauaguugacagaggugauagguccgguuauucugguauuuucucuguugaaggcaaaagcugcaucaaucggugcuuuuauguggaguugauuaggggaagaaaagaggaaacugaagucuuguggaccucaaacaguauuguuguguuuuguggcaccucagguacauauggaacaggcucauggccugauggggcggaccucaaucucaugccuauauaa

SEQ ID NO: 57052 - RNA, 1410 nt, Artificial Sequence
  derived and/or modified CDS sequence (wt) from neuraminidase__InfluenzaA__AHL99763
augaauccaaaucaaaagauaauaacgauuggcucuguuucucucaccauuuccacaauaugcuucuucaugcaaauugccaucuugauaacuacuguaacauugcauuucaagcaauaugaauucaacucccccccaaacaaccaagugaugcugugugaaccaacaauaauagaaagaaacauaacagagauaguguauuugaccaacaccaccauagagaaggaaauaugccccaaaccagcagaauacagaaauuggucaaaaccgcaauguggcauuacaggauuugcaccuuucucuaaggacaauucgauuaggcuuuccgcugguggggacaucugggugacaagagaaccuuaugugucaugcgauccugacaaguguuaucaauuugcccuuggacagggaacaacacuaaacaacgugcauucaaauaacacaguacgugauaggaccccuuaucggacucuauugaugaaugaguuggguguuccuuuucaucuggggaccaagcaagugugcauagcaugguccagcucaaguugucacgauggaaaagcauggcugcauguuuguauaacgggggaugauaaaaaugcaacugcuagcuucauuuacaaugggaggcuuguagauaguguuguuucaugguccaaagaaauucucaggacccaggagucagaaugcguuuguaucaauggaacuuguacaguaguaaugacugauggaagugcuucaggaaaagcugauacuaaaauacuauucauugaggaggggaaaaucguucauacuagcacauugucaggaagugcucagcaugucgaagagugcucuugcuauccucgauauccuggugucagaugugucugcagagacaacuggaaaggcuccaaucggcccaucguagauauaaacauaaaggaucauagcauuguuuccaguuauguguguucaggacuuguuggagacacacccagaaaaaacgacagcuccagcaguagccauuguuuggauccuaacaaugaagaagguggucauggagugaaaggcugggccuuugaugauggaaaugacguauggaugggaagaacaaucaacgagacgucacgcuuaggguaugaaaccuucaaagucauugaaggcugguccaacccuaaguccaaauugcagaugaauaggcaagucauaguugacagaggugauagguccgguuauucugguauuuucucuguugaaggcaaaagcugcaucaaucggugcuuuuauguggaguugauuaggggaagaaaagaggaaacugaagucuuguggaccucaaacaguauuguuguguuuuguggcaccucagguacauauggaacaggcucauggccugauggggcggaccucaaucucaugccuauauaa
